United States Patent Application Publication US 2024/0084332 A1 - sequence listing, part 8

SEQ ID NO: 32404 - protein, 425 aa, unknown
  TnpB Polypeptide
MSNITLVAESKLYVKDNPSLYTYFDDYSKLFNFLVRRCVHHLQHKLNGVSESQYRTDLMIKFDLTNRMAKAVIRTAKNQLKLLTESARYQFNNLYKRRKSLYKNIQKYKSMLSLNSTSLKQRKVIKLRLFWTQMKLNKVNQLIANGLKLHFTFGTKHLLKTNKQKFFAKRDNQVVYIGEKNETCRNQQFQVQFNSKYNRFDYKLRLDNQWVLNSEKYIFGSFVLKNKEAKNDILKTLSKKKSNPLTYRILKREGTLYLQIMYRRETIDITRANHGVLGVDFNKGFISVSETNSVGDLKSLTRYNYLHKGKATKTRTSMLELVSELVAQAVGVGKDIIIEDLVSLDSNKKQGKTTSKEYNRMINSLKFGLFKRCLLSKATKEGVVVHSVNPYNTSKIARKSYTNKMKLNVHDAASYVIARRFYQYD

SEQ ID NO: 32405 - protein, 456 aa, unknown
  TnpB Polypeptide
MKQIITAKLKLIPTKEQHRALRETQLAYRDGLNAVSQYAFAHGKTSSVTKIHKGMYAELRARYHLPSQLACAAVRQVAATYKGLWTKLLKNKEHRRMKITKKRFKGLDKPPHYSSPTVQYTYERDYTFQCEQQVSIKTLNGCISLPYQGYFKHLLLIQQGGHIARIGDAKLWYNQSKKQFYLLVSLDLTLPDPSCDSLSETVGNDVGVRYLAVTSTTAGKATFYPGKRVRHQANHYARLRKRLQQKGTRGAKRRLRRIGLRERRLKLQANHQIATQIVQEHPQALIGLEQLTGMRERTKRRKRKRKKNGKGYEPVSPKARKANRVYSQWSFAELHTLISYKAALAGSLAVKVDADYTSKGCPMCGYTADENRPNKGLLFTCQNPTCGYILHADLVGARNITMRTLVLRQDWSTTGLLSMAPDASDREAKAARLRRYAELRWSPEVSPSLRSETGGS

SEQ ID NO: 32406 - protein, 402 aa, Frankia sp.
MSRFRLYPDVAQEEALLVHCGHARFVWNLCVEQQSWWNPWRGPAPGYAEWNRQLTAARGACDWLAAGSVIVQQQALRDFATARANFFGGSHRRPTWRRRGRGEGFRIVAVRSGDVRQVTRRWSQVRIPKVGWVRFRRSRTVPDARSYRVTRDRAGRWHVAFATVPDPIPAPGTGGIVGVDRGVAVSAALSTGELLRCPGLRPGEATRLVRLQRRLARAKRGSHRRARLVGQIARVKAREAARRKDWVEKTSTSLARRYDLIRVEALPVGAMTRSAKGTVAEPGRNVRQKAGLNRSILAHGWGLLVARLEQKAPGRVEKINPARTSQTCNTCGTRDGEARESQAVFRCRACGQQANADVNAARNIALGHQWETTWVTARGGDAGRRPANREPQHCTPPLLVDG

SEQ ID NO: 32407 - protein, 405 aa, unknown
  TnpB Polypeptide
MNTTTAKRAYRFRFYPTPEQEQTLRRTLGCCRKVYNMALDARSEAWTVRHESVSYEDTSRMLTDWKKTKEYAYLREVSSVPLQQSLRHLQAAYRNFFAKTGDYPRFKSKKNGGAATYAASAFTWDWNKRELTLAKMRDPLPIHWSRTLPRKARPSTVTVSLDPSGRWHVSILVEEEVKHLPASPNKVGVDLGTEHFAILSTGEKIPNPRHLNHYQKKLEQAQQTLSRKQKGSNNHRKARLKVAKAYAKVKDCRNDFLHKLSTRLIRENQTVVIEDLAVENLTRRCAPKPDPEHPGHYLPNGQAAKTGLNRSILDTGWRQFRTMLEYKAQWYGRQLTVIDRWYPSSQICSTCGYNSGKKPLNIRQWDCPKCGTHHDRDINAAKNILSAGLAVRACGDPRTAEATLR

SEQ ID NO: 32408 - protein, 411 aa, Oribacterium sp.
MIAQRVEKHLIKHNSPFYSMFCDFTHKSKNLYNHANYLVRSEFVKNDKWLRYGDMDKLLKADLEFDDYRQMPTAQSAQQILRLLEKDWKSFFTAIKDWSKHKDKYLGRPKLPNYKPKDGKHLLILTNQNVKFKDGTLCFPKVFNGFTLKPRFAESENFQSFQQVRILPGYRHFVVELIYNINIPDKTMDDNGKYLSIDIGIDNLATITNNFGKTPVVINGKGLKSMNQYYNKMISHYREVAKRMNDSDYTKRMAALTRKRNHKIDDYMHKASRYVIEYAVSMGTNTIVIGNNKEWKQDSKLSKSVNQSFVGIPQKRFIEMVQYKAQDIGLNVILQEESYTSGTSFLDKEEPVKANYNKSRRVSRGLFMSNKGIRINADVNGSYQILMKVFPNAFAEGIEGVALHPIRVNVA

SEQ ID NO: 32409 - protein, 389 aa, unknown
  TnpB Polypeptide
MLRAYKYRIYPNKEQAEMFVEHFGACRFVYNWGLQLKTETYQQASKTLSYYDLNNLLPKLKTEHVWLKNVNSQSIQSALKNLESAYTKFFREKKGFPKFKSKHNPKQSFQCPQHCSVNWESGTLSIPKIKGIKAKFHRKFDGEIKTVTVSRNAVGHFYVSILVENSQPLPPKAALSADDAVGIDVGLSRFLTASDGMIVANPKFLRKSEKRLAYEQYRLSKMKKDSASRAKQKKRIARIHEHISNQRRDFLHKVTSRLVGESQATTFCVEDLSVKNMQKNRCLAKSIADVSWGMFFDFLKYKCEWTGKNLLDIGRFEPSSKMCSACGAVNKELKLSNREWLCSCGAKHDRDVNAAENIKRMAFQKQNLIRCIGLEQPESTPLDTVAIDT

SEQ ID NO: 32410 - protein, 373 aa, unknown
  TnpB Polypeptide
VNITLKVKLNTNEIHHSALLRTMNTFNDVCNELSTIAHSTETYNKVQLQRNAYHGMRETHPSFSSQLIIRAIDVVTATYKKKRSKNPNYFKKTSAVVYDDRVITFKGTDLVNIWTNDGRINIPIQIYDKERFKYRKGQVDLVYQNGKFYLLCTLEIPTESAYNAKDVIGIDLGVKQIAVSSLGDVFSGEHIEKKRKQYHSHRQRLQKRGTRSAKRRIKKCGQKESRFRKDTNHVISKLLVTKAKALGYALALEELTHINKRVTVRRVNRSQRMSWAFAQLRSYITYKAELYGVPLAIVPAHYTSATCSECGYCEKANRKSQTVFLCMSCGHTENADFNASKNIGSLGEQSTSLLFAQPKAELVASHTPCACGS

SEQ ID NO: 32411 - protein, 376 aa, unknown
  TnpB Polypeptide
MVKAIKVMLIPNNVQKTKMFQYAGASRFAYNWALAREIENYEKGGKFLSDAELRKEFTKLRHSDEYAWLLNISNNVTKQAIKDACTAYKNFFKGLQKFPRFKSRKRSMPKFYQDNVKIQFSNTHVKFEGFSSSRKANKQKMNWVRLAEHGRIPTDVKYMNPRISFDGLNWWISVCVEFPDCRETLNDDGVGIDLGIKDLAVCSDGTKYKNINKSQKVKKLEKQKRRLQRSISRSYEKNKKGESYCKTNNVIKKEKLLLKRNHRLTNIRKNYLNQTISEIVNRKPRFICIEDLNVSGMMKNRHLSKAVQQQGFYEFRRQMEYKLSIPDQFTEKLYVPIQHYMVWSASFLRRIQQGSVRLYISYVMVAMLLVLIWGAM

SEQ ID NO: 32412 - protein, 409 aa, Lentzea sp.
MAESVVKRAFKYRFYPTSAQEQELLRTFGCVRLVYNRALEVRTEAWSQRRERVGYVQTSALLTGWTKSGEYAFLTEVSSVPLQQCLRHLQGAFASFWEKRAKYPRFKSRKRGKASAEYTRSAFRWRDGQLTLAKMTEPLDIRWSRPLPEGAEPSTVTVSRDPAGRWHVSILVETTVEHLPPSTTAVGVDAGITTLLTLSTGEKITNPKHGDRDRARLAKAQKALARKQKGSRNRIKARLWVARVHARVADRRRDHLHKVSTRLVRENQTIVIEDLAVRNMVKNARLARAISDASWAELRAMLDYKARWYGRRLVAIDRWFPSSKTCSARGHLLDRLPLTIRTWTCRCGTVHDRDINAARTILAAGLAVTACGDGVRPTRHQSARQLSKPPSEGKKQELSGASPMGNPPP

SEQ ID NO: 32413 - protein, 412 aa, unknown
  TnpB Polypeptide
MRSQKLRLKLTKEQENKAWWFSKVSRNCWNLLVDIDKRNNNGEFDEILSRNGNKTYHSNFYDREIYHLNSSDYRNLARIVIDKNYEEDSEKWSWYYQPNQSFIYNFLAREVMKIRRQNKGQLKFRSIDKIQPNFNVTCCISSNKKRPSRIYLKDNGKLQIPTLGDVRFGSTRKDFDLSCKKQIATISFDGKHWYLSYTEDIEPQVTDLPDYTEGVGVDLGIKTLATVSDGTTVPNIKTFRRVRILEKRLKRLQRKVSRKYLINKCNKHNKTKNIIKLERQIKLIHRSIRNIRINHIRKFVSELVKTQPEFIAVEDLNVKGMMKNKHLAKDIANCSFYTIREHLIRKAKERHIAVRLVDRFYPSSKTCSYCGSYKKDLKLSQRVYHCDNCQETIDRDLNAAINLANTDKYVLA

SEQ ID NO: 32414 - protein, 368 aa, unknown
  TnpB Polypeptide
MRRTFKYRLYPSKSQIFKMNNIFEHTRWVYNKTLALRKDAWESDKATISLYDSSNELTKWKTQNPILKRVHSQVLQNAQLRVDLAFKAFWRRCKAKENPGFPRFKGRGQYSSITYPQDGFRIHPDHTVYLSKIGRVKIILHRSTEGMIKTCTIRRTPANKWYVYFSCEVEIPKPLPKTGKIVGIDLGLITYVQCSDGFKINKPKFFKQEQKSLAQVQKRFSKTKCIKHKHSVALVHERIKNKREDFCHKAAKKLVKKYDFIAHEDLDVQNMLEQKKFSKSISDASWSMLIQILTYKAENAGRTVVAVDPRGTSQRCSQCGVDVPKDISVRVHHCPRCGFKASRDINSALEILRLGLQSVGSVKVHKSP

SEQ ID NO: 32415 - protein, 548 aa, unknown
  TnpB Polypeptide
MAKESNVFVVERRIYTTKNDEVFLDKKLNICNKIYNTSVKYCIKKLEELKQDIWFLKSMEEYKKYSKLIKEIENKLKEIDINISTKKLNNYSNKLKSFKSNKSLWLREINICIEAYGLSEYSIHSYMAYQKKKAFNKGIGINIVQKLGTNLSKSVNKAIFSGTKIHYRKYNQTSSFEDKRANSGIIYFPNDIIKVMGKIMKLKPIREKDIYLQEAMNSTIKYCRIIRKPFKNKYKYFLQIIMEGSAPKKIKLGIGKCGLDEGTSTIAYYNDTKASFYVLCENIKKYEKEIKEYTIKYERQRRLNNPQNYDENGKIIKGSRFKNTKNTIKTLMKLKNAYRKKSKYIKQNNNYLVNRLLEQCDLIIKEPMNFKALAKRAKETKKSDKISTSTKKDESKKQVTKSTCSVATLYKKKKRFGSSINKRAPGYFNSRLESQIKRYGGDFIDIDIKNYKASQYNHITKEAKKPKLSERTKLIGKDIVQRDLYSAFLLYCYKDKSHINFDECEKLFKDFLNKQEQTIKEERMLYNYAIKEKEELDKAHKNFGLNDF

SEQ ID NO: 32416 - protein, 435 aa, unknown
  TnpB Polypeptide
MPLTLNTKDFTFSGRSLSITKDKNKLLEPYHKQIWNYGIKLMLLPTNEEKEKINRQIGNARFVRNTYLNDRINYYNETKKTLTVSLYKKEYLPKLKKENEWLLESDKFALESTIEHVDNAYNNFFENIKKGKKSKSLGFPRFVSKYKPNGNKYTTKSTNNNIDFIEKEKLPYVKLPKLGLIRIFIPKSKIFNELKPNGTRILSACISKEGNNYYVSLQMEVVIDKVSPLKYFDSSKIYACDMGIKHFIIFGNEDFTKFIDNPRWIKIHQKRVRRLQKSLSRKQYNNTTHTGSKNYYKAKEKLAKEHRKIRNQRHDFHHKLSRQIVNECNVFICEDLNIKGMVKNKHLSKEISSCGWGTFLNFVKYKLEHKGGIFIKVDRFFSSSKLCHKCGYKNKDLTLKDRVWTCPICKETHDRDENAKFNLLKEGKRLLETTI

SEQ ID NO: 32417 - protein, 404 aa, unknown
  TnpB Polypeptide
VLAKKSVKQNYSPSTEVLELLDLFRRMVNRCIVIGLSQNVSSLKSLCLLSYRELKGYPSPSCYKLCAISRAAGILASRKKSLRRGFATKSPYAVKPLLISCYNFKIQNGHLQIPIGRKAYETIPLTKHTALVLSDKTLRVRSFTLTATTLSLCISKEVVTLECTGTVGVDRNLRNLTCGDEETVIQYDLSMAVEIANTTVSIVSSFKRNDRRIGQRLAMKYGKRRQNRALNLLHNATKSIVHRAFEEKKAVVLESIRGIRRLYRKGNWQGKSFRGRMNGWSFGKAQSQIEYKAAWIGLPVVRLSRRETFGTSSICPKYGERLQSDGRPRRALRCWKCEIWVDRDVVAAINISRCGRLRFDRSKGEAAEALIGNPTPTVIPGVDASKPTHLAKVSGTMLSSTDHH

SEQ ID NO: 32418 - protein, 398 aa, unknown
  TnpB Polypeptide
MYIRQNFRIYPTKEQQQFFLQDIGNQRFIWNYVLGKSIEKYKQENKFIWYNEAASLLPELKKELEWLKLGNSQALQQTLKDLDQAFKVAFKKAGQRSGFPKFKKKSHGGSCRYPSGCVIIGNTISVPKLKTKIKIRGKNLPNEVKSVTIILRPSGKWFISCVVEIPEVEKVQINENSKAVGIDLNSRFFAVLDTGDAVVNPKHLLKKEKALKRYQRRMARKVKGSKNREKQRIKVARKHEQVANQRKEFVEQVTMQIAKEYDIICIEDLNVKAMQQWNGRMIQSAPFAMFRSKLTWKANKYGKHLIVIDRFVPTSKVCNECGQIHDMSDLNDRWLSCDCGLEMHRDHNAAINIRYIGLSTVGTTGIYASGDTKVHGLDVHGIRWVSLKEENTRSLDVY

SEQ ID NO: 32419 - protein, 414 aa, Rhodococcus sp.
MRAAWFTPECRSCGDRCGGSVVTPTAVLADPGDHVTAPAPGAALDQAADSSRTVIRAYVFVLEPTPEQASVLRSHCGAQRFAYNWALSQVKANLDQRTAERSYEIPDAELTPPVSWSAYGLRKHWNTVKDDVAVNTDTGQVWWPENSKEAYSSGLANCAAALSNWSDARSGKRRGPMGFPRFKGKRAVLSCRFTTGSFGLVTDSGDRRHIQLPRIGVVRSAESTRKLARKTIAGTARIRSATLSFRRGRWQVSFSVEIALPARALSPATTGTSAAVGDCGVVVGVDVGVKHLAVLSNGEMIENPTHARKHAKQLRSLGRRASPPCRPGSSHRSTTLPALAAHPGTDPGGAHPHREQSPRSPAQTHHPTGAGLRYRRRRRPQRRGNDPFRWRLQAGVEPGSAGCGVRRDPATTDL

SEQ ID NO: 32420 - protein, 273 aa, Streptomyces sp.
LNNRHNLAAAQLTETEWHKRWEAERWFLTADGESGKRFGNKTIRVTPDGEVSIKLPTPLAHLANSKHGRYTLSSTVAFAHRGDKWRDRIESNRAVAYRIHLDVQRGRWYLKASWTRPVVKTVPLETARAKGMVGVDTNADHFAAYRLDRHGNPVGDPRRFSYDLSGTADHRDAQIRHALTRLLHWTKQTGAEAIGIENLDFTAEKTREKHGRRKRFRQLISGMPTGKLKARIVSMAAETGSVDRRGRSGLHLDVGRPALAQAPHQQDSSHDSP

SEQ ID NO: 32421 - protein, 388 aa, Mycobacterium sp.
LLPSPEQAAALVEHCRHARFVWNLAVEQQRHWQPGRKAPAYNEQCAQLTAVRAEYEWLAAGSQTVQQQALRDFAQAMRNFFHGTHRRPTWRKAGTHEGFRHVGIKPRHIKRLSRRYGQAWVAKVGWVRFRWTRAIPDTVKSYRVTLDRSGRWHIAFAAIPEPVPGPGDGVVRVDRGVAVSVALSSGELVRAPGLTVGEADRLGRLQRRLARARCGSNRRTRAKRAIARLRARETDRRRDWVEKTTTDVARRFDTIRVEDLDVRAMTRSARGTRECPGTNVAQKRGINREISRQGWGLLVTRLKHKALRRLEFVPAAYTSQRCSRCGHVAPENRKSQAVFQCVACDTGPCNADVNAARNIAAGRAVTARGDLGTSRSMNREPQLCSPAA

SEQ ID NO: 32422 - protein, 417 aa, unknown
  TnpB Polypeptide
MKLTKRFRIKTDERLLAICKVANNLYNQTLYYWQQRRDNDNEYLNYYALRDEMRNVPNLEGTKNYYLMNAHVSEFVIKLAYDAIDSFYKQIKDWKQHPEKYRAKPEFPHYHKSGGFTEVQFDAHEFKIKDGLIIYNKKKGYGIPIPQRDKWEERFKRAKIVRVLPNQDYMIIEVVYEAEVQQANVDIQNVAAIDLGVDNLATLVSASGCTIYNGKPLKSYNQYFNKKLAKAKSILDKQQPERRSSKRIRQMYDKRDRYIDTYMHTVSCRIVEKLVVEHVGLLVVGRNKGWKQEANMGKVSNQRFTQIPFFKLQDQLRYKCEMVGIKYVEQEEGYTSKCDALAMESIENHDSYEGNRKKRGLFQSSTNKLINADQNGALNILRKYLGDELYKEATKDWKLPAPIYIVNNFIKQEQINE

SEQ ID NO: 32423 - protein, 367 aa, Eubacterium sp.
VLKAYKYRIYPNKEQKIQIAKTFGCCRFVYNRTLAYRKEKYGNGKESVTKTDCNNYCNRELKKKYEWLKEADKFALTNAIYNMDAAYRKFFKEHAGYPKFKSKHDNHKSYTTNFTNGNIAADFEHGKIKLPKLKTVKAKLHRKFTGKIKSATISQVPSGKYYVSVLVETEHEELAQTGRNIGLDLGIKDLCISSDGKRYENAKIIRRHEKKLAKLQRQLSHKEKGSNNYYKQRRKIALCHEKITNTRKNNLHKISYKIISENQVIVTENLQIKNMVKNHHLAKSITDASWYELTRQLDYKAKWNERKYIKIDTFYASSQLCSVCGYQNEEIKNLSVREWTCPDCGAKHDRDVNAAKNILAEGLRQIA

SEQ ID NO: 32424 - protein, 388 aa, Bacterium sp.
MLTYEYNIYRSERNRHLDLMLAEAAFVWNHALALQRRYYSLFKGYVGTVRMQKHFQKRIARCRLGAQTTQEILQRLDASYQRFFSHLAKRPPKFRKAAQFGSFVFKQDGFKLNSNILVINKIKKHFKFSYSRPYEGSVKNVRIKRVHPGEYRLFIVTDSAPEPCHKTHDGAMVGMDFGLKTFLTLSDGTAIDAPLWYKTNLRMLQKLQHSLDRAECRWSAVNPDGSHPKGSHIVWESNHRKALKNDIARLHERVSNLRDDWQWKLCHELCRKYDTLCIEDLNIDGMKRLWGRKVSDLAFFGFVLKLEQVASKYGCEIRKVDRYYASSKTCGHCGYVNKELTLRERRWKCPDCGAVLDRDLNAAENILRQGIASSGSPRKTKVILRKGR

SEQ ID NO: 32425 - protein, 384 aa, unknown
  TnpB Polypeptide
MRAYKFRIYPSKKQEELLNHHLWLAKNLWNELLEECKRMYENFSYFPTKNTLQLMVKDYGLYSQTQQEVAHRVHNSVMRVFILKKKGLKCGFPRFKSFDRMKSLHYPQYEFGFSLDKKLKVTPFGEIPIKKHRKIKGEIKTLTLKKEASGKWFAIFCVETPEEIPKENRGEKIGIDLGLMRFATLSNGMKIDNPRYFKKYEDRLAFIQRKSSFHKKRTKNYKKAKIRVAKLHEKISDCRRDFLHKISTELVNNYSFIALEKLASQEMAEENYGKQINDAGWNMFANMLAYKAEGAGCMVVFVNPGNTSKMCSGCGNIKDNLTLCDRIYSCPKCGLSTDRDLNSAHNILIRATPGQGGSNACNSLHKERDVAVATSVKQEARTYL

SEQ ID NO: 32426 - protein, 514 aa, unknown
  TnpB Polypeptide
MEQLSLFVPSLIAADITLSPTSVWKKESSPSVIVVSQVPNFDPISKDKSNLCEQNTRKLKSSKTLEAGSTISVKGLNPYWDEQCEEINSKLWLPIETGLLDSGSSLSNGLSSKTVEESWFSSKLIFPQNKSLPTTFSASSMFSHVGCTHDEITFTKSVKLYPTPKQRQIFKKWQDCSRYVFNQTIDYIRSCVNFSPSWMDIKKDLLKQLPKWCGDVPFQIKSIAVREAHQAYWKAKGHPRFRSRKAPTQSCYIPKSAIFKDAGIYPTISGQGLRYSESLPETPLDSRLVYQYGELFLAVPHKITTHVAENQGRVVALDPGVRTFQSFYSEHLAGQIGYDDFGRIQRLCYHLDSLISRTSKATGKAKREMKRAQARIRKRIKNLIKEIHFKTARFLVDNFDVILLPTFESSQMVGKSTRKLRSKTVRAMLTWAHYQFKVRLKNKALELGKKVIDVCEAYTSKTVSWTGEIKNVGGSRVISSSGITLDRDLNGARGIFIRSLVDSPTLRSAIVNVC

SEQ ID NO: 32427 - protein, 433 aa, Halorubrum sp.
MEDAIRTVKVKLNVPTERCDDLHQTKDQFLHCANTTSEWAWRHPNDYCVTSKQKAENALYDRLRDETELTANLVQKGIRRAIEATKSGVARLEKGEKTSQPQFDAWSVVYDKRSATFHRDHVSLSTVNGRVECDYVLPDDPEDTPIGEYLLNEDYEFRMSTLQYDRSTASFYLHARMRRTTDKQDQFTTTSDDAKHRTVLGVDLNVDGSLAVTSTGAFIGNADEMNHRRREFEKTRGSMQQTRTRSAHLSIQSMNDREHRWIQDELHRASNRILDEARNHGCTHIAFENLTDIRTRMGGGKRFHAWAFRRLFEYVEYKAEMDGIEVARVSPAYTSQRCSSCGFTHEGNRRSKHQFVCQKCEYELNADYNASKNIARKLLKRLHSGQTSSSGGAPCQCALKSGTLNLNGEFHASVDSTVEGESTDKPTTSVVGH

SEQ ID NO: 32428 - protein, 511 aa, Chloroflexi sp.
MSSIRSRKHAGGVYTLHYPLVWCPKYRRKVLHGEIANRLKALMHEKADALGVTMEGLEVMPDHVHLLVSAPPTEAPHQLANPFKGSTSRVLRDAVPGLNSRLPSLWSRSYAVGSAGHGSADPIQQSIEPQKRSEAVRKAFKYRLYPTRQQDRAMSAMLETHRRLYNDALAARKQAWEQEQRSVSYGEPSGQLKSARKTNRFLAATNFSSCQATLRRLDRAFQAFFRRVKAGETPGHPRFKSRNRFATVEFPSVGDGCRFDGRCVSFQHIGRVKIKLHRPIEGQITTISSKREADGWYVVCSCDLGDVNPTPADGPAVGIDLGLKAFLVTSEGERVAPPHSYRQAQAALRRAQRKVARRQKGSTRRAKAVHALHKQHQRIGNRRRDFHHKTARALVTRYGTLIHEDLNMRGIARSRLAKSTRDVAWGSFLHILSYKAEEAGVTVMAVPPHQTTQACSRCGALPKVLKTLADRVHSCSYCGYVADRDLNAAQNMLRLGSSLQDNTCADGQCVS

SEQ ID NO: 32429 - protein, 381 aa, unknown
  TnpB Polypeptide
MLTTVKYRIYPNKEQEVLIKKNIGCSRKIYNLLLHDYNNTKKLNKVSSYKNTYPYLKEADSLALANSLQNLKQAITNHYNNPKHFGLPVFKKKYKSKQSYTTNNQKGTIYIENGKIKLPKIEKAIKIKVHRIPNGVIKNVTIERTTIGTYTVAVLFESEDKPKELKLNKENTIGIDLGLTHLAITSNGVKYDNHKYFQKSQNKLKKEQRKLSRIYESNVKEKHYNEKGHVTKIIYKIPLNEHKQYQKQRLKVAKMHYKIKNQRLDTLHKLSTNIIKNHDYIVLKSLDIKNLIEDTDLSKYISDVGWRIFINMLKYKSVKYGKELIQIDQYFPSTQKCSNCGNISGKKSLDIREWTCSCGVTHDRDINAAINIKQQGLLQII

SEQ ID NO: 32430 - protein, 408 aa, Crocosphaera sp.
MRLVERHIIKKNHRFYAEIDRLCFLSKNLYNYANYLCRQSFIFENTYRNYYDIQKTLQSQLDYQAMPAKVSQQVLMILDRNWISFKESNLAYKETPSKFKARPRLPGYKHKIKGRNVVVYKAQAISKKQLKQGIINPSKTAIYLKTKVETSKIKQVLLVPRLNHYVIEVIYEAEKQQYELEENSYASIDIGLNNLATLTFNQAGIKPLLINGKPLKSINQYYNKVKSELQSILGENKSSQKLKKLCNKREFNINDYLHKASRLIINTLINQKIGTLIIGHNTDWKQKINLGKRNNQNFVSIPYNKFIEMLSYKAEMVGIKIIITEESYTSKASFLDNDPLPVYQKGQKNQVTFSGKRINRGLYRTGKRKLINADVNGSLNIMRKAVPNAFGHGIEGVVVHPVRVTPAK

SEQ ID NO: 32431 - protein, 377 aa, unknown
  TnpB Polypeptide
MLQRKGGDLSMKQNKSFKFRLYPTLEQASFFNKTFGCCRLVYNVMLSERNESYKSTGKSSSRTPAELKKEFPFLKEVDSLALSNEWTNLNSAYRNFFRDAKVGFPKFKSKKNNKKSYTTFNQYGTVKVLNGFVRLPKVGFIKCKTHREIPAEWKIKSATISQTPTGKFYISILCEYESNIQQIIPNKTKSVGIDYKSNGFGVTSNGEILSSHRYFRENQSKLAMEQRRLSRKKKGSKNYERQRLKVAKVHEHIANCRKDRAHKLSYYFAENYDVVCLEDLNLQNIAQNLKLGKSTNDNGFGIFRAILSYKMQDEGKYLIYIDKWGATSTVCSTCGSYHKDIVNSLAIREWTCPDCGTHHDRDINAAKNILKLGLEKL

SEQ ID NO: 32432 - protein, 375 aa, Geobacillus sp.
MEQEYRRTKTTERYVESQKKRGESMPTITLRLELHNPTKVKQDMYERMTEVNTAFANWLLNHPKLNQATSKLFKEFSSQRFPSAVVNQTIREVKSQKKKQKAKKFRTFWCCFNNQNIKVEKKGAFYTVSFPTMEKRIGVPVVTRPYQEAWLDRLIHGTAKQGAAKLYKKRKKWCLAIAVAFEVKPRHETKVMGVDVGLRYIAVASVGTKSLFFKGNQCAFVRRRYAALRRTLGKAKKLHMIRKIGRKESRWMKDMNHKISRQIVRFALANGVGVIRMEDLAGIRKRAASAKEAGRNLHSWAFHQLQTMIAYKAEMAGIRVEWVNPTYTSQTCRCGYRDKGNRNGIHFQCQKCGYTIHADLNGAINIAKAISGFAA

SEQ ID NO: 32433 - protein, 351 aa, unknown
  TnpB Polypeptide
MVKATKVIKAKIVYLTKIKEKLLSEEYENLQKFLRGEKNVKLYSANKQQAKRYYKKIKPNKEYPLSIRKDLIKVEKRDTKIAKYWVRIPVAGRRGGIWVAIKPHEDVLSEYRIGESKVFRRNGEWYIHITVFKEVEIKESYSHALAVDIGERVMACVCGTWNSLKPIFYGKEIREIRRHYAWLRRRLQEKKLLKKVKEIGNKEHRIVNDILHKISREIVNIAKEHNAVIVMGKLNGIRKAAQNKGKRMRRLINSWAYYRLQKYIEYKALWEGIRVIYIDERETSITCHRCGARGKRKTQRCFECLNCGLRDFNADLNGARNILKRFFAYMVRNGGAVNHPLTVPVHGSHRS

SEQ ID NO: 32434 - protein, 430 aa, unknown
  TnpB Polypeptide
MKLTYVYRIKPTAEQATIMDWWLELLRRHHNYALGQRLDWLRRTRCQIDRCSIVSEPIGELPGLFPNYNLQAGLIKQTKELFPDYKNIYHDVQQQNLKRLEKAWERWVKPDKSGRRGGRPRFKKIGDLRSFTFPRINSEKAGANIKEGMLTLSKIGSISIILHRPLPDGFTPKTCTLVKKADGWYACISLEDSSVPTPIPLDEVKSVVGVDVGLKAFLTTSDGNTEPIQQNFRRSQRRLARAQRRQQGMQKNSSNAQKQKNKIARVHQRIKRQRKEFHYKVAHKLVKAYDLIGVEDLNIKGLAKTNLAKSILNAAWGEFITILEAVAVRRGVRVVKVKPHGTTVDCSTCGWEVPKTLEIRIHDCPKCLTVLDRDENAAINILMRALNDVGLTLSACGGYLSWMTRCAGHLVRADETGMSICEVGSLRHTA

SEQ ID NO: 32435 - protein, 442 aa, unknown
  TnpB Polypeptide
MQIISSYGVELRKQNIPIRQTLEIYRSAVSYLIGIYVQVWEKLAEIPDAKRRFNAAEHLVHTTKKNHACFDFDIRFPKMPSYLRRSAIQHALGTVSSYKTRLDLWEKTDGKSGKPKLVYENHAMPVFYRDVMYREGAEGKDEAYLKLYDGHDWKWSCVRLDHTDMEYLRKCWSGKKASAPTLEKRHQKYFLRFSYKEEVTLTKTPVKEQIICSVDLGINTDAVCTIMRADGTVLGRRFIDHPSEKDRMYRTLGRIRRFQREHGSAQTQGRWAYTKRLNTELGKKTAGAIVRYAEENHADVIVFEYLEMQGKISGKKKQKLHLWRKRDIQKCCEHQAHRKGMRVSRICAWNTSRLAYDGSGAVTRDWENHSLCTFQTGKRYNCDLSASYNIGARYFIRELLKPLPATERSLLEAKVPPVKRRTSCVYADLRKLHSEMELLKAA

SEQ ID NO: 32436 - protein, 588 aa, Geobacillus sp.
MPTITLRLELHKPTKVKQDMYERMTEVNTAFANWLLNHPELNQATSKRFKEFSSQRFPSAVVNQTIREVKSQRKHQKAKRFKTLWCCFNNQNWNVERKGEFYTVSFPTLEKRVGVPVVTRSYQEAWLNRLINGTAKQGAAKLYKKRKKWYLAITITFEVEPRHETKVMGVDLGLRYIAVASVGTKSLFFKGSQCAFIRRRYAALRRTLGKAKKLHMIRKIGRKESRWMKDRNHKISHQKESGVCLSNDMREECMEKGRGMMSAFQAFVVNKTETEFTAGVQTMSMDDLPEGDVLVRVHYSSVNYKDGLASIPDGKIVKTYPFVPGIDLAGVVVSSNDARFREGDEVIATGYEIGVTHFGGYSEYARLHGDWLVPLPKGLTLKEAMAIGTAGFTAALSIHRLEEHGLTPEHGPVLVTGATGGVGSLAVSMLAKRGYTVEASTGKAAEHDYLRVLGAKEVLTREDVTAERIRPLDKQRWAAAVDPVGGRTLATVLSRIRYGGAVAVSGLTGGAEVPTTVHPFILRGVSLLGIDSVYCPMDLRLRIWERLAGDLKPDLERIAQEISLAELPQALKRILRGELRGRTVVRLA

SEQ ID NO: 32437 - protein, 396 aa, Alkalinema sp.
MLVLEFKTYGKPAQFRVVDEAIRVTQFIQNKSIRLWMDGQAKSWVELSRHCSLLAKEFNFANQLNSMARQAAAERAWASISKFYDHCKKKVPGKKGFPTFQKDCRSVEYKTSGWKLSDDRKSITFTDKCGIGRLRMKGTRDLHFYPIDQIKRVRLVRRADGYYVQFCVSVDRAENVESTGKAVGLDVGLQEFYTDSDGATVENPRFLRKAARVLKRSQRRVSKKVKGSSNRRKARQILGKRHLKISRQRKDHAIKLARCVVTSNDVVAYEDLRIKNMVRNHCLAKSINDASWYQFRCWVEYYGKVFSKITIAVPPAYTSQECSNCGVIVKKSLSQRTHSCQCGCEMDRDHNAARNILSRGLATVGHTGSLILDMGNAWGDGASTVVGKSLLQQALS

SEQ ID NO: 32438 - protein, 405 aa, unknown
  TnpB Polypeptide
MLKAYKYRLHPNEKQRIFFAKSFGCTRYIYNWALNKRIEAYQTENKRISSIELCRMLTELKKQEGMEWLSEISNECLQQSIRNLDSAFTRFFREKKGFPKFKSKHDNRQSYKAINSVHVDLDNNRIKLPKIGWIKFGKNQRFEGKVNSVVVSKTPTDKYYISVLVDNGEELPAKKPISYENAIGIDVGIKDFAVCSNGDVYENPKYLEKSTMLLKKLQKIFSKSKKGGNRRDKLRLRLARQYEKVTNQRNDYLHKVSTKIVRENQTIIIEDLNVKGMMQNHHLARSIGSVGWSTFFSMLEYKCEWYGKTLIRIGRFQSSSKMCGCGYVNKGLKLSQRSWVCPKCGANNDRDLLAAQNIKRFGLQQQNLITEPVARGGLDGENPTMDERTMYLKSSGSVKRQYIRV

SEQ ID NO: 32439 - protein, 375 aa, unknown
  TnpB Polypeptide
VSEQTAQTGRKSFKYKLKPTPEQEQAMSEILWRCRVLYNAGLQERKEAWEKCHITVTRFQQEAQLKDIRAEHPEYAIVHSHVLQDVLARLDKGFQAFFRRVKSGEKPGYPRFQGRDRYHSFTYKEYGNGARLDNGFLILSKIGRIAVRWSRALEGTPKTVTLSKEADGWYVVFSCAEVPAQPLPLTGQETGIDVGIKAFYVDAHGHLCQNPKFFRKAEAALRRKQRKLARCEKGSKNRQEVKAQVVKQHQKVKRQRCDFHHKEALNLLRQYDTIYVEDLQVANMVKNHHLAKSISDAGWAQFRSILDYKAACAGKRVVAVPPHYTSQVCSRCGAYVQKSLSVRTHVCPACGLVLDRDHNSAIEIMGRGQRLRGVT

SEQ ID NO: 32440 - protein, 398 aa, Nocardia sp.
LVKRAYKCRFYPTEQQQRELVRTFGCVRLVYNKVLEARTTAWYIERRRVNYNETSAMLTAWKKIDELKFLGEVSSVPLRQTLRHLQRAFANFFDKRARYPRFKSPKRSRSSAEYTRSAFTFRDGELTLAKMAEPLNIVWSRPLPEGAQPSTVTVSCDSAGRWFVSMLTETAVTDHPHTDSVVGVDAGITSLLTLSTGEKITNPRQLRREQARLVKAQRALARKTKGSVNRDKARRKVARLHARITDRRTDYLHKLSTRLVRENQTIVIEDLYVAGMLRNHCLARAISDASWSQLRSMLEYKAAWYGREVIAVDRWFPSSKTCSACGSVNDAMGLEVREWVCRCGVTHDRDVNAARNILAAGLAVAACGGGVRPPRQSSVWQSPVKQETRPVKVGIPHQ

SEQ ID NO: 32441 - protein, 396 aa, Clostridium sp.
MKKLKRDYKVEIKPTMKQIQKIDQSIGICRWLYNEYISVNNQLYFQFKEGLIDKKQAFMSANDFDKYINNEIKVLKEYSWINKCGSKARKKAIQNAETAYKRFFKGQSRFPRFKKKNKSDVKLYFPKNNKSDWKVDRHRIMIPTLKNVRLKEYGYIPVGAKVTSGTVSKKANRYYVSVIIDVEITPQENLNQGIGIDLGLKDFAICSNIDKPYKNINKTQRVKKLEKKLLREQRKLSRKYESLKLRNKKEKGKATRQNIQKQIVKVQILYQRLTNMRNDYINKVVSSVVRNKPQYITIEDLNVRGLMKNKHLSKAVMQQKFYEFRNKLTNKCNALGIELRIVDRFYPSSKLCHSCGSIKKDLKLKDRIYKCECGYVADRDYNASLNLRDAKIYNIA

SEQ ID NO: 32442 - protein, 354 aa, Acinetobacter sp.
MKINKAYKFRLEPNAEQELVLNKLLGSARFVWNQILAVSFEMLAKNERINKVNLVNKIPELRKKPECAFLEKSSNGVSLQQKVRDLGDAWAKFFDKKEQAKLKQKPFKPKKPRFFKLTDGSEIQLRPLMPRFKKKSDGYDSIRIVQFGRYCWVKGNQVKLPNDIGVVKFRKSQEILGEIKNVTISKHVGKWYISFGVESTIDAPIHPSKSAIGVDLGVKKLITTSSGQVFDPINSFKANQVKLARLQRKLKKKTKFSQNWKKLNLKINKLHHHIANIRHDYLHKVTTTLSKNHAMIVVEDLKVANMSKSAKGTIENKGKNVKAKSGLNKSILDQGWSMLGLCCTNLSVKAFSAI

SEQ ID NO: 32443 - protein, 400 aa, unknown
  TnpB Polypeptide
MLVSQVIELRPSQRQEEAFRRHAAAARIARNDLIALWREGGKRLTGFRLKTVELRPQVNRVKYAAHPWFRDLSQNAVKGGMIDAVDAIERYYRGQNRRPRFHGRNRTLAFRADNGPSTVKLAGKALLLPAKAGGTVRTKEPLRWPGQVIRECRIKEKAGRWFASVRVELDPAEYPHQCGRGVLGIDLGLKTFATIAYPDGTIEKVQAPQPLRGSLKALRRAQRRLSRRRKGSRNREKARQAVARRHSRMANIRKDFLHQLSHRVTASGHTVQVERLSVKGWQRRWGRKTSDLAPAEFLRQLEYKAAWRGGEFVEADWHFPSSQLCHACGSQGSALDLDVRRWRCHSCGSILDRDGNAALNIRDWPGATRSLPVDANGKTSNVEALAVEAGTACPETIGAN

SEQ ID NO: 32444 - protein, 459 aa, Verrucosispora sp.
VKAIQAYRYALDLTPAQERAVLAHAGAARVAHNWALARVVAVMNQRAAERTYGVAEADLTPAIGWSLPALRKAWNAHKEQVAPWWRECSKEAFNTGLDALARALKNWSDSRTGKRAGRPVGFPRFKSRRRSVPSVRFTTGTIRVEPDRKHVVLPRLGRLKLHESARKLARRLDNGTARIMSATVRRDGGRWHVAFCVEVDRAERRPARPTSVVGVDVGITHLAVLSTGELVDNPRHLDAAKTRLRRLGRALSRKTGPDRRTRQRPSNRWRRASLRLTRAHARVSNLRRDGLHKLTTRLTREHATIVVEDLNVAGMLRNRRLARHITDASFGELRRQLAYKTQWNGGRLLIADRWYPSSKTCSGCGAVKTKLALSERTYTCTTCGMNLDRDINAARNLVALATEMDTAGSGPVTGRGADHKTRPGRQVATKRQPGTATADQTGTVPPQGRTTDHVLTGAY

SEQ ID NO: 32445 - protein, 473 aa, unknown
  TnpB Polypeptide
LKARSTIPESSTNPGKLQALSNLYQEYLKYMEVCVGLMIKDKVFSLKPSERMLYFPNSSTLTVNIKASCQMQSIQLVNSWVAGVYVRILRKYIGKQKFIDSEAKQLYTIGKYRLTHGGKFGNAEVSQKLVDLYWSWVWNPEIVGNPPRITYKIPMRMTEHTVVVEPPKNTVHFNGLWLKFSSLVSKQRISIPLKVTPHLHRFVGLANIALTVYVRKTRIGWQFLFTDKSEEPTFDGSVGKVGIDVGLNTLAATSSGELHGYKFKKKFEYLKKRVQDARANRQRQGLKDDSLKLWKLEQRLSGQIKTAVGSIANKLVKKYKDHTFVVEDLDLSGCKGSKRFAYKALQSSLARKAVIEKINPAYTSQQCPSCGCIDKNNRNGIKFSCKSCGRKAHADFVGGFNILRRSENKNIGLKTSPKEAKVILRERYLRNRNSSSKLPGRKTKIKRACTDKPETHYGEMPQSLKSGSTEKLT

SEQ ID NO: 32446 - protein, 363 aa, unknown
  TnpB Polypeptide
MRRAAIVSLDFITASKKQKISNLLQAYRAGVNFYLKSLWSEPGGLDKETLARLTNTRLTERYKSIALRQALSILSSGCKAAAETGQSFSLPHFTGDCVFDAKVVGIENGEKSFDLVIKLSSLAKGERIIIPTRRTRVLNKWLAVPGAKMGKGIQISENSLAVWVDLPDQDLKVPNPETTVGADSGVIKLLTLSDGSKPTYLGTEFRQIRDKLRRRVPDSNGFRRAQKERENYIGRILNKIPWNQISVLGIEDLKGIKKGKNPKRNKGFRKAMAPWTVRRVHERLKHKAQENRVLVVPVLAAYTSRICPKCLKESEKNRKGERFRCVSCGYGQDADFVGATNIRSRTLRLLGSLESPRLKNQLK

SEQ ID NO: 32447 - protein, 295 aa, Micromonospora sp.
VKTLQAYRFALDLSPRQERAVLAHAGAARVAHNWALARVRAVMSQRAAERTYGVPDELLSPPISWSLPSLRKAWNAAKDEVAPWWAECSKEAFNTGLDALARALKNWSDSRKGARKGHAVGFPRFKSRRRSTPTVTTGVMRIEADRRHVVLPRLGALRLHESARKLARRLEAGTARIMSATVRREGGRWFVSFTCQVERAVRAPARPGSMVGVDLGVKHLAVLSTGERVANPRHLVVAARRMRRLARAVSRCVTPDRRVRRVGSNRCPGRSKSFRGRTRASSGYAATVYTSSPPG

SEQ ID NO: 32448 - protein, 363 aa, Methanosaeta sp.
MNVLRTVTFKLRMGDRDRVTLAETMRAYTKAFSESAKWGFGNKVDNHHATYKLVRLSIPDLPSSLVQGARDCACEALKACKCRSLPERRPLAAMRYNQRVVTVNLVHGIATIASIKGRIKATFFIPQNYRDYLTWKIKSSTISYDRRSDTFYLHVSLEHDDPQPITEFKVLGIDRGIVNIAVCSDNTFYNSKKVKNTRAKYAHLRKELQSKGTKSAKRKLKRLAGKERRFVTDVNHCISKQIVNSDYTVFALEDLSKIRVQKRRGKQFNHKLNNWSFYQLEQFIRYKAEAIEKHTLLVDARYTSQKCSECGHIYKGNRNGSSFRCRKCGFELHADLNASRNIAQAGISCLSRLPCQPAQCSPV

SEQ ID NO: 32449 - protein, 394 aa, unknown
  TnpB Polypeptide
MYKTLIVPVKCSKEDYLYLLNCNKLSAEVWNLCLKIEKEYREQNNGRWIQRNELQKLTKQCVPLHAKGIHHVVHKYLFARDAARRAKEEGRKDVFYPYKQKKYFVTGWDSQSYKINGNKLMLAKPMTKEKINGKYRKQKPVVCYVKNIPQNIVEIELVYRDKLYLAIKYKEKVQYHQIQSDNHAAIDLGEIHSITSIDTCGNAVIITGRKLRSIKQLRNKHQAEIYKRMSKCKKGSKQYLKYMNALRKLTYKTERKINDAVHKITKLYLDFCIQNNVSVVYYGDLDSATRNTKQNKKGNRFVRQKLSQWNFGEIIRQLENKLSRYGIKLVKINEKYTSKKCPNCGELNKPNKRNYECSCGYKQHRDLVGAINILNNNANTNLKYYTTKKYLRIT

SEQ ID NO: 32450 - protein, 400 aa, Actinomadura sp.
MFSMKLMVQVKLLPSPQQEEALAATLHACNEAANRVSVRVFETGVHARVPLQKLVYADLKAAGLAAQASLHVIRKVADAYTVGRSQVSKRLVRGRGRQRAEGKPVEFRPDAAQPFDDRCLSWWWEDRQVSIWTVRGRVRGVPFAATSEQLDMLVRYRKGESDLVCRAGKWFLVATCEVPEAALNAEPMDWIGVDRGIVNLATTSDGRNHQGAGLTRYRRRMARVRAEVQSKGTRSARRKLRRRARKEARHASCVNHRIAKEIVADAQRTGRGIAVEDLRGIRERVRLRRHQRAMLSRWPYHQIVDYLAYKARRAGVPFLVVDPAYTSQTCPRCGHVSRRNRPRRDDFRCQVCGLAGPSDHVAAVNVRQRARVAWALVNAPIADGGPEVRFAELQAHNIPS

SEQ ID NO: 32451 - protein, 442 aa, unknown
  TnpB Polypeptide
MRTVSSYGVEIRKQNIPVRQTMEIYRQAVGYLTEIYAQVWEELRKIPETKKRFNTAEHMVHMTKKNTARFDFDLRFPKMPSYLRRSAIQHALGSVSSYETRLGQWKETGVLSGRPKLTCRNHAMPVFYRDVMYREGAEGKDEAYLKLYDGHDWKWFRVYLKRTDMEYLRRNWKGKKASAPALEKRHRRYFLRFSYTEEVTLTKIPVKEQIICSVDLGINTDAVCTIMRSDGTVLGRRFIDHPSEKDRMYRTLGRIRRSQREYGSAQTQGRWAYTKRLNTELGKKIACAIVRYAEENHADVIVFEYLEMQGKIPGKKKQKLHLWRKRDIQRRCEHQAHRKRMRVSRICAWNTSRQAYDGSGAVTRDWEDHSLCTFQTGKRYNCDLSASYNIGARYFIRELLKPLPATERSLLEAKVPPVKRRTSCVYADLRKLHSEMELLKAA

SEQ ID NO: 32452 - protein, 401 aa, Clostridia sp.
MNYFFLSFRNGENQINIVYYKGTHVLIRRYAVLQKKVFRYRIYPSEEQKIYFAKTFGCVRFIYNAMLHDKIEHYKENGSMLYNTPAQYKKEYTFLKEVDSLALANAQLNLQKAYKSFFRKDNKDQGFPKFKKKVYNQSYTTNNQNGTVELIENKYLKIPKLKSLIKVKLHRQIPDDAVIKSVTISRSSSGKFHASILVETDIQPLPERQEAVGIDLGLKTFAVISNDSKINALKVFIKHEERLAFLQRALSRKKKGSSNYYKNKRQIALLHEKIANTRQDFLHKHSMELINENQVIKIETLKVKNMLKNHKLAKSISDASWSRFIEMLSYKSSWYGRELIKVDTFFASSQLCNVCGHKNKEVKDLSIRTWTCPSCKTEHDRDVNASINILNYRTVGTTGIA

SEQ ID NO: 32453 - protein, 532 aa, unknown
  TnpB Polypeptide
MLDTLTVIHDTRRECALAKNKTYKAFTAHPSHVLDLNGELLDSSPVLDKLTSEVRGISGYATFVVRNDMKLGDELSQVGAIKSVVAGRRAGVTMPDFLVTGKSGRSRKEALIQYNVVTSFRSWQERINAANGVGAKYVSLGWKRTVDTSAPSYGEDTINLGAVDKQYAVIENNPFIDGEIVLKMVICGKWYRLIFNFDNSRFSEGKVTLPVVKVENGAPVFIFAVVTDNPIIQFSGDYTIGIDVGINNYATVVVRNSKTGEKVQESTLSQRVHSLWNSVRASERQVKQLRKKAKSLLYDRQARMSALDEARLHREAASRKKRELAILAAQEIAYLSYFYDNAVVAVEDLGWVSNTMQNGRWNRGAFTQWLTHYVSQNGGWVISVSAANTSQQCHKCGSKVSHPAHRVSDCPKCGAMDRDVNAATNIAARAASKVEKAQKTRAKNRKLQSQAPLKTPVTRDTLKYPSRDRTKRAATPKRKKQVMMEVNLPPRPARVNKTTVLADRGAHGTPETNTAALKQGYTTCKCRLYSPN

SEQ ID NO: 32454 - protein, 508 aa, unknown
  TnpB Polypeptide
LGLNGEALDSAPVLAQLASEVQGISGYATFVVRNDMKLGSELAQVGAVQPTTAGRRAGVTMPRFFVEDEDGKPIAGKSGRSRKEALIQHRVVTSFRSWQERVKAVNGESDKYVSQGWARTVNASPPSYGEDYINLGAVNTQYAAIENNPFATGEIVLKMVIQGMRYRLFFRFDTMRFPEGKVTLPIIKIENNQPVFIFTVVTDNPIVQFSGDYTIGVDVGINNYATVVVRNSKTEKIVYQSTLSQRVHSLWNSVRASEKQVKQLRKKADKLLYQRQARMSALDEAQFHREAASRKKRELTIVAAQEIAYLSHLWGNAVVAVEDLSWITNTMQNGRWNRGELAQWLTHYVTQNGGWVVAVNSANTSQQCHKCGSKVSHPVHEVSLCPKCGAMDRDVNAAANIAARAVPKVEKARKTRAKNRKLQPQAPLKTPVARDTLKYPGRDRTKNKPTLKRKKRRISKGVILPPRPARVNMDTVLADCGAYGAPETRKAALKQGNVAYERRLCSLN

SEQ ID NO: 32455 - protein, 384 aa, unknown
  TnpB Polypeptide
MKILKAFKFELMPNGEQIRKMKQFCGCSRFVFNRALSYQNEQYQKDNSFKFSYRKIADLLPEWKRELTWLKDCHSQVLQQSIKDLDKAFENFFAKRSNFPKFKCKGEKDSFRIPQGYKLEQQNNRIYLPKIGWVRYRNSRNVFGNLKNVTVRQKCGKWYISIQVEFETAKLTPKPNGGEIGIDMGIVRFATLSNGEYFEPINAFKNLKGKLAKLQKQLKHKTKFSKNWQKLKAKIAKLHHKISNIRKNHLHQISSRISKNHAIVYVEDLQVANMSKSASRAGDIEQHGHRKNVKQKSGLNRAILDQAWGEFKRQLDYKLLWNGGFLFTVPPQNTSRSCPNCGHTAKDNRKTQAEFKCVQCGYENNADVVGAINVLKRGQALQAA

SEQ ID NO: 32456 - protein, 401 aa, unknown
  TnpB Polypeptide
MIKAYKYKLKPNENQKIFFEKSFGCTRFVYNWALSKRIEAYQQEKKRLSCIDLCKMLTFLKKEEDKLWLNEVSNECLQQSIRNMDSAFTKFFREKKGFPKFKSKKDNRKSYKAINNVKIDFKSNRIKLLKVGWVPFYKNRTFEGKIGTVTVTKTATGKYYVSVLVDDGKEIPKKPDIKYDTTVGIDVGIKDFAVLSNGQVYENPKYLERAEQRLKVLQRRYSRKQKGSNRRENARIRLARAYEKVTNCRKNFIHQVTSRIVRENQTIIIEDLNVSGMLKNHNLAKHISSASWNEFFRQLQYKCEWNGRNLLKIGRFEPSSKMCTCGYVNHELKLSQREWTCPNCNQLNDRDLLAAINIKRFGLQSQNLIGESPVVDGIVDVEWSVVVEAVKRQYVLLYNNT

SEQ ID NO: 32457 - protein, 512 aa, Geobacteraceae sp.
MKRTTTDTFVLELPLVVDLSAERTLLGRFESARRLCNSVLGEALKRQRLMRESKLWQKARLLKDQKERSATFRKISSEYTFTSASLSAFGTTCKNEAGWIDRLGAHETQRIAERAFAAVESYGFGKKGKPRFKGINRPLHSIEAKTNASGIRWKAGTATIEWNGLTLPAMLAPVGKDDYQLEALCCDTKYCRVIWRMLNGTRRWYVQLMQKGLPQVKHEINHGKEVGLDIGPSTIAVVAEQVSELAAFCPTVKQPWKQMRKIQRAMDRSRRATNPKCYNTDGTWKKGKRQTIFSVGYNDLREELSEAERCLAAERKRSHGQMVNEILSHGTIIKSEKLSYKSFQKCFGRSVKARAPGTFVTLLRRKAESAGGEIVDLHTWSLKMSQYDHPTETYTKKPLSQRWHVLGDGSGIVQRDVYSAFLASCVVTKEKEHRHHPSHIEVMWAAQESVLRRSGWCFNQSASGSVQTFPTVKPSERIGRHRELALGHGPDAVAETREPGDPKEFALRTPSL

SEQ ID NO: 32458 - protein, 207 aa, Bacillus sp.
MTFLHFKSKKARKSYTTNVVNGNIMLLNGHLKLPKLKMVRIKQHREIPQEHIIKACTISMTSTGKYYVSILTEYEKEIVQKEVETVVGLDFAMDGLYVSSEDEKANYPKFYRKMLDQLAKAQRVLSRRTKGSERWNKQRIRVAKLHEKVTNQRKNFLYHKSKELVTNFDVVAIEDLNMKEMSQALNFGKSVADNGWGMFTFFVAYKL

SEQ ID NO: 32459 - protein, 477 aa, unknown
  TnpB Polypeptide
MEKENITQQMRVTKIDIHKKNDIFSKIDNYCWLSKNLYNRCNYLIRQLYIITRKIRNKEDVTEEQKKFVDNIHKWVDDYNMKVKNGQTKGKKKMKLSQKWYGEYFEKETLNKYILDEIDYKALQSQSAQSVLGRVHNTWISYFNSLTDYYKNPNKYKSKPKMPNYKNTKNGRYMFILTNLQVKIINNILFFTQKDLKKYTFRVPLENYKRGHTKDCDLREVRFIPNNDIYTMEIVHKINDKPQLKEKKGRIIGIDIGVDRLATVCNSIGVKPFAINGKPLKSINKLWNKQISAYKSKLKKVNNKYSSKKYLKMCRDRNNKMNTYIHQSASYIIKWCVKHNIDTIVIGKNDGWKQKCNVGKETQTFVQIPFASFIEKIKYRAEALGIEVILQEESYTSKSSFIDEDYIPVFKKDDNNANFSGSRKLRGLYITKDGIKIHADLNGAYNILRKYDNSFTYNNDYLHPYIVMPNKYNLQYK

SEQ ID NO: 32460 - protein, 463 aa, unknown
  TnpB Polypeptide
MAKIQRVERHIINNKHPCFRVFDELCFKSKNLYNYANYQIRQVFIITSKLAKNEKVTQEQLEYLNNINIKVDEFNKLRKINFEKAKIKAFKENKEFKKKLKTIKYFDKDNKYPCYEFIEFLVKDGVDYKSLMAQVSQQVLKLLDKNWLSFFEAIKKWSKNKIGFNGRPRLPKYLKKNGKNIIVFTNQNCKQFDNYIQMPICLNKYKLKTNIQGTLQQVRILPRNKYFILEMIYNISKIQLKEDNNKYISIDIGLDNLATITNNCGITPIIISGRKLKSINKYYNKQLSYYRKIAKRMNNLDWTNKMNRLTIKRNNMITDMIHKASKSVIDYALSCGANTIIIGNNKDWKRESSMSKKINQSFVGIPHQDFINKIIYKAENVGLKVIINEESYTSGTSFLDNEEPIKENYNKKRRIFRGLFVSNTGIKINSDINGSLQIMKKVFPNVFDHGIEDFGLNPIRVGL

SEQ ID NO: 32461 - protein, 413 aa, unknown
  TnpB Polypeptide
VAKIQKAHKILLDVNPETEQLFVSWCGAARWSYNYGLGRKKEAFEETGKSPGSYALMKEVVTLKKTDEYAWLNDVPKSVPRMALLQLEAAYANFFRRVKGGDKKPGFPRFKSKKRSRLSFHLEPDTIATDGNRVRIPKLGWIRMHQAIRFEGKLVGTVCISCTAGRWYASFSVETEVADPIEKQERVAVGVDVGIKHLAVLSDGKMFDNPRPSYRLERLLAKAQRQMARKQKGSKRWQKARLRVQRIHKRIADLRANTTHHVTAYVAANYDGVAIEDLNVRGMSQNHHLAKSVLDANFSELHKQLAYKLAWVGGEVRQVDRFFPSSRLCGACGLINSELTLADREWTCECGAHHDRDRNAANNLAIKCFGSMVGDPCAWTVRCSETPDETRSKSLALVVERRPSEPCQFGTVW

SEQ ID NO: 32462 - protein, 393 aa, unknown
  TnpB Polypeptide
MSKRAYKYRFYPTPEQAHNLACTFGCCRFVYNWALRLRTTAYFEQGQKLYYNDLSAALTVLKKDEGTVWLKDVSCAPLQQALINLDRALINFFEGRTKYPVYKKKHDKQSAKYTKVAFSWDGTHLKLARQDEPLAIMWSRPLPKNAKPSSVTVSKDAAGRYFISMLVEEASTPLPPRNDNKSIGIDLGLKSFLITSDGETIANPKYYVRDEKKLAKVQRRHAKKQKGSKNREKARRQVARVHARIADQRRDFQHKLSTRLIRENQVICLETLAVKNMLHNHVLAKAISDVGWSEFTRQLEYKAEWYGRTVIKIDRFYPSSKRCHVCRYVMTDMPIEVREWVCPQCRTVHDRDINAAKNVLAAGLVASACGDHVRPAVAKAVVGGGRRSRKPSS

SEQ ID NO: 32463 - protein, 454 aa, unknown
  TnpB Polypeptide
MKVTRKFRIMVSKDYKRHLDEMAAKVNFVWNYCVELMSTDRKKQLGSLSGIFHQPTRQEEVEVTEDGKTKKKKAWTLKRKIHIARDQILDLEVGDYLSGYDLQKFCAGASKELGLPSATISLICDEVAKSYVQKAILLSKKDKKATKAKKGKKARPKRVAMAADGSAIVIFPIPSFLRFRSNKRSRPWIPMKGASMHFDHSTEILKFNGLNFKVWVEPHRKISGKIADGKLIKEGGKWYVSVCVDLEPGDFRKVGTGAVGIDLGLKTFATLSTGEKIDNPLEPTVSFWGKSGTITEMISRLQSFRDKTASERKKKKISEAMLRFEAIATESRKHFHFGILNTLLDRFGEVYIGDLGGKFIQASAGKKSKALSIGLFKSRAEWIAKRRGRQIIMVDESHTTVTCGNCLERTGPSGAEDLDVREWVCAKCGTQHDRDVNAAQNILRRGLSLRPGLG

SEQ ID NO: 32464 - protein, 399 aa, unknown
  TnpB Polypeptide
LFKNDLNLIVFMSSVLRVFKYRLYPSKAQVKAFEETLETCRTLYNNALAERKNAWESERKSFSYLQQQNKLPALKRFAPELAGVHSQVLQNTLRRLDAAFKGFFRRVKNGEPSGYPRFKGVDRYDSFTFPQFGNGVRLEGKKLRLSKIGLVSVKLHRGLPKNGVIKACTIKRDVDRWYACLTIEKSSSQERREAKRAVGVDVGLKNLVALSNGELVKNPRWLEECEARLAVLQQRLSHKQKGSRNRSKQRLRVARLHRRVRNQRRDFLHKLSRRLVDDFDLIKFENLNIRSMLKNRFLAKSIGGAGWFELMFFVRYKAEEAGTVVEFVEPQGTSVKCSECGFLVPKTLSVRTHSCPNCGSVEDRDINAAKNILYTVGLTGSACRGTRSERAVEAGSPRH

SEQ ID NO: 32465 - protein, 137 aa, Salmonella sp.
VPISSIIVDENQAVIVETLKAANMMKNHHLARAIGDAGWSGFIAKLEYKAAEKGVHLVKLDQWFASSKTCHCCGHKVPEMPLHKRIWQCPECGAAHDRDINAALNIERKGTLELQAAGLVVSAHGGQRKSVKQTVAA

SEQ ID NO: 32466 - protein, 539 aa, Bacillus sp.
MVDALTQTIETFNRAKRFAFQTIVREKRWNRKMHTDSLHLVLKRNYQLNDYYANSAMQEAKALFTGLMELQKIYEKQTQEKLKKLKKKLKQERTKLTNLRKIKQSCVKGKLTFPKNTRFAKHNNPISLSRKKDTLIWLSEYLFEHQYLDVQIKRIQAKIGLLTHRQYRLTQKLSSYQTSIPSAVFGSKKLFRSQFTIDEFVRNHDKWKILFSRARNKQLILSGRKDAKHGNFSFQYVPGTKELWMTISSGKTLMFPSVTFPYGQETMEEVITTQLQCKNKKKHGKPIAWSVEDHGEYYIVKCLLDVPKNPHTNYSKSDGVIGVDCNLEHFAWANVTKDGNYKGSGSLRFSILGKSTGRITKIIEAEAIRLVDLAERYNKPIVLEKLDTTQSKTGDRYGNKRANRMKSIFAYEKMTSAILGHADKRGVAVFQVNPTYTSISGKMKYMRKLGISIHQSAAFTIGRRGLGYKEKVPQVLQPYIPKKEAHHWSHWHQLNNRLDIRTHHFYQLYDVDQPKKALQIERLHLLESEKKKLAKLLAR

SEQ ID NO: 32467 - protein, 296 aa, unknown
  TnpB Polypeptide
VQKAFKVTLIPNRNQEVLINKTIGCARFVYNRFLARRKELYESELHTLNYSGCSKELTQLKKEIDWLTEVDKFALQNSLKNLEIAYKNFFTDLKKPKKQRRFGFPKFKKKHEFKQSYKTNFTNNNIAVRGKYLKLPKLGCIKFHKSQELDGTIVNVTVTCTKTGKYVASILCETEVKKHSYVDKNIGLDLGIKSYLVTSDLEEVKNPKHYRQSLRKLRRANKKLSRSIKGSNNRAKAKTKLAQVHERVTNLRDDFLHKLSNRLIRENSIICIEDLRVTNMVKNHKLALSIMDAYLH

SEQ ID NO: 32468 - protein, 379 aa, unknown
  TnpB Polypeptide
MGENIRGVVVKLHLTPEQEVMFKKNYGCTRKTHNELLNKYKAKYGDDSTKIPTKTELNQFLNESKEELPYLRQTESTSLQQARDDLHKAFTNSAKSKRHHPPKFHSRKKTRPSFRQTIRQDKKPVENNTVTLRKHGEIEFSTSVENLDLLNSPETKFNNITVYYDGLKHYAVFNIETNPPEQLSLTEEHIGCDINSNKNGWLVTSDGQKEFFDVDHDNQMIKHINRLMSRCRKGSRRWKKLQKRLQKWYNKRTNQLDDYIEKLTYQIVKKYDTIVFEENYSTIKILIGGEQNMVFPLSRFIKRLKDKFQLYKPKADGVQFVKSKNTSRTCHHCGHINKELDVKTRNWKCPNCNKILDRDVNAAINILNRWFNGDSLKNT

SEQ ID NO: 32469 - protein, 330 aa, Thiobaca sp.
MGAAKIVLPSLPEWAGPIPYQIKKIAVEDAYKAFSNGVRKWRQTGEPFDLSFRSRKNPKQSCFIPSSALKDAGIYPKIAGSLKRAEDFPDNARDSRLVCEHGRWFVIVPFRVPVTQTENQGRVVALDPGIRTFLTGFAEDQAFKIGQGDFARIARLCYHLDRLLAKIAKAKCRQKARLRKAAHRLRWKIRDLVDELHFQAIRFLLDRFDLILLPTFETQAMSAKSRRRIRAKSVRAMLGYAFFRFGQRLEAAAKRVGKVVIRVNEAYTSKTASWTGEIKQIGGAKTITSGGLTVDRDINGARGIFLRALGDTPSLRNERACVGACESALA

SEQ ID NO: 32470 - protein, 407 aa, unknown
  TnpB Polypeptide
MVEYRRQSIVVKKNNPLYKEIDQVCLLSKNLFNSTLYAERQSLFKDGVFKFYNKINKEFVVSNQADYRALPAKVSKHTQMRVDEAIKSFIKLKKSNINFKPKLPKYLDKDGRFVTEYERGALSFKIDGFIKLSKSNIIFPTNLKTDDIKVVRLVPKAGYYLIEILYKNKIEVVKRKTNNKFASIDLGLNNLATVTSNSFNPLIINGKPLKSINQYSNKMIAKYQRLLPDKQYLSNNINFLRYKREMKVNDYLSKSAKFLVNYLVSQSIDVLVIGTNAGWKQNINIGKRNNQNFASVPFYKFKNKLAYLCEKAGIEVIEQEESYTSKSSFLDNDPIPTYPNTGNISFSGKRVCRGLYKSKNKTINADVNGSLNILKKYLISNAAWNENIFSDLVEACSTPRKVTVGFN

SEQ ID NO: 32471 - protein, 376 aa, unknown
  TnpB Polypeptide
MTKSKEKKTRKEIVSDIKEQILLSKDSKNDVIFEHQSLFEQIEDFVIDMKSQGLIYKDIRELIELFVETPKVTTVSHNIQYPTLTIPDLDVTEKTVVQEGKAGKYNIVTTELYKEEISRTKVIEESTVTEIVKVPMLSEGSEGSEGTSGVSFVGECYEHYKNQSTQNLSVGIDINTSYKDDNIITAVFSDQRRPVSLVSEHYKSYLLGLKKSIGLEPTDKKFNSQKTAGTFYRKTLNYAISVVKELKNMGVTKLYLGKSGAMSLTNNNDFMVSLYAQLITACSILSLEVVVVDEHRTSVADSLANDDFEIGLFSGERSKSNFHNYKSGTGFVVDADVNAAYNILRKGTKGEFKVSPELIQVSFNKKTVQLPEVNYM

SEQ ID NO: 32472 - protein, 238 aa, Streptomyces sp.
VSLQVEEQHSLVKVARPDAAVGIDLGIKTLAVLADSDGICTEEPNPRHLTHAQTQLRRANRTVSRRQGPDWRTGRQPSRRWEKANAQRNKIHHRVANLREDTLHKMTTRLADTYGTIVIEDLNVAGMGMNRRLSRHVADAAFGEIRRQLTYKTRQRGTRLIVADRWFASSKTCSRCGVVKAKLPLSTRVFKCDNCGLVLDRDANAGHNLATLAARTTGTGVAGDLDPAVKAESKPRGA

SEQ ID NO: 32473 - protein, 453 aa, Tolypothrix sp.
MAVRRQTFRLYPSKTQEIKLLQARRDHAYLYNACIAHRKYEWRANCKSVSYLEQQNCLPAYKKEWVEFAYLHSQALQATVKRVDLAYNAFFQGLRKLPKFKSIRRFSGWTYPATSGWKANTSGKHGSVNLNDLGIKIKMRGQAKQWGKPTTLTIVYKPGLKQWFASFTVEILDIAAKFGSHSELAYNSIVAFDLGCETAITTYSGKGIEQVSNPRFTQRTEAKIKKASKELRRKQAPNRNKKIKASRRWKKANKRVARLQRKAGAQRRDWQHKVTSEIASRYDIGVTEQLNTKGMTRKAKRGSKRKKQKAGLNKSILSVGFGTLNKMLTYKIESKGGLMIMLPTKDIKPSQRCPKCGAVHKEWAELSNRHHLCLCCGFDVPRDAGSAMVMYNVVTKAQPGLGTNLDSLGCLSSTSKTGKRKNTGSMKQLGQVRRQKSSNIAEPGEIPSAYAAG

SEQ ID NO: 32474 - protein, 395 aa, unknown
  TnpB Polypeptide
VGEKVMIRCLKTTFKTSKNNLNRLYECNRISAQIWNDCLDIAKQYSLANDGKWINKTELQKALKNKYPLHSQSIQAVCHKYLFARDAAHKAKQQGLDNKYPYKKKKHYNTKWAKDGFKIYDNGRIELSMGIWNGKRQQPIVVYVKELPIGKIKEIELIYDRGLKLSLAYENGLIESINNNKNIAGIDVGEIHTISSYCENGNAIIITGRKARSVKRLRNKKIAELQRKMSKCKKGSRKWKKYNKAKQYILSKSDKQLTDILHKTTKQYIDWCIENKVKEVVIGDIEGVQRNTKKKRNRNTNQKLSQWQFGKLYKYLEYKLKAKGINIIKINEGYTTQTCPVCGRRNKTSTRNYVCKCGYKEHRDIHGSKNILSKYKYNDIRYLGETKEIKYLRIA

SEQ ID NO: 32475 - protein, 395 aa, unknown; identical to SEQ ID NO: 32474
  TnpB Polypeptide

SEQ ID NO: 32476 - protein, 172 aa, unknown
  TnpB Polypeptide
MGCKRTKQRLALLHEKVVNKRKDFLHKTSTKLIRENQTICLETLAVSNMVKNHNLAQAITDVSWSTFVTMLEYKADWYGKNILRIGRFAPSSKTCSCCGNINKELTLKDREWTCSVCTSVLDRDVNASINIKSFALKNNLSGEHTLKNQDELLTLVKVLTPEAHPIASGVGG

SEQ ID NO: 32477 - protein, 593 aa, unknown
  TnpB Polypeptide
MPMPETQTVIISVKIPVKWDCMSDADRSRLERLTGRDTRVIRAFLGVIARHEKELIVGKKRKRVNGGALEKLTLTAERFKDPARNRLSVPHDFKKRFPNISTNELQECRQVAVAMWNSYLELDGQPPLKSEGYRERKLPRYVYARRFKLEYRPGQETKYWLDLLDSLDSARTDSWTHDRLLIPLTPSSYHLNRLDEGEVTSLRLFKDVRRKWWVVFAVRVEVEVVDMTGLPPAVMGIDLGIDKAVCSVVLTEQRVRYVRYFTQPDKASQIERYDGMVDALQREMCDRKNAGVVYDGVAERLKELRSRRANISTDYDGVLVRELTDHILELSKKYNLYVAIGRLTHIRRSAGRKSGKRKSFRKKVARWTFARVSEGLRHTLVQEGWRVNGKGSHFVPVPESWTSITCHRCGSKGVRPKQSLFICPTCGYRSNADKNGAINIARRLIKLIPSLANESGLERWLFPHEKKQASLKARRRTRSNEKSEPSSKRSASRGRSAAECHDQALLAEFVSTTDPAVERTVEQPSAAIDAHKATDSHGNRVQRSEAPSEARSDKARVQARGEVPALAGDSSREQGGTRELTVTEGVHSPSTQT

SEQ ID NO: 32478 - protein, 337 aa, unknown
  TnpB Polypeptide
MILTYKIRHERDFSRELSLARKVAEYALQHKSFTSKDVKHLGLKSAISNQILRKYSHSKTIKSVKSVKLTIPSQGIKVKDNEIQIPCLKLVLPIYFDRHFEKINQVEIGGEFAYVSVSYKEPSITKPEQTIGVDRNTTHHIVVASNINTGKVLKLGKECLHIHTKYKNMRRGFQRQGKLTLVKQVKNRESRIIRNLNHHISKALVQEAQNSKAVLVLEDIKDIRQTAKTRKRQRYSLHSWSFYQLSGMIEYKAKKLGVSVAYVEPAYTSQRCSKCGHIDARNRNGNIFHCIKCGAVEDSGANAGFNIAYLHQQGIPRFVIDSDMAKGSTDTPREATL

SEQ ID NO: 32479 - protein, 429 aa, unknown
  TnpB Polypeptide
MVRRKISFKLYPNAGQECILHEWLDLHRELYNAALEERRDSYRKARVSVSYYDQQNQLPEIKIERPDLKPLGSHALQETLRRLDRAYAAFFRRCKAGEKPGFPRFKGRHRFKGWTYPDPAGWKLRHEHDRLWRVYIANIGWIRARGLSRFAEFKPNDFTIRYQHGEWFASVTVRVAEEQCERERTDNKQRGFDLGLEQLVTFDDGEVIENPRWLRVSLDRIGELQRKRAHHKKGSSRWRQFSRKIASIHEKIAHKRIDHHHKLTTRMVEECELLATEKLSPKNMSVSAKGSIEEPGSNVRQKAGLNREILSAGWGQLHQMLAYKAEEAGTRLHLADTRRLKPTQRCSACGFVEKKTLADRVHRCSDCGFTTGRDRNSAINCLLDAYICAPGTGATTAREGPLPVPHGIGKAEPMTRETATSEPSGDRWR

SEQ ID NO: 32480 - protein, 762 aa, unknown
  TnpB Polypeptide
MATVLQAYQFALDPAPRKQGSLASHTGAVLFAYNWGLELVTTRLDQRKAGHDVQVPWTLAELRREWNRAKHDVAPWWQQNSKEAYNSGLDALARALKNWSDSRNGRRKGRPVGFPRRKKKRRAWAACRFTTGAIRVLADRKHVQLPRIGVVKTHESTRKLARRLEQGTARILAATISRQADRWFVSFTVEVKRQVPASNCMPSVVGVDVGVRHLAMLSTGMTIANPRALQHSLGTLRRLNRELARRKLGSRRHDQTRRRLARVHSRAANLRRDALHKLTTALATQHGTVVVEQLNVAGMVHNRRLARAISDTGMAELRRQLVYKSTWYGCRLVVADRFFPSSKTCSGCGWVKAKLTLAERTFCCEACGLVMDRDLNAACNLAKLVQSVAQSGWETSNARGADRKPQLAGQVAMNRPLRNGRATMSLMVPGRSRASGGGSGGWSMALAAAPGDPPGGRLGGGWLGRWLGGRVPPQFEQVVRAAQQLPLGVAGVPAASHEPAGALVFLDLAEHRLDGLPALGVAGLAVLALELGGHRRAEPVAAGLRRLAVLAGLAVAGVPGRWDQQLGCVGDRGEVVDRPVPGVRQRRLRSVVDPGGGQRGRRGLEHGLELVDVVGLVGEFGGHNHLLQGGDRLGVVALHAALARGQKTAVGVGGVGGRLGVGGLLRPALELAGPSTLGLCCRGVGGDALLVGVLPSGGLGLQLGLGLAQPRQPVGLAGELWGQLVAAGVAEQPVLVLVDLGGLAQDLGDFGLELVLGAVGLL

SEQ ID NO: 32481 - protein, 361 aa, unknown
  TnpB Polypeptide
MYGCQQNLISPDSELLAVLEFVCSEANNLTNCGIYYARQFYFKAKQIVGKYDLEVEYKTNKHFQSLYSQAAQQVLRSVAESFKSFKELSKLFNRGELTDKPKLPNYKKSGGMALVSYPKQALKLVNGLIRIPLGKTVKCWFGLDCFYIPMPSNLNFDDIREIRILPRNQEFYVEFVYQVKVEAIELDSSRVLGIDHGIDNWLTCISNIGTSFIIDGRHLKSLNQWYNKQVASIKEGKPKDFWLNRLAAITEKRNRQMRDTVNKAARLVVNYCLVKQIGNVVFGWNKGNKDNINIGKKNNQKFVQISTARLKQRIAQLCEQYGIRFEETEESYTSRASFVDNDILPTYGEKPSCVESIWQTS

SEQ ID NO: 32482 - protein, 406 aa, Rhodococcus sp.
MSIVQRVYPGEGAQLDVLVMHCDHARFVYNVGLEQRSWWTQSRRHFRQKINYVSQAADLTAARREFDWLRAGSTVVQQGALRDLDRAFTNFFARRAGYPTFKKRSNVRKGFVVRDLSVRRVNRRWGEILVPKAGWIRFRISRAWTDIFAATSARITLANGRWTVSFTTPPAARTMPDTTAVVGIDRGVANSIATSDGRMFHAPGFTAGEQTRFVALQRRLSRQQKGSANRDRTKAELGRLRLRLMDRRGDWIEQTTTELASTYCAAAVENLPVRNMTRRATPKPDPGRPGAFLPNGGRAKSGLNRAILASYWGKFAQRLAHKMSVVAVPAAYTSQQCSNCGYTCPENRDSQAVFRCQGCGFEHHADTNAAINIRDRAFIIKHQPEDISGDRVHQSRLRAAPTTSVA

SEQ ID NO: 32483 - protein, 381 aa, unknown
  TnpB Polypeptide
VLLAEHCRHARYVWNLAVEQQQYWQPGRRAPGYNEQCAELTAARAEHDWLAAGSQTVQQQALRDFAEAMGNFFRGTHRRPTWRKAGVHEGFRQIAVKSRHVERVNRRFGRVWVPKVGWVRFRWSRSVPGGVRSYRVTLDRAGRWHIAFAHVPNPIAGPGVGNVVGIDRGVVVSAALSTGELLCAPGLSGSEAKRLTVLQQRIARAERGSRRRARTKRAIAKLKVRERDRRKDWIEKTTTDIARRFDTIRIEALNVRAMTRSARGTVDHPGVRVTQKRGLNRAISRSGWGLLAARLQHKAFGRVEQIPAAYTSQQCSACGHVAPENRKNQAVFECAACTTGPCNADVNAARNIAAGRAVTARGDLGASRSTNREPQPCSPAT

SEQ ID NO: 32484 - protein, 415 aa, Mastigocladus sp.
MIIYEFKVKGKDKQYRAIDDAIRTSQFIQNKAIRYWMDNTKVGKYDLNKYCAVLAAEFSFADELNSMARQSAAERAWSAISRFYENCKKSRDAINLVCTGKKGYPKFKKNCRSVEYKTSGWKLSDTRKSITFTDKKGIGTLKLKGTYDLNYYNIKQIKRVRLVRRADGYYAQFAVDIDARVETQPTNQVVGIDLGLKYFIADNKGNVEQSPQFYRKSERALNRANRKKSKKFSKDRNIAKQRQSSNYHKAKIRYARKHLRVSRQRKEYCKRVAYSVIQSNDLVAYEDLNVKGLVRNRHLAKSISDAGWSTFRAWLEYFGRKYGKVTVAVSPHNTSQNCSNCAKLVKKSLSTRTHVCPHCGYTEDRDINAAINILKLGLSTVGHTGTTRRRDLPSWAVGASLLSNGESTNQESQCL

SEQ ID NO: 32485 - protein, 390 aa, Anaerobacillus sp.
MLVNKAYKFRISPTKAQTELIHKSFGCSRFVFNFFLAKQNQKDLYWSIVEEMKQSGQLPSNVWKGEFFNKYESVKAVRLLKKHYPFLKEVDSISLQKSVENLHDAYTRYYKKQAKVPRFKSKKNKVQSYTTKQTNGNIAVFDRHIKLPKLGLVRYAKNRKVEGRIMNATIRRNPSGKYFISILVETEVQALPKTHSAIGVDVGLKDFATLSNGTIYHNPKWSRTLEQQLVKAQRILSRRTVGSSNWHNQRIKVARIHEKITNARHDFLHKISTDLVKNHDIIGIEDLSVKNLLKNHKLAKVISEVSWYQFRTMLEYKAMWYGKQVVVVARNFASSQLCSCCGYKHKDVKSLALREWECPKCQTHHQRDINAGINLRNEALRLTVGTAGIA

SEQ ID NO: 32486 - protein, 509 aa, unknown
  TnpB Polypeptide
MSSKAEEKTEDRIFGSYLFVNYANKGKVKKVKNTLKEYRKTAKDISNYLWDVFFRTGKLPHRKKINVKYIPSYLSQRYKYVCFKYVCLWQTHDVLSSYIALIQYQFANIVFSSSLSKEDKLILLALNNVKGWLIYDKDEIEIYESKDKKVEKRKVKVLEFHKKLARKIFKHLLGKNRRPRFNNISMHLDGKVVEISKKEKDGAKKFDYWLKISTLEKGKPVYIPLGANTYAEKLEGEFLNYCQVVEDDDGNIEFRIIKQLKKKEYIPATDEIAIDLGLRPLFATDKGDLFGRNFFDILKAFDKKITKRMSSLQKRNIRPRDDKKYREYRKNFIDYVKNEINRLINVIVKVYKPKRIIIERLDFRSSELSKRLNRMIQNFGKRYIKQKLERLQQLYGIEIVEVNPAYTSQECSSCGYVDKRNRKDTQEFECKACGNKTNAQINGAKNILKRSSLGSLYLTKKQVLKMLTERYLERLKGCKSPPLDVIKDNPYFKDYLDSILNPCQNLTPS

SEQ ID NO: 32487 - protein, 431 aa, unknown
  TnpB Polypeptide
MEAARAHQIRLDPTPLQEQAFRQAAGNARFVYNKFLEWRRGMMIVYNEGGCDAKPRMQDLVKGLNRIKAEQFPFLTLFPIVVEGAGKNYEQACANWWDPKLKALAPKRKRKHEPRKFAAALRGREIRIEGKRVHLRSFGWIRMREELRFEGVPKRAFISERAGRWFISISVTGEVDSTHYAAGETQAVGGVDAGVGNHIAVLSDGTKYENPRAYRNRQRRLRRAQRKVSRRARKDAKGRLVKEQSANYAKAKKRLANEHYRAVCVRDDAIHNATTDIVRKCDVVVIETLNVEGMRKNRSLAKSVSDAAPAELLRQIRYKMEWAGKRVIEADRWFPSSQTCSACGYKNPDVKNLKVRKWTCPACGAVHHRDVNAAMTLQRYGEDIIAAETLPRCTREVTPTESIVHLWTTTFGGHCLLDEVGSPRKGRSKRS

SEQ ID NO: 32488 - protein, 380 aa, unknown
  TnpB Polypeptide
MIKVFKYRLYPTKKQAGFLVFQLEGHRYLYNQALAQRKELYQQTGKGIGYSLQATALLPKLRKENEQLAFCNYSSLQQTLRRLDKAFKAFFARIKSGEKAGPPRFKSAERFNTISYATLGDGCQIKENRLYLQNVGCIKVKWHRSIKGKVKTLSITRRNGKWYVSFAVECDPEPLPKIGKEVGIDLGLKAFVATSDGQQIEAPKYLRKSEKKLVKAQKRLSRRQKGSSRRRKAGVLLAKKHEEVANQRLDFCHKVAYCLVKAYDGFAVETLKVKAMVQNKYLSKSISDASWGMFLLILKGKAESAGRWYREVPSNGTSQRCSGCGEIVKKSLAVRTHNCPHCGLVLDRDQNAALNILKRAWTGPSALASKFEVSPRSCRL

SEQ ID NO: 32489 - protein, 387 aa, unknown
  TnpB Polypeptide
MRKLQKSFKTEINPTDEQKLKIRRTIGTCRYVYNFYLDQNRKRYEKGEKFMSGKSFSVWLNNEYLPQNPEYAWIKEVSSKSVKRSLENACTAFSRFFKGQSHFPRYKKKNKSNVKMYFVKNNRTDCFCERHRVNIPTLGWVRIKEKGYLPTTKDGYVIKSGTVSMRAGRYYVSVLVEVPDPPKEENRNEGIGIDLGIKSFAVLSDGTVYQNINKSAKIKKLEKQLRREQRSLSRKYENLKKGESTQRANIQKQKLKVQKLHHKIDNIRTDYINKTIAEIVKTKPSYITIEDLNVSGMMKNKHLSRAVASQRFYEFRIKLKAKSRENGIELRVADRWYPSSKICHCCGMIKKDLKLSNRIFRCHCGYVKDRDFNAALNLRDVKTYKIA

SEQ ID NO: 32490 - protein, 367 aa, unknown
  TnpB Polypeptide
MKLNKAFKFRIYPNHIQMALLAKTFGCCRFVYNKMLEDKIKHYQETKENLLVTPAKYKEEFEFLKEVDSYSLCNEQMHLQAAFNNFFRGSKVGFPKFKSRRKDKNSFTTSNVSNTIRVNDKHQIRLPKLGWVNFVEHRKIPSNYKIKSVTVTKTPSGKYYISVLTEYEYKIPERTLDKSKSLGLDYSSHDFYVDNQGKSPENLHHYYRDLQDKLAFHQKRLSHMVKESNNYQKQKIIIARIHEKIANQRKDFIEKESTKLTRLYDIICLEDINLQNISQSLKLGKSTLDNGFGMFRARLEQKMLVEGKRVVKIDKWFPSSKMCRFCGYVNKNLKLSDRVWTCECEAILNRDKNAAINIMNEGLKELT

SEQ ID NO: 32491 - protein, 426 aa, unknown
  TnpB Polypeptide
MANKVVTRTYTASIRNQSQVRDGLDALGFAASKLWNVGRWTIGRVWDEIDYIPEHDELTAYLKSHERYDDLHSQSSQRVLQELAEAFTGWYGKRRNGETRANPPGYRKHGDEHPRSTVTFKNKGFKLDTQYNRVRLSKGSNLKEYWSDFILCEYQTHPDVDLSIVESVQQVRAVWTGDEWELQFVCSVEIEVSDSPGEKTVGVDLGINNFVALAYEDGHSELYPLNCLKQDDYYFSKRIARCDDSDSEQATRLNQKKSARRTHYFHTLSKHIVQRCVEEDVGTIVVGDLSSIRRDEENDESKNWGKHGNLDLHSWAFDRFTDLLEYKAEMEGITVEEVSERDTSKTCSCCGRTQKANRVERGLYVCDECDTVANADVNGAENLRQKVSPSLATDGGDRSNGWLAQPSTYLFDKETGAFAPQQQATS

SEQ ID NO: 32492 - protein, 394 aa, Streptomyces sp.
VKRAYRYRFCPTDAQAAELSRTFGCIRKVYNLALAARTEAWERQERVNYSRTSAMLTVWKKTEELAFLNDVSSVPLQQCLRHLQTAFTSFFGRRAKYPRFKSRKRSRRSAEYTTSGFRFRDGRLTLAKMAEPLDIVWSRPLPEGASPSTVTVSQDSAGRWFVSMLCDDPSVEPLPATDTAVGVDVGLDHLLTLSTGEKIANPRHERRDRARLARAQRQLARKAKGDGANRAKARQKVAKVHARIADRRRDGLHKLTTRLVRDNQTIVIEDLTVRNMVKNHTLARAISDASWSKFRSMLEYKAAWYGREVIAVDRFFPSSKMCSACGTLARRMPLSVRTWTCDSCGAVHDRDVNAAKNLLAAGPAVSVCGAGVRPQRSTPGGQSVTKQKPSRREP

SEQ ID NO: 32493 - protein, 394 aa, Streptomyces sp.
MVGGLREVAVPFVVTGPSGVAVRTRLKGLTAGDEEVLRLVGAHLGSLASRDLMARCADGLEHSAESWAARKRGLTGVSSSRWAGSVTKATHDQWALARRGQAAHIQNLEAGVKVIRHRLSLPVGHKGTKRAAGGYRSRREWHAKTRRLRVLEDRLERVRAERDAGRVRVVRGGRRLARTRHHLADAGLTEAQWRRRWEAGRWFFQADGESGKRFGNETIRVTPEGEVSIKLPAPLAHLANAAHGRYALATKVSFAHRGTEWADRVAANRAVAYRIHHDTGRGRWYVTASWQIPAAQTVPLEAALAHGVIGVDTNADHLAAWRLGTHGNPCGDPRRFAYDLTGTAPTATPKSATPSPASCTGPRPAASQPSRSRTSTSRPRRPGRSTAAGEGSGS

SEQ ID NO: 32494 - protein, 551 aa, Thaumarchaeota sp.
MKSAFRFRLYPNREQERRMLLMVEAGRQLWNEALAHRKRRWEEKRLSTSYHQQCLILTTERRVNPLFRGLYSQAGQEILHRLDRAFAAFFEYRARYPRFKKFSQVGSFTYPQAYKGSVKPDVVRRRLFLSKVGNVKVVFHRGLPSTTREKLKTCTVVREPNGEWYASLVYDEDEGKNDGSNGPQSPQTKQFFLSPVGVDLGLKSLIATSDGAKIPHPHFIRKAEERLKRLKRNFSRTRIGSENRGRARRLFAVQSSRVARQRKELNHKLSTDLVRDHDLIAFEDLKIRNMVRDHVLAKSIADAGWGQFRRFTEYKGTRAGKLVIKVLPAYSTQECCLCGALNQVPLSLRSSACRDCKKMLDRDFNAATIVLKRGLAQVGQDMPQLKPVETGPLPVPTTGRASPIGEAGTIRDGNHGTEQEPSLEAHGFSRGRMSLNDLGDRFQDVLRLPKVLDQGFDAFLDQFSRFLPEDDHPHQLSDLLNLADAEPEPCDLIRPDPSAVVDDDVRLLQPLGEELQSLGVVIEQDLMGLRVTLSRSPHLHPQCVEALPESL

SEQ ID NO: 32495 - protein, 430 aa, Nodularia sp.
LENKVFGCQQELIHCDKETKAIIEYLCYESNSLYNCTVYYARQIWFKTSKIVSGFDLTAEMKTNKHFNAGYASAMQQTCLNVGESFKSFKKLLSKSRKGELDQKPKVPSYRKPGGLFTVTYPKRWLKLKDGFIRFPLGNQVKAWFGISEFFLPMPTNLDWSNIKEIRLLPRNRCFYAEFVYQQKIESIQLDKSKVLGIDHGIDNWLTCVSNVGTSFIVDGLHLKSINQWYNKSVAKIKENKPQGFWSNRLTAITEKRNRTMRDAVNKAARIVVNHCLENNLGSIVFGWNQRQKDGANMGKKNNQKFVQIPTAKLKTRIEQLCEQYEIDFVETEESYTSKSSFLDNDVLPTFGAKPEGWKSSGVRITRGQFQTSTGIKINADCHGAINIVKKVAAIFKFDLSGVGRGALSAPKKVLLWTLQKSPCLQTGEA

SEQ ID NO: 32496 - protein, 182 aa, Bacillus sp.
  misc_feature (3)..(12): Xaa can be any naturally occurring amino acid
VWXXXXXXXXXXKKLLRRKKSAQRDMSRRFKKGVKIQSAGYEKAKAEHLRLSRKIMNIRNNHIHQATARLVKTKPMRIVVEDLSISNLLKNKKLSKAFSFQKLNFFFQCLSYKCEKYGIAYVKADKWFASSKICSCCGVKYDHSVQPEGQWSLKIREWCCVSCNSHHDRDVNAAINLSRCVK

SEQ ID NO: 32497 - protein, 412 aa, unknown
  TnpB Polypeptide
MYRAYRFKLKPTAEQAQLFVSWMGASRWIWNQCLTQNKESYANTKKFIFRYDLSKQLPELKKTHEWLKEVPSQALQNRIIDFNTALTRVWKQGNGFPKYKSKHKEHHSTICIDQTNGHINPRKKQIKIPKIGWVKWNRHRPITGKLKSITIKQENSIWFCICLCEIANVDQITQINQTDIVGIDLGLKDFAVTSDGEVVTTPKLYRNKAKKLARLQRQHSKKQKNSNNKAKARKKLKKLHNKIKCQRSDFTHKASSLITKHYKLIGVEDLNIAGMMRNRSLAKSIQDQGWAQFVNQLEYKSRYNGGVTVKINRWLPSTKTCSSCGQTQSMPLSIRTYECNSCGMIMDRDHNAAVNIRRWAIEETNRCGTHQIHACGDTSSGDDSYVSSSHVSLKQEKLPVNRTRKPRQLAAR

SEQ ID NO: 32498 - protein, 399 aa, Salmonella sp.
  misc_feature (240)..(338): Xaa can be any naturally occurring amino acid
MKQQVSFKFRLRPDGQQEREMRRFAGACRFVFNRALALQNENHEAGKKYIPYTKMASWLVEWKKDTETEWLKDSPSQPLQQSLKDLERAYKNFFQNRAAFPRFKKRGQNDAFRYPQGVKLDQENSRIFLPKLGWMRYRNSRQVTGVVKNVTVSQSCGKWYISIQTEREVSTPVHPSVSMVGLDAGVAKLATLSDGTVFEPVNSFQKNQKKLARLQRQLSRKVRFSNNWQKQKRKIQQLHXXXXXXXXXXXXXXXXXXXXXXXXXXXXXXXXXXXXXXXXXXXXXXXXXXXXXXXXXXXXXXXXXXXXXXXXXXXXXXXXXXXXXXXXXXXXXXXXXXXKENRLSQSKFRCQVCGYTANADVNGARNILAAGHAVLACGGMVQSDRPLKQEPSEMIQATA

SEQ ID NO: 32499 - protein, 396 aa, Geitlerinema sp.
MLNLTYPYKLKLTQEQQQTYEAWLETSRRVWNYALAERKDWYKSRAGSIDRCSLRGEYVIPADAPRPTFSSQCKALTQARKVYPDLGAAHSQMLQQVLRRLEKAFVSMWENGHGFPRFKKPGRMRSLLFPQLGKTPVRGNRVKLPGVGWVKMRLSRPIPEGFIVKQAQVVKRASGWYVMLTLQCDVAVPDITPHGEALGIDVGLSNYLATSTGELVPRPRFLVDLQSKLRLLQQRASHKVKGSNNWRKAHHKVAKLYERIRNGRQDFFYKLAHRLCDGVGMVFAEKLNFQAWARGLFSKHTLDAAHGEFLRILKWVCWKRGVFYAEVNAKGTSQICPSCGTNTGKKDLSVRVHRCPECGYTTDRDIAAAQIVMQRGLAAVGQTVKMLGEGLSVGSP

SEQ ID NO: 32500 - protein, 276 aa, unknown
  TnpB Polypeptide
VLLITLIFRSSDYITIFFGSRSTIFYLNPYELTFNKGRWFAHFPVEQPIAEPRPLSQKIVSLDPGIRTFMTGFDGSNFLEFGNGDFGRIAKLCWHLDKLKSRHDRAKGQEFKRLRFKLRQAMERIRTRIKNLRSECHKQVGSYLARNYDVIVLPTFETSQMVAKKARKLHSKTARAMMTWAFYQFSQTLEHLCNRYGSRMVRITEEYTSKTCVSCGHVHQKLGSSQKFKCPNCGFEIKRDFNGAVGIFLKALWDTTFLNQVGNVVLDVRDVAECLG

SEQ ID NO: 32501 - protein, 227 aa, Clostridium sp.
MILSKKVRIIPSVEQENPTINLTNESIGIDVGIKDLAICSNGMTFKNINKSKEVKRLKKVLKRKQRKVSRKYDMNKMKKGGENRCQYKKTNNIIKLEKEIKLLHRRLSNIRSNHIHQATNKIVKTKPSRVIMEALNIKGMLKNKHLSKAISEQCLYDFKVKMQYKCKFYGIEFVEADKWYPSSKTCSCCGAIKKDLKLSDRIYKCSCGLTIDRDLNASINLSRYKLA

SEQ ID NO: 32502 - protein, 382 aa, Streptomyces sp.
VARQVKRAFKYRFYPTGEQAAELSRTFGCVRLVYNKALEQRTRAWYREQRRISYVQSSAALTQWKKTGELAFLSEVSSVPLPRYKSRKKSRASAEYTRSAFTWRDGKLTLAKMTDPLDVRWSRPLPQGAQPTTVTVSRDGAGRWFVSLLCQDTIAPAPATDAAVGLDAGITCLVTLSTGEKVANPKHERRDRARLARAQRDLSRKAKGSANREKARRRIARVHARIADRRRDVLHQLTTRLVRENCPNGRDRGPHRPEPAEERPSRPRRLRCGLDGSAHDAGVQVRLVRTHTRRDRPLVPLQQAVRGLRHGRAKLPLNVREWTCDCGTVHDRDVNAARNILAAGLAASACGDGVRPQRESSRTGQSSVKQETQRATAGIPRP

SEQ ID NO: 32503 - protein, 379 aa, unknown
  TnpB Polypeptide
MANKAIKYRAYPATEQSIMFAKTFGCCRKVYNLMLSDKIEGYKSTGKFPTVTPAKYKKEYPYLKEVDSLAPANKQMDLQAAFRNTFSKSRKKNNGFPKFKSAKHSRKAYTTNNQKGTVAIIENKYIKLPKIGKVKAVIHRIPDNNWIIKSATVSQESDGKYYISVLFEFDNIANPYAADKTNAIGLDYASDGLYVDNNGNVGTNHKYYRESHKKLAKAQRRLSRMQGSKKHEDKSANYIKQLRKANKIHRHIANQRLDNLHKISTEIANQYDVVCVESLNMKSMSNKGFGNGKATLDNGYGMFLYMLEYKLSDRDKYLVKVDRWFPSSQICHCCGVLHPEMKNLQIRKITCDCGLTISRDQNAAINILNEGLRLLAKVA

SEQ ID NO: 32504 - protein, 278 aa, unknown
  TnpB Polypeptide
LAYDLSARYLQLAIKDLANAWKNFFDKSQPDWGKPKFKSKKAPRQGFKTDRAKIINGKLRLDKPINISKDNWFDLASYAALKINQVKVISIFKENETYYAALSYEEEVTAKTKTHQKTAVDVNVGHFNYTEGQINVLPAKLQRDYRKIANIQNDLLQKFTTKLVNNYDQIVIEDLAIKKMMMTHVASKGMQRSLFSRFRQILTYKCEWYSKKLILADKTYPSTQRCAKCGYVKKGDEKITLQGNQKHGTKHNEYICYQCGYNNDRDENAVLNLLALAK

SEQ ID NO: 32505 - protein, 402 aa, Halorussus sp.
VADTEYSRRTAVTGLSVSPTDATRLRELVEEWKRGCQLAVNEAWGVCHTRSEVQQLTYDLLRERTDLGSQHAVLATHRAAEAIKRAGESGTKPEFTSPTVAFDTRTMTVFDDRTVSLTTTDERVRCDLELPPDGGYQSRFLDDETWEPAKSALHYRDGEFVFHLGFRTPTPGVEPPTEGATVLGVDLGVENLAVTSTARFFPAGELTHRREEFEAVRASLDATGTRSADRTLRQAGYRLDQFVNHRLHEVATGIVSEADRYDCALVAFGELSEVRDLLPDASSYHEWLFSRLLSLVEYRAAERDIAVVEVNPEYTSQRCMECGFTHPQNRDLDAGQFECLKCGASANDDYNAAKNIAFRCVRRGPLSSRGLGAAACALQSGVVTPDDGFTPYAELSEAPRSD

SEQ ID NO: 32506 - protein, 392 aa, Caldilineales sp.
MAKPEPVTRILRSQSLNRDKFKRLQAMATLRRRVRADAWQRCSGLSTAPRSAYAIRNAWMAEGYDWHGLPAMLGRAPLLDALGDINACREAAKLPVKKAIWHKTRGDGAERHRLYSLLKRNQWGEDPFLHRQMRKQWKGGHSHCTHQIVLEPGAYTAKVWHGRAWIYTQCLERGQRLAIPLRGAALPTGTLRLILQDDGQVEIHHAVDEDTACSTKPCGSETVGVDKGYTEAYADSEGERHGEGLGDLLARESDDRKVKGRRRNQLRAVEQKHRAAGRIKKADNIRRHNLGNQKWDRRQKQHNAQVRDHLCQAAHSIVDRAGTVAWEALTTPMKSAKVRHRDTQRRLAGRVKGLMAETRTSISRRRGSALVLANPAYTSQIDCRTAGAVLTG

SEQ ID NO: 32507 - protein, 671 aa, Nonomuraea sp.
MPVGKQTATASCTAYRAIEEKTGVVVPAGVVVARVGWLTTLTQTLASAVIAERWTEEALDELAGGVGPDGRDLPAKGYKALRRLGWGSRSEPGVYVSDRVRCCADEEAARALRLALHRRTIIEAILKTWPENSRKRTDAEWAALREALPAGVPVAEIRHRTRQVQAIIDGGGAFPLGIIEAEDAPFNAAQILLAAADKQLVTVTRTGERTVELRVQLPSVERPASRRDWAWHVLPVNLPRNVPGDVVKICVPSLRVKDGRVRVDLPFEVEVPFAPASGHVIAAGFDWGLNTLLAATIGRLTPHGRVESDGRPLSYDASVVSAKLHRLRGHREDLAAKRRHYDNLLTGLAGQADGDVRGPELLASRERTDVEHRRVCARIRHLNDALAWNAARWAVDQAGAAGATVIYLEDLATLEARGRRQGNARLSGQVRGRVVDAIRHLAAKTRIAVVTVPARGTSRFCPRCGDGASELMHVLAPDRLTQRGWKWAYCSACGLSCDRDRAAAERIVSRGLLGQQTTFTDRTTGKRAIRAGVDGNVTRVRRPKKATRAIRRARRSGTDLHPRPENRTSRADRSKTGPTRKRQTRMRKMTSSRMPDRRPVPALTFAVGNRPAGQAPQTNRRKPGRTGLVRDFHHRTGFHKARASPVLPLTEYGTGSRHATPPATPNPHGLG

SEQ ID NO: 32508 - protein, 398 aa, unknown
  TnpB Polypeptide
MGMNRAWRYRLYPSKTHQQSLDSYLYECKNLWNFLLEYTKACHKETGKFPTRKQLYLKAKETHIFSQVAQDIADRLAKSLRGIFLKKNAGSKAGFPRFKPIERMKSFTYPQFGFKLGERLALSSIGSIPIKKHRDIIGEIKTLTIKKMPSGKWFAIFTSEMEEPISQKKAGPAVGVDLGIESFAYLSDGSFIENPRNLKQAEQKLKGAQRQTARKKKGSENRRKTRLKAAIAYEKLANKRRDFLHKTTRQLVNSYSFLALENLNVAGLARGFLAKHVLDCSWAEFSSMLAYKAEEAGCEVVLVNPAHTTSMCSSCGQIHKKALGERWHSCPCGAEMHRDLNAAINILNRATVGTAEGQACGEGNSTRYGYNGQLSSMKQEAHGFLAAFGRWNPESKAL

SEQ ID NO: 32509 - protein, 517 aa, Arthrobacter sp.
MTATGAAQKQAIKVRAYPLPTFANEGKLARVHALLGPWRDALGGMQAQLHRQILDGQPLMKRMPTKITDLTFTTELSARQVKSVYNQTFQALNAWTGSVRNAVRELISGSSLDDETRTVLYRVNARKAWYAKELVLPIKVNTATGEVRHSDGKPGKGWAKDEVPVSAELLKLSRRMAKQVGKHAVSLPDLSRANTMLMDGTIAQVEPSKNSSFDYWVRVSTLTKGAVAWIPLKAHRFFANAPGEVSGFVQLNVLKDGSLQFVLQKKSPIARPRPEGDYLGLDWGMKSLFATSDGRLFGVGAMPHLTELDRQAQDLAKSLQRQGIRLKTNRRYRNFQRRMREYIVNEVNRILNKLSTEDIQGLVVEKVDARGGGMSRDMHRLVTRFGRAAIKKKLASLQEDTGLDVIEVNAAYTSRECSSCGLVHDGNRKGLKFSCRFCGRKTHADINGARVVLSRRSWHTQGDSKTKSQRGTVRRRLDDVFKARWGCAPPTRGSIGIRKPGSRRRPAVRLVTAPHRG

SEQ ID NO: 32510 - protein, 363 aa, unknown
  TnpB Polypeptide
MTMKTNERAKYTYLTLQLLPTEKEREALQTTWNNYKEACNTFSRTKYWKLAREKHMDVSACKKEYLKSARALAQRLLHGVYEISIRHTVKMAYKRQESDKKLALIVFGEYDEKNVKHLTIPYLRKPTFNIDFAKKICCLDLVDGFQHIAFTLLEGIPEPPASWEAIEVYLQPIYGTWYLTLMFPNPTANMDVSPDTNIVGIDRGEINIATTYSPDKGAKRYSAKDYSLPCEGGTKDDYHKNLFAKDVIVAKEIVEREPPDTIFVLEDLHFNKLRKGWSYRNFSDAFIYLAALRHQCVFFCDPRNTSRTCPKCGEVTNTKRDLDEHRFICRSCGYGEKEIVNDDENAAENIYLRGRKELLKDDV

SEQ ID NO: 32511 - protein, 439 aa, unknown
  TnpB Polypeptide
MSEECKTLEAYLAPPTQHKQRKLHNEHDRYESLLRRSFNDECDTMTAVNEVVSGEDLNWHSKNALKQYVPNLLDEDTYDAKQLADTHPIRYANTAAIFDINEDRHHEICWEVPLPSRGTNFWIPLQLNPAQEDWWHALINDEEDSVWAGELRLQRDGTRWVLHVTANYEVEPDRSCSCDSGDVTPVGFDVGESKLLVGCALRDDTPVDPLFVDGGRVRHLRQKQASAEDRLKQRYASNLLDDLVWGRWQNAIEDEIENASTRAVEYAVQFENPVIVLEYLEGITEEDIGKYWNRRLGKWLFSRLQSRIEDKAAERGIPVEYVYPHHTSKTCHTCQYIGYRPHQGTFRCTNEACWVSEYQADLNAAANIANRLNPWGESLPWKPAGNDSPRRGGQWQARKDTSPSEELPSERQASDDKVSSSSPAVGAGPKPETGDAHTS

SEQ ID NO: 32512 - protein, 368 aa, unknown
  TnpB Polypeptide
MISRAHKIKLKPNKAQAVMLSKTAGTARYAYNWALARWKELYDQGVRTSYVELSREWTKDRPEWASEVADGASRRAIMNLDKAYKSFFKGISKPPTFHKKGRKDSFYVSNDKAVIYGNKIKLPLIGRVRMTEFLRYSDCKIMSYTISCEAGEWYASVQVEMEEEVRSSSNSFVGVDVGCKALAIASDGTECKTPGMLKDLERQLKRKQRLLARKARGSKNRAKARIKVAKAYQRIRNIKQDAVHKFTAAIAKNHGIVVMEDLDVKSMQGCCNKHVRKGVQQSCMAEVHRQLMYKCNSYIKVDRYYPSSKTCSSCGYHKADLLLGERTFVCPSCGLTIDRDFNAALNLLHEGIRIYTAGHAGSACGEAR

SEQ ID NO: 32513 - protein, 627 aa, Micromonospora sp.
VFAERVGWLADLVRGMADQVIAVHWSDADLAVLAGGVGADGRRLPASGWMALRRLGWGAVAAAGVVVSDRVRRIAEEEAARALRLGCHRRAVVAALLATWPADPVARTGEEWSALRAALPEGTDNATIRNRTRQITAYVGVHGRLPAGLCELEGPPVVARQVSLAAADRQQVVVDRVDDRMMRVWSQLPTCAAPASYRDWVWHAFEVVLPAAVPAGVKVCSPTLRPRDGRVRVDLPWQTPHTPPPVDGHTRGLGVDWGVNTLLTATVADLDQDGSVVVDGRPLRFDATGVSARLVRLRRHREHLKTKADHLSRLRDGRPADAPADPALTGKLACLEAEHAAVCARIRHLNHALAWSAARWLVDHATAVGATVIYVENLATLEAGGRSRSLNRRLSGAVRGTVFTAVAHLAAQAGTAVVTVPARGTSSGCPRCGAAVTHVKTPQGRVAGYRWAICSCGLSLDRDHAAAERIAARGLANQTKTRRDRSGNAAIRTATDTPVRQRTRRPTPAATTRPVRDRCKTAPTRKQTRPTGAKTARLLPLRRQVPAPTDAPLRSAGKRPAGRTPQETNPPRTVRQVPHTVPTTAPRHPHRVRGAILGRGFHRHVHATPITHRDGGTGGMSGSMRIT

SEQ ID NO: 32514 - protein, 233 aa, Micromonospora sp.
VDTNADHLAAWRLDEHGNPLGAPLTYGYDLSGTAQHRDAQVRHALIRLLHFAKRHNLSIAVEDLDFAAEKTREKHGRRKRFRNLISGMPVSNLRARLVSMATELGITIVVVDPAYTSKWGAQHWQKPFTSKNRKTTRHHAAAVAIGRRALGHPIRRRTAPPPHDQSDRAGHRTAQAGPGTTRREETRPRIPGPRTRSVGAGCGENAGDQNAQHRSGRSAEHGFWQQNSLPLSL

SEQ ID NO: 32515 - protein, 298 aa, Micromonospora sp.
VLAVKVSFPHRGEQWRDRVTANRAVAYRIHEDVAKGRWYLTASWTIPPVKTAPLNAARVGGLIGVDTNADHLAAWRLDEHGNPLGAPLTYGYDLSGTAQHRDAQVRHALIRLLHFAKRHNLSIAVEDLDFAAEKTREKHGRRKRFRKLISGMPVSNLRARLVSMATELGITIVVVDPAYTSKWGAQHWQKPFTSKNRKTTRHHAAAVAIGRRALGGHPIRRRTAPPPHDQSDRAGHRTAQAGPGTTRREETRPRIPGPRTRSVGAGCGENAGDQNAQHRSGRSAEHGFWQQNSLPLSL

SEQ ID NO: 32516 - protein, 427 aa, Micromonospora sp.
VLGVAVRERLGVVQAYRFALDLTPRQERAVLAHAGAARVAHNWALARVKTVMDQRAAERSYGIPDEQLTPTVGWSLPALRRAWNQAKADVAPWWAECSKEAFNTGLDALARALTNWSDSSTGKRAGRRVGFPRFKSRRRSTPSVRFTTGAIRVEPDRRHVVLPRLGRLKLHESARKLARRLEAGTARVLSATVRRDGGRWFVAFCVDVDRAARTPHQPQVVVGMDLGVKHLAVLSTGEMEPNPRHLDAAARRMRRLARRASRRVGPDRRTGRRASKRWERARVRLGRAHARVGNLRRDGLHKLTSRLAREYGTLVVEDLNVAGMLANRRLARSIADAGFAELRRQLAYKTGEEWRAAGGRPVVSVLENLLGLRRGENQTRPVRAHLHLHHVRPRPGPGPQRRTEPGRAGGHRRREWLGDAKRTWSRP

SEQ ID NO: 32517 - protein, 380 aa, Micromonospora sp.
VRWYHGTFTLDGRWVRIPTAKGTSPLWVRLARDVPYPVEQVRSVTLLCEGGRLFLDVTAEVPVAVYPPGEQPDPARVGGVDLGIIHPYAVAGPDGEGLLVSGRAIRAEHRMHLADTKARRRAVARRAPKRGEKGSRRWRQYRRRARLVEGRHRRRVRQAQHEAARSVVSWAVGQRVGVLHVGDPRGVLDLPVGRRHNLRLRQWQIGRLLQVLTDKATLAGISVRLVDERGTSSTCPACRMRVSKPRGRTLSCPHCAFSGHRDLVAAASIATRTPAADPPPWQRLCCRRWSRTVEPAGICPVPAGPDVTPAALQGRREDQLARGGPPHQPVGSRSPNRRGSTTPTGNPVNVSGHRTSVVRQKFAYKSVPVIRGSPRRFWSR

SEQ ID NO: 32518 - protein, 451 aa, Micromonospora sp.
VKTMQAYRFALDLTPSQERAVLAHAGAARVAHNWALARVKAVMDQRAAERSYGVADADLTPAVGWSLPALRKAWNAAKGDVAPWWAECSKEAFNTGLDALARALKNWADSRAGKRAGRPVGFPRFKSRRRTRPSVRFTTGAIRVEADRKHVMLPRLGRLKTHESTRKLTRRVDAGAARILSATVRRDGGRWYVSFTCEVQRADRVPTHPFSTVGVDVGVTHLAVLSTGELVPNPRHLDTAGRRMRRLARRMSRRVGPDRRTGQRPSNRWERARRQMTRAHARVANLRRDGLHKLTTRLARQYGTVVVEDLNVAGMLRNRRLARRIADAGFAELRRQLAYKTEWNGGRLVVADRWYPSSKTCSGCGAVKTKLALSERTYTCTTCGLVLDRDLNAARNLAALAAEVDTAGSGPVAGRGANRKTRHGGPVAAKRQPGTAPAGKAGTAPPQGRAA

SEQ ID NO: 32519 - protein, 474 aa, Micromonospora sp.
VKVTRIAYSTRLNAGKHAALLEQARRLGRVRSEVWQRYGSIAGVGSGLTCRQVRDRWLADGTHTRFGVLANAWKETVRDAMADIGANLAAAKVEVRRAITQRTSDPVERKRMFTALKANQWAEDPFLARQMRKHWKRGRNRTHDQIVVRADQHNTVTNARGQLWLAVPGLERRKMVRIPLSTTVAPTGTLRLILRGGRVEVHYQIDASQMRSSLRPCGDATIGVDKGYTEALTDSHGGRLGELLTSESDRLTERNRRRAKLRSIANTAALCGDHAKARRIRVNNLGTAKRDRQAARHRARVRTEIFTAVHRVVDKAATVVAEDLTKRFAGRKRLGKNVNRRLAGWTRGVTAEALANVSERRGSALVHVNAAYTSQACHRCGRLGRRSGDRLHCTLCRVVWQADVNAAINILQRAGDADIALHTPHRAVRQILQDRTDRHRTRLPVQDSSSATTERRANHPNRSPMSNSRKQVDR

SEQ ID NO: 32520 - protein, 387 aa, Micromonospora sp.
VKRSFKYRFYPSPQQAEQLNRTFGCVRLVYNRALEARSRKWKVDRHRSSYAQTSAWLTEWKRTDDLAFLNEVSAVPLQQTLRHLQAAFAGFWERRCGYPRYKSKRRSRASAEYTRSAFRWRDGHLTLAKMDAPLDIVWSRPLPTDVEPSTVTVSRDAAGRWYVSLLVEDPTVQALPALDRVVGVDAGITSLVTLSTGEKIANPRHEQADRRKLAKAQRNLSRKEKGSANRAKAQARVGRIHARVADRRRDHLHKLSTRLVRENQAVIIEDLSVRNLLRNHRMARVISDAAWSELRRMLEYKAVWYGRAVIVVDRWFPSSKTCSTCGRINPSMPLTVREWVCPACHTEHDRDVNAAQNILAAGLAERRNACGADVRPHGIPSLRGSRQ

SEQ ID NO: 32521 - protein, 392 aa, Micromonospora sp.
VRRAYTFLLRPTARQAAALAACLDDHRNLYNAALEERRGAWRRSRVTVRYGDQSTQLKDIRRTDPSGQARWSFSSQQATLRRLEKAFAAFFRRVKSGQTPGYPRFKGSGWFDTVEWPKDRDGCRWDSAPDSGQVRLYLQGVGHVRVHAHRAVAGIVKTISVKRQGRRWYVILSCDEVPAEQLPATGSAVGVDMGVASFLTTSDGVHVANPRYLAASTARLGAAQQVLARRERGSNRRRKARERVAALHARVRRQRLDHAHKTARWLVRHHDLIAHEDLRIGNMTRSAAGTLDAPGSNVAQKSGLNRSILDAGWGAFLRILAAKAESAGRLVVAVNPANTSRTCPQCGHCARDNRPTQAGFTCVTCGYTGHADVVGASNILRAGLALQSVQAA

SEQ ID NO: 32522 - protein, 408 aa, Moorea sp.
MRSAYQYRLRLTKKQVVELDRWLDMLRHQYNYLLADRFNWYEQNRCSVNSCPLVCHLPELRENPDYFSQKRTLPGLKKDRPWYADLHAHVLQDCVKRVDLAFKRWLKGDSKGKRSGRPRFKGKGRYRSLTFPSLGKDPIKGNQLKLPKFGWVKMIYHRPIPEGFKIKTATVTNKADGIYITLSVQDDTVPNIIPVDQISSPIGIDMGLKSFLIKSDGSEIEIPQYYRKAQKRLKKIQKAVSRSRKGSNNRKKAVTKLGVAHKKVADTRKDFHFKTVKGLLDNHVRVASPSANLVAHEKLNIKGLAKTRMAKSVLDAGWGQFLTILSIKAVRVAWPTALNAGLITKAVNPRNTSQNCSNCGKKVPKKLKDRIHSCPHCGYTEDRDVNAAKNILNLAVGHPVSSKACRVT

SEQ ID NO: 32523 - protein, 329 aa, Sharpea sp.
MRKAKHNEYRFQDIRMPHYRKKGGMFNLILSTNAITIKNGYLQMPISRAFKKLHPDCDIKIPFPKRLDGKAIKEVRILPIRNGKCFKVQYVYETEIKKASLSANNAMAIDLGVDNLASCITTLGTSFIMDGRKLKSINQGWNKEKARLQSIADKQGNKHTDRLSRITEKRNNQTKDIMRKSVRYIVNYCLKNDIGTVIVGYNPDFKRNVNIGKVNNQTFINISFGDFRQLLSGLCEQYGINYFEQEESYTSKSSFLDDDELPEYKAEQPYTGKFSGRRVHRGLYKSSDGTVINADINGAANILRKSKQNFNFEELCRGLLASPQRIRLL

SEQ ID NO: 32524 - protein, 442 aa, Halobacteriales sp.
MANQVVTRTYRARICNYSQVRDDLDSLGFAASKLWNVGRWTAQRIWDACGQIPGANALTAYLKNHERYADLHSQSSQRVLQELGEAFTSWYGKRGNGDTNANPPGYRKHNGDHPRSTVTFKQAGFKHDAANDRIRLSKGANLKHGWADFVLCEYDVIGPASRTVENVQQVRAVYEHGVWRLHIVCRVEIDARDAPGDGVAGVDLGICNLAAVSFGDEAVLYPGGALKEDKYWFQKERAKCDSSASREASRLDRKRTARRTHFLHTLSKEIVQQCVERNVGTIVVGDLGGIREDDESGGARNWGDHGNLDLHGWAFDRLTTMLEYKPEAESIDVECVSERDTSKTCSACRRSADRQRVERGLYVCDCGFVGNADCNGAENIRRKVLPNLACDGGDRDNGWLAQPAVRLGNPRPSGRGGCQFGGVRGAGGRVDGVPKCLTDIAE

SEQ ID NO: 32525 - protein, 494 aa, Bacillus sp.
MARKTKPTYTIEFPLHIPTWQQDRLEKKFKIAKTVYNSCLGEALKRHKAVKSDKEYRKFLKEPKSKERDSQLLDIRLNYGFSEYGIHSFVKSVQRKFKEHIGSFEAQKLATRAFQTVEKLHYRKSKKCHFKKSIDDISVENKSNKTGLRFVDGNILWGDKPTKNNPRPKNWLSMPVSPKPKDEYAHLALMDRTKYVRILKREVRGKVRYFVQLIQEGYPPTKRNREISNDETKRVGIDIGTSTIAICSEDKVQLQELAPECKTNEKELKRIQRKMDRSKRSTNSNNFNENGTIKKGRQTWIYSKKYEKLRKKRKELYRKITVQRKMSHEKMANDILSLGSDVRVETMRFQSLQKRTKNTTRNKKNGKINRKKRFGKSIANRAPAMLLTIIDRKLGYHGRSLKKIDTHATKASQFNHITGECSKKQLSERWNVFGEILIQRDLYSAFLISNTTETLNSVDIKLCNAQWNNFVKLHNLEVAHLKQSQSKTLRWFIA

SEQ ID NO: 32526 - protein, 419 aa, unknown
  TnpB Polypeptide
VQKDAQVCVVGKVFKPNRLKVLALNRTFNEYFRLVKWYLSFNSKSKSFLHENCYEKAKELFNLNTALIQTARDKAVEILKSFEKVKEKNSILRPKRISMRFDRRCYRFSKTTNVLTPYWLTLSLNRRERVSLPVAFGEKQKQRIEEALRGGWEFTTVEMVKRDGQWYAHFILKKSVEVPDEPETVITIDRGEHNLAVAVAISKSNPNKPIKGRFWRGQEIKQIRGLYGHIRRKLQEKSRVGKVKELKGKERRKVDQQLHIIANQIIAYAKQFPKPVIVMENLNGIRQNFKKSKKLNKRFHSLPFRKLQIYIEHKALLEGIEVRYLTKKETRNTSKTCHRCGHVAQVKGRMFKCPKCGMEYDRDLNACINIAHGVMSSMGWGSCEPPEPADEGIGAKPTPNAGSPQASTVGSSLELFPPS

SEQ ID NO: 32527 - protein, 438 aa, unknown
  TnpB Polypeptide
VLKINLLPRDPGDPEVTPYWDDFCASIAGVLPVHSEAQAVESGSWFSIARSFDTEVKPDSRKPSSFKIIRSRKIRVYPTADQRQAFKALFGTTRFGYNSTVAYLKTPGTKANWMAIKKPLLDSMPEWTHSLPHQSKSQSINDACKAVKAAKKKFKLTGEFQEVRFRSKKSPNQNAYIPKTAVTDKGIYYTIFGKLLASEKIPKADHDCRLVLQNDRYYLIVPQDVDAETCENQAGFVSLDPGLRTFLVAYSECGVEEYGAASYSRIARLCYALDELIGRTVKASGASKRRMKKAQLRLRNRIQDLIAELHHKVACFLTRTYKVIAIPEFNFHPMSGKLLRKTVRGLATLAHGRFRQVLASHAEKRSCKIVFQNEAYTSKTCSSCGHLQEIGSASRWQCQGCGIRHNRDINGARGIHLRALRDNSWIREHVSCISGASC

SEQ ID NO: 32528 - protein, 387 aa, unknown
  TnpB Polypeptide
VLLIVGEKIRLFLTDEQVQQFKKYSGASRFIYNTCLAECIRAYQEDGISLKKLNLIKYAESLKYDEKYSWLKEISSGVVRVAAQDVASAFNNFYKRGNKGFPRFKKKGKCKESFGLKADLTHCRFEDSKHLKFSKIREPVQIREHWIPDKMLNPRVSFDGKFWYFSFSYEIPDADLTINQENKNITGVDLGIKSLAVTSGGVIYKNINKSKRVKQLEKRKRHLQRKLSRKYQMNKEDSNFVKTNNIIKLEQEIRLIDRKLKNIRNTYIHQVTYDLVKTKPACIVIEDLNVKGMMKNKHLSKAIQQQEFYKFRQYISYKCQGYGVRLVVANRFYPSSKTCSCCGHKKKFLSLKERTYICHECGLVTDRDLNAAINLKIYGKEKLIKIA

SEQ ID NO: 32529 - protein, 476 aa, unknown
  TnpB Polypeptide
MTTFSFTARPSTDQQKAIARHVGARRFAWNQSLRLVLDAEKQKKTDPTLGVPRTAYSLINAINGWKRSEGAGRRFVAGSNGQTSVLAGLPWRHQVCAQVFEEAAVDLARALRAADKAKGTKRRVGFPSFQKKGRCAESFRLRNKVSKTGTPSITVGGTEPRSITLPVLGTIAVREDTRALRRLLRDGTDGPRGRVCQVTVALRRGRVVLYVTVQGPDRHPGRPDQGSEQGFVGVDLGLTVAVVAARADGTEVTRLAPLGPLQRSLTALRRADRTAARRQKGSNNRRKAHDRLGVIHARVANQRKDFLHRSSSTLVKTHDRLCLEDLAVRNMVANRHLARRIADAGWGTFRQMVDYKASWYGTELIIARRWFPSSRTCSSCGWHWAEMTLSDRVFRCQHCGLVMDRDRNAAVNLALWANAESSSASKAPDPEARGRVTNACGWTSAGHRLGGGGTGPATAGEARAKKQEPALLGDRA

SEQ ID NO: 32530 - protein, 476 aa, unknown; identical to SEQ ID NO: 32529
  TnpB Polypeptide

SEQ ID NO: 32531 - protein, 372 aa, unknown
  TnpB Polypeptide
MKTIKTVKCKLQVNSEQAGIILETLRRFASACNDILQVSLDNKTTNKIKLQHLCYYELKERYNLHANLVIRAIARVAETSKKKHKGNKPRKFKPTSMNLDARTFSFIEKREEVSISTIDGRLKLKLDIGNFQRGLLAGQKPTSVTLCYNKRTKEFYINIVVNREVPFPPKDGNIVGIDRGIYNLATTSNGLKFSGRQAMHIRKHYSKLRQSLQSKGTKGAKRLLKQLSGKEQRWMCELNHRISKTIVQSCQPGDVIVMEDLKYIRDRVRVARKQRHIQHSWAFGQLGDFIEYKAAERGIAVVYVDPRYTSQKCPQCGHISKNNRHQHLFRCKSCGYTDNADLNAAVNIRQVYLETLADGLPSYSPEVATSNG

SEQ ID NO: 32532 - protein, 359 aa, Brasilonema sp.
MLLSIKTKLKLSAEQKVIMSKHAGIARFTYNWGLATWQNLYNDGYKPNKYLLKKFFNNHVKPEFEWIKEKGICQKITQYAFDQLGDAYSRFFKGLGGYPKFKKKGQNDSFTIDASGKPIPVGGVRVKLPTIGWVKTYEGLPHTATTKLSISRIADDWYIAFAYEVETEPTPKSVDVVGVDLGIKELATLSTGITFPNSKTYKKNIQKLKRLSKTLARKAKGSSNRHKSKIKLAKHHARVSNIRKDSLHKVTNYLCKNHALVVVEDLNVSGMMQNHKLAQCIADCGFHEFKRQLEYKCKKFGSRLVVADRWYPSSKTCSNCGCKKESLSLSQRVYSCEHCGYVMDRDLNAAINLSRRALA

SEQ ID NO: 32533 - protein, 389 aa, Pseudomonas sp.
VLRATKVRIYPTLEQAEFLNRQFGAVRFCYNKALHIISTQYKRHGLKLRAKKDLKPLLAVAKKSRKYHWLGEFDSIALQQACINLDKAFQNFFDPKLASRYPTFKRKHGKQSSYHCTSVKAGDNWIKVPKLEPIKARIHRELAGTLKSITLSRTATGKYYASLLVEDGTAALVPIQSVDTVLGIDMGLTHLVIDSSGNKTANPRFLNRSQANVRRKQKALSRCQRGSRGRAKARLKLARAHERLANARANFQHNLSRQLIDENQAVIVETLKVKNMLKNRKLAKHISDASWYSLIQKLEYKARMQGKHVVKIDQWFASSRTCSGCNHRVDTLPLSVRYWTCPVCSIGHDRDVNAAINIRQQGIIKLRAEGLSVPANGGLRKSGHAPVAA

SEQ ID NO: 32534 - protein, 351 aa, Pseudomonas sp.
MPGTKTLKVRVRDKHAALLNEMARSVNIVWNYLNELSSRAIRERGIFLSAYDLQKYTNGSAKELGLHSHTVQCVSKEYVTRCKQFKKSRLNWRKSGGARRALGWVPINTGAASWKNGQVYHNGHYFKVWDSYGLAGYKFRSASFNEDARGRWYFNVVVDAEVQSSPGQGAVGIDLGLKDVATCSNGERLENGRFYHDLEAKLAIAQRSRNKARTRAIHAKIANRRKDALHQFSRKLVNSYGTIIVGDISPSTLAKTKMAKSVLDAGWAMLKTMLEYKCDHAGIVFKEVREAYTTRACSACGSLTGPKGVNGLRIREWTCCECGVAHDRDINAARNILALGHERPFVEIPVL

SEQ ID NO: 32535 - protein, 463 aa, Moorea sp.
MYRTIPIKATFTDEEKAFWLFQCENANSLCNCAIYYSKQKHYSWLEQQPEAYTTYWKGDDLRYGWKTYKCNIKYTELCKELKDNPHYKAMAAQSAQQTLKSVAESITSYNQLVGLYYKGQVDRPRLLRYRRKGGLAAVTFPRQALTYKKGLFYPSISKESKSELLTEIALEAPEFVDPDWVREVTIRPCYGQLWIDWVIDDGKQPVEHNFNLDYSQAWSFDHGGDNWLTGVSTQGKSFIIDGRKLKSMNQSYARLVAKYKAGVPDLYWDANLDRVQRKRNNQMRDAINKAARFIINRCLSNRIGNLIIGWNERQKDSANMGRRGNQNFVVIPTKRLIERLKQLCPEYGIRLTITEEAYTSKASFLDEDSLPRHGEKPSGWKPSGRRVRRGLYKSAKGYLVNADCNGAANIARKVATQLGIDLTKVGSGSLTLPHRFDLFKSLSRSYRTRSEAARENRCGVTSL

SEQ ID NO: 32536 - protein, 402 aa, Moorea sp.
MLRRVVKVRLYPTTEQKEIIAQHFGCGRFVYNKGIELNKIQYEETGKGFSKNDLFKLIALLKKEFPWLKDCYSQVLQMSMRNLGDALSDFFKGKARHPRYKSKFKSRQSIQFPENVKLKGRVSIAFPGRIGAVKASIHRSLDGKIKTVTLSKTSSDKYYCSVLMDYEGTEPEKSSTGKVVGIDVGIQDLAISFDGIETKKYENPQYFRKEKRLAIEQRRLSKKKKGSNNRKKQIKKVARVPERVSNARQDHLHKVSRTIVNENQVLVVENLNILGMVCATGTLRERNRKLAKSISDAGLGMFINFISYKLERSGKVLIKIDRWFPSSKLGSSCGYKMDKMPLEVREWQCPECGCNHDRDINAAKNIRAEGIRILSIADGTAVKACGADLRPQPTSVGAGRLH

SEQ ID NO: 32537 - protein, 379 aa, Moorea sp.
VSYQVYPSKELEDIWKKWIAAVRQVYNISIEQLNKNQGYTKVGKKGGKYGFRTWLKQSGLIPQWCKDLNVSKILDNASMEAYRAWKETAKQPKFVGKGKKRKPLPQAGLKIAKFRSVRDHKQTIQFDPTAYKAGRWMVSTTKHLPKPEFKGHDFCILTDGATELTYNKGRWFAHFPVEFDIEPTETKKVIALDPGVRTFMTGFDGTEFLEFGDNDFQRIAKLCSHLDKLKSKHDKSKGHIYKHRRYKLKAAMEKLRTRIKNIRAELHKQVASYLARNYDVIVLPTFNTSQMVPRKKRKLKTKTARAMMNWAFYQFSQILEHLCNRYGSKLVRITEEYTSKTCTKCGHIHRKLGSSKNFKCPHCGYEIPRDFNGAVGIFL

SEQ ID NO: 32538 - protein, 397 aa, Moorea sp.
MEFKAVIKEPQKVAINEAIRTARFVRNKVLRYWMDNRGVGKKELYRYNTQLRDEFKFVKDLNSHACQASVENVERAIKRFFDNCKNKVPGKKGYPRFKKYSTSVEYKQSGWKLSPDKKSIKFTDNKGIGKVKLKGTWDLWRFDQKLIKRVRIVQRADGYYVQFCVKIDNSEQLEATGFTVGLDVGLKEFYTDSDGYSEPNPRFYKKGEKRARFYQRRVSRKNKGSSNRRKAINKLGRHHLKISRQRSEHAKRLARCVIRSNDLVAYEYLRVKNLVKNHCLAKSINDAGWYQFREWLEHFGQKFGRITVAVNPAYTSQNCSNCGEVVKKSLSTRTHVCKCGCQLDRDHNAARNILTRALGTVGHTGTYQNACGELASTFPGSDLVKQVNSLKQESPSF

SEQ ID NO: 32539 - protein, 570 aa, Moorea sp.
MSHPGSLPLSSQSAPKPLKDGSEKEKSKGLKPLEDFDDTTWTQSSVFQPKRQEQTKEQQSYMQEFQVALKKTTLSNKYSFLSLVTQTQKSFETSEAVSTNEEKVFMPYWTEFSAVLANILSLPTKIGFVAKDSILSHGCALNSKLKYWFSTKRTSAQSKKWLRMFLRSSMSSVAGSTDLESISKKSLKTVSYRVYPSKELEKIWKKWISAVRKVYNISIEQLNKNQGYTKVGKKGGKHGFRTWLKQSGLIPQWCKNLKVSKILDNASMEAYTAWKETAKQPKFIGKSKKRQPNPQAGLKIAKFRSVRDQKQTIQFDPTAYKAGRWMVSTTRHLPKPKFKGQDFCVLTDGSTELTYNKGRWFAHFPVEFSIEPTETKKVIALDPGVRTFITGFDGTDFLEFGNNDFQRIAKLCSHLDKLKSEHDQSKGHIYKHRRHQLKVAMERLRTKIRSLRTELHKQVASYLAKNYDVIVLPTFETSQMVVRKKRKLKSKTARAMMTWAFYQFSQILEHLCNRYGSKLVRMTEEYTSKTCTKCGHVHRKLGSSLNFRCPHCKYEIPRDFNGAVGIFLFA

SEQ ID NO: 32540 - protein, 539 aa, Moorea sp.
MEPSNAKKPLAEHDSLTLEIFSVLEKLQSLTDCVVTPSVTVESVVTNNETILPAKSLTSTPSSRKRKSSKTSGQDSTTKGKVLKPYWNELCAEINSRLLLPVETDSADLGLNSLSTWSVSTVEKSWFSTSLKVVPNPSLPQIFSQSFTSFRGISTDSESTGRKSKKIRVFLNSEQRYTVRKWFGVSRYVFNKTVKLLQSGEVKANWKAIKTDILNDLPEWCKSVPYQIKSIAIKDACTAVREAKKKYKKTFQINRVKFRSRKNPKQSCYIPKSAVSEKGVYHTKLGEISYTESLPSNIGDCRLTSHNGDYYLVVPYEATKEKTENQGRVVALDPGVRTFLTFFSETSVGKIGNGDFSQIQRLCQHLDTLLSKISKAKRGQKRRMIKAARRMIIRIQNLINELHYKAARFLVDNFDVILLPTFETAQMSKKGSRKIRSKTVRNMLNFAHYRFKEFLQHKASETGKIVVDVCEAYTSKTVSWTGEMVNIGGSKTIKSKVDGQVMDRDINGARGIFLRSRSVAYGHALGDTPWLRNQLALVS

SEQ ID NO: 32541 - protein, 391 aa, Moorea sp.
MIIIEFKVYGKKHQYSAIEEAIRTVKFIRNSCIRLWMDNKGTGKYDLSKYCKILAKEFPFANELNSSARQAASERAWSSIAKFYDNCKKKVPGKKGFPRFKKHCRSVEYKQSGWKLSPDKKSIVFTDKKGIGKLKLKGTWDLWRFDKKQIKRVRIVKRADGYYVQFCVSVDCNEEIEPSRRTIGLDVGLKEFYTDSDGNTEPNPRFYRTGEKRLKFYQRRVSRKKKGSANRRKAVNRLGRHHLKISRQREEHAKRLARCVIRSNDLVAYEDLRVRNLVKNHCLAKSISDAGWYQFRKWLEHFGKKFGRVTVAVNPAYTSQNCSECDEVVKKSLSTRTHVCKCGCRLDRDHNAAVNILNRALGTVGHTGTWIIDPNAGGDLTSVLLDSGQVE

SEQ ID NO: 32542 - protein, 477 aa, Moorea sp.
MPRKVDAAKKRSTQIVPVVGMTESVEAELLQVMKKLGIVRSESYNKLGSISHWNLDWKKAYPEVRSFRTPESLGLPSKLMEWTVSDVAKAITAQQAACADAVIKKIYKRFPGKDKQKTRKELCKQLKTLAFLDNPLLHRMIRKEYQRGHSWVGNQIVYQQGGYKCQRLSRNTYQIELAGLKRGKRNKVLVRSNRQIKGQIRLIYNQLLQRFEIHFLVDHGTVEIPAKRRSIGVDKGYTEALYDSDGQAHGKNLGRVATNKSDRICSKNRNRGKLWALHRKLEKLDPAKSARILKNNLTRKAENRRYRKNQSELTAIIGAASKSLFNGESLKVFAVREAWPTALDLTQPIRNKRQSKAMSRKLNSWMKGVMRDSLQKWANWTGSVVTEVQPSYTSQVDSVTGTLLGKRSGDNFTRFDGVVLQADHNAAQNILDRGTDKDISRYMNKTEVQAVLLRRTARFLKGMGLSLADAVELGWIG

SEQ ID NO: 32543 - protein, 467 aa, Moorea sp.
LYRTIPVRANFTDEEKAFWIFQCEQANSLTNCATYYVRQNHYNKLEQQENSFTTYWRGDELFYGWKIYKCSTNYAELCRSLKDNPHYKGMAAQSAQQTLKTVAESISSYNQLVSLYYKGKVDRPRLLRYRKKGGLAAVAFPRQALSYKNGDFVPSISKETKPHLITEITLNPPDFLDPDWVKEVTVRPYLGDLWIDWVIDDGKEAITSNPNLDYTQAWSFDHGGDNWLTGVSTHGKSLIIDGRKLKSMNQGYCRLVAKYKQGKPEFYWDSNLDRVQRKRNNQIRDAINKAARFIINRCLNDSAKPTLRERIGNLIIGWNEGQKNRSNMGKRGNQNFILIPTGRLIARLKQLCPEYGIKLTVTEEAYTSKASYLDNDSLPKHGEKPNGWFPSGFRVKRGLYKTSAGWLVNADCNGAANIARKVATQLGIDLTRVGRGALTLPTRYDLFSSLSRSYRTRNEVARFQPAT

SEQ ID NO: 32544 - protein, 457 aa, Moorea sp.
LYKTIPVKAVFSEEERAFWEFQCQQANSLFNCAIYYAKQKHYNWLKEQEAYTTYWSGDDLRVGWKTYKCTTKYPELDIALKMSPHYKGMAAQSAQQTLKTVGEAITSFNKLVGLYYQGKVDRPRFPRYRKSGGFAAVTFPRQALKYREGLFDPSVSKESKPELLTQITLSPPDFIDPDWVKEVTVRPCYGQLWIDWVIDDRKQPITDNPKLDYFQAIGIDHGGDNWLTCVSTLGKSFIIDGRKLKSMNQGYCRLVAKYKSGKPEKYWDSHLDKIQLKRNNQMRDAINKTARFLVNRCLNNGIGNLVFGWNEGQKNCSSMGKKGNQNFVPIPTKRLIERLKQLCPEYGIKLIITEESYTSKASFLDGDSLPKYGEKPSGWIPSGKRVRRGLYKTASGKLINADSNGAANILRKVSTQSFDLTKVVRGALTLPHRYNLFTDLSKLYRYKGEAVRVYPTA

SEQ ID NO: 32545 - protein, 302 aa, Moorea sp.
MIVLEFKVKGNKTQYAAIDEAIRTGQFVRNKCIRYWMDNKGIGQKDLYRYNTWLRAEYPFVKDLNSHACQASVERAYSSISRFYDKCKKQVPGKKGYPKFKKFSRSVEYKTSGWKLSLDTKSIKFLDKKGIGKLKLKGTWEVWRYDQKLIKRVRLVRRADGYYVQFCVKADLKESLEPSHTNIGLDVGLKEFYTDSKGNIEPNPRFYRKGEKRLKFHQRRVSRKNKGSSSRKKAVNRLGRMHLKISRQRVGVACAKRIEHAKRLARCVIHSNDVVAYVREACRKARFKGDKFGQKSLSLQVY

SEQ ID NO: 32546 - protein, 254 aa, Moorea sp.
MQVGYSYKLKPNQQQKATMNRWLDMLRAQYNYLLRDRNDSYDQAKAPRLGNYCDLKSGREACPLTCSVSKNYSVGYPWKKSQKNPRRSAYEAQSSSLPILKKERPWYKSIHSTVLQQTLRQLDVAFAKFFKGETGYPKPKRRSRFRSFKYAPGQVKLNGNKIYLPGIGWMGFYNSRPIPEGFILKSVTVRRKARGWFASLQIEDKSVPPTPVKDNTEINPLKVKGCDLGINKLVSLSNGKTIANPAKQKYFRRK

SEQ ID NO: 32547 - protein, 477 aa, Moorea sp.
MSKKRSNRRTKKKKKKEADLMRTDVWSLVATQEQKHQMQLTVNEYRAFLTPLVLIFNAQWAKLATLSSTERINAVEKMIHATAKNPAPKHNYYQKVLDKNPSFRKFPSYLRRAAIADAIGIVSSFQTRYREWQSGIRKHRQARPPRLTAMCKSYPALYQGQQIKYGVNYATVDIKVWDGTDWVWLKKIKVKKHGGNRHLTKGNQLCSPALVIDLKKCQLSMPVEVKQGSRQEAEYICSVDLGINNAAVAAIVGRDGTVKARKFINPARDIDCRNRRRMKIAKKAKQTSNITGKKLPRGFCKGLYRKSSNLNLEIGRTVAREIVKFALLHGVKVIVLENLSGWKAKAGKKGSLMKQKFHLWCHSKICELINDKWTEVGGVVQTINPKYTSAVAFDGSGKVLRSKINYSLAKFSTGKRYHADLNASYNIGARYWYSVIVGDRHFSRVFDSKSSNGTSRTPIVLGTLRSLATFKRTNPHP

SEQ ID NO: 32548 - protein, 454 aa, Moorea sp.
VKAPTKVIRTDKWQLNPTPDQKVLLGETVKAYRRACQYLVGIIYTHWSELGELTADQLTPAVERLMHQTAKRPNVKYPQFNKTFYKFPSYLRRAAFAKRRLRRIAFSAGQVSSFVTRYREWQSGNRKRRNAKPPRLNADTGCYPALYKGQCYKLHGYDQIEIKVFNGSDWIWTTVQITGLRERHLVATNKMMSPSLVCNERYCHLSVPFACKPEKRKPKANVTAVDLGINTTATIAVVAHDGTVIHRYFIHPGRDIDRRDKRLKSVSMRASKTMGKGGKLHKEFCSLTYDKCRRINHQIGHIVSKRIVEIAEQFNSEAIVFENLKGWKPKGGRKRSNLRQRFHGWLKAKIRNFTEMKWAELGGKVIEVVAAYTSKLAYDGSGTVKRNSKKYSLATFPSGKRFNADLNGAYNIGARGVFKLTRRNDGEGRSSKSSGRPPRSWACLCDLWARVAPD

SEQ ID NO: 32549 - protein, 336 aa, unknown
  TnpB Polypeptide
MILTYKLKHNKDFSGELRKAKQVAEFGIKNRTLSSKDVKQFGLKSAISNQILRKYVKNKKVKSVSSVQLTIPNQGIKVDKNSRKIIIPCLKLVLDYQFPDFEKINQIEIGKEYACVSVTIPDIEPVKVDNYIGVDRNTTGHIAVAANPKTGKIWKLGKSGLHIHKKYSNIRRTLQKQGKYKKVKQIKNRESRIVKDLNHKISKKIVETAKENNCGIKLEDLTGIRNNNKHVRSFRYSLNSWSFYQLQMFIEYKAKIQGVEVVYIDPRYTSKSCSRCGLIGNRNGKKFKCPTCGHVDHSDINAAFNIAVKDVKVDQSIEERDSIEGNTDIPKAALSI

SEQ ID NO: 32550 - protein, 319 aa, unknown
  TnpB Polypeptide
MPVFYRDVMYREDTEEKDRAYLKLFDGHNWKWFRVSLSHTDMEYLRKNWAGKKAAAPVLEKRHRKYFLRFSYTEEVPLTKAPVKEQIICSVDLGLNTDAVCTIMRSDGTVLGRKFIDLSSEKDRMYRVLGRIRRFQREHGPVQVKSRWAYAKRLNTELGRKIAGAVAGYAEENHADVIVFEYLETKGKISGRKKQKLHLWRKRDIQKRCEHQAHRRGMRISRICAWNTSRLACDGSGTVVRDPGNHSLCTFQNGKRYNCDLSASYNIGARYFIRELLKPLPATERSLLEAKVPSVKRRISCVYADLRELFSEMELLRAA

SEQ ID NO: 32551 - protein, 406 aa, unknown
  TnpB Polypeptide
MKTVTRSYTLLKITPSHPYYNWCKQACLQSRYLYNTMLYQYRNSYFDKDIKILSNIELYQIGKVSEHWSNLPAKCSNLVWMQLVTNISSYWAAIKEYKKNPSKFKKSPKIPNYNKGMNIVTFEKQALLTKKLPANHIRLIRTDIILDLSNYKGDIREIKIIPKKNHFIIKAIFKQTINQEDLKHDIIGSIDIGVNNLAAITTNQVHVRHILINGRPLKSINQYYNKTKASLQSKLPKKQKSSNRIRLLTDKRNNKIQDYIHKASRYIVNWLIENKIGTLVIGKNKEWKQQINIGSSNNQSFTMIPHARFIALIKYKFEAVGGIVKLVNEAYTSKCSALDLEPICKQTEYKGKRVKRGLFKSNKGILVNADINGSLNILRKVVKEDDLSDLIESRQWAMQSPIRITL

SEQ ID NO: 32552 - protein, 436 aa, unknown
  TnpB Polypeptide
MNTVRVYRLKPTPKLFARLRDAQIEAAKVWNLCVQIHKQARMSHVKWPGRNELQKATKGQFALHSQSVQMVVHAFLANVETTRKLRQTHPQMKMKYPWREKRFYPVKWPAQAVSRENGRVVLPMGKSRESMVLPIDLPENSGACSLVWNNGFELHVCVEMQEAEEAPGVVHATIDLGEIHLAAVSTNTGEALIVTGRGIRTLKRQRSKQLGKLAKKQSRCKVHSRRWRKLQRAKNKIKAKAERRIRDLRHKATRHAINFCQEQGVGSLFIGNPHGVRNRDWGRHHNQRMSLWEYGKDIDYLTHKSKQAHIMSFTGSERGTSSQCPVCEHKHKPKGRNWACRKCGFVGHRDIVGSVNMHKLAFGEHVSFPRSVTYLRPGPSRRSRRADTPLASSDACCLSQLTAQPLLGEQVPTGTGHTVGVREKLTPFSGVESVTC

SEQ ID NO: 32553 - protein, 411 aa, unknown
  TnpB Polypeptide
MDWQRNTVRQTYNHALREFNQIPEDAGTLRQRVWMVRDKLPALKDWWPDLKQVYSTVLQKAVERIRDNIQNLGKLKAKGYDVGSLNWKKPREYRSFTYRQSGFELDKKSGPNGRGFLILKKLKGETREIPIRLHRNLPDHEQIKEITLKKEPTGAWYVSFCIEVDDSEKPAVEDIDPEDTVGLDLGVLNFIHDSEGLSVGRLNLSEDRERLEREQRSLSRKDYESNNWQKQRRRVAEVHARMSNKKRDYKHKLAHFYTTQYDAVFVEDLNVRGMLEGQGNARNKAEVGWRDFITILKHHGKKNACHVVGVNPCGTTKECASCGVSTRKPLWVREHSCPSCGFELDRDWNASLNVLSRGLSKLGVVHSESTPVETATAVSTDGGDTSIVVNASRVVETGSPALKEATRSVAE

SEQ ID NO: 32554 - protein, 412 aa, unknown
  TnpB Polypeptide
MPVIVREEMLVKGIVFYLDSDLPFQARSLLEDFRLAVNNAIRAGLQARVTSRNALCRIAYKDFRKEHPRMYSHHLVSAFEVAGSVLKNHRRRVRKGITCRIPFVKRLMMKAENQAYKLDRKSGVVDLPIRAGCHVELRLVVSQYHRKYLDDMALSLGSLTVLPDRVIVAFRKDAPKPFVPESALSLDTNERSLDGVFVECDVARAVQADFPEVAIIQQRHHDRRKRLQKKKAHDRRTSRDLCRREGAREHHRIDYRLHQVANSVLKFAEERKSAIVLEDLKGLRPKSSKELNRRLSLWPRRKLHQIIEYKAQWRGIPVVKVDPRNSSRTCPICRTIQDSRMGAEFKCECGWRLNRHINASINLLQTAISKGMAGGLRFNPGAFQNDVMMILYEPAMAARSEPNGTSGIVGVT

SEQ ID NO: 32555 - protein, 502 aa, Bacteroidetes sp.
MQASSPSFITEIPLKIGSYERSILKKRFWAAKQQYNALLGECLDRLEQVKKDERFKKANELYRDKETRAEAKSLFKQLNIDHQYREYDLYSYCIQWNKKKSPLSIGSRISQKLAKRVFLSVEKYRTLKQNPKEYKKYKGKPRFKGYRGLTSIEDNSIDANLRLRNGLIQYLGINLRLEYNLTDPIHYHSKTSKVKYIRLVKRQFNKKIHYFAQLVSEGKPLIKSQNISKEGVIGLDIGPQTIAIVSKEAPFASISSFADELKEQKVLKQKYQRKQSRQLRSCNPDSYEKDVWGKKDKYFKRKHGKNIKGKSLRNRSKSLKKTHLKLNELCRRESATRKTLHGELVNKILREGHIVKTEKISYKWFQSLHGKSVGLRAPGMFVEILKRKAENAGGKVEEVNTITTKLSQSCHCGKVRKKTLKERWHKCICGTICQRDLYSAYLVCYVEKNKLIADQAKANWSGKDLVLSAAMRKLKQSSRGKSFPSSLGLGNMPILGSEIVAC

SEQ ID NO: 32556 - protein, 475 aa, Desulfurococcus sp.
VDERVRRTNVVKLVVDKETHEKLVGLGIATAKCWNEVNWLRMRQFKRGERVDFTGTEREVYRKYRDALKVNAQQVARKNAEDWRSFFSLIGEKKEGKLSRWFKPRPPGYWKDGSGRYKLTVIIRNDRYKVDEEKRTIYLKDFNLSLRFKGKLKWHGKQGRLEIIYNEARKSWYAHIPVEVEGTTEAGGDLRASVDLGIVNLATVYVEDGDWYIFKGGSVLSQYEYYGKRISRVQKILSRHGQRRGRRLALLYDKRRRFLRHALNSMVRRIMEELKGREVGEIIVGYPEGISRSRGNKLTVNFWSYDYVIRRFEEIGEELGIKVVKVNEAHTSKTCSLCGEAHDNGRVKRGLFKCPRMGRVINADLNAAINILHIPESQGTGSRGQLPERDRGNGLKTQPVVYRWTNGAGWLKATSYEVVRMKAVNHKPVIHPKGTLAPLGRGGGQGHPVARILHNGYIMGYEEICEPESLLEISQ

SEQ ID NO: 32557 - protein, 444 aa, Desulfurococcus sp.
MGGEGFLTLCVVFRVSPEPVGEPLLLSLLRRYRDALNYSIKRIHGYMEENGLKKTPGDGAVHGLLYEELKSRFGLPSRIAVDCYREAKSILKSWLGNGGNGGLPRARRPRMWLTEKQGYRVRDGYVEIIGGLRLKIIGWDRRYDQYPSRQAVLTYRSGKFLLRVAKRVPKPQPISPVDVLAVDVNEKYIVAGNHRVEYRFETAVEKAVRYRELAERLQRKYSNGSYRAWLRRRGIRDRVRRFHEKARSIIEDWARKVSREIALTARRDGYAVAREDLTYLVESLRRLPRQHKTKLILLGYRRLGYWLDWQCEKHGVPHIAVDPRNTSSTCPLCGSRLIENGYRRMKCPNCGFEADRDTVAVLNIRRKALLQMGGSLTTPTAPQMTDVAPNRCGEPVNRPKGNPFRAGRRSDLGDASLTAWLNDSTYTATRIPRQALWRAPYTCS

SEQ ID NO: 32558 - protein, 501 aa, Desulfurococcus sp.
MVSETSTPLNSLENASTPSRTLLREREPCGLFTLLHNSSLTTKESLAFQGGDAEFKYVVAVVVEVGVSPMGGEGFLTLCAVFRVSPEPVGEPLLLSLLRRYRDALNYSIKRIHGYMEENGLKKTPGDGAVHGLLYEELKSRFGLPSRIAVDCYREAKAILKSWLGNGGDGRLPRARRPRMWLAEKQGYRVRDGYVEVIGGLRLKIIGWDRRYDQYPNRQAVLTYRSGKFLLRVAKKVPKPQPISPVDVLAVDVNEKYIVAGNHRVEYRFETAVERAVRYRELAERLQRKYSNGSYRAWLRRRGIRDRVRRFHEKARSIIEDWARKVSREIALTARRDGYAVAREDLTYLVESLRRLPRQHRTRLVLLGYRRFEYWLDWQCEKHGVPHIAVNPKDTSSTCPRCGSRLVESGYRRMKCPDCGFEADRDTVAVLNIRRKALARMGGSLATPTAPQMTDVPPEQMRGTSEPPKGNPRPLGRGGGQWATVSLNEGDHVAVFPFPLY

SEQ ID NO: 32559 - protein, 415 aa, Desulfurococcus sp.
MTSLLTRTVIVPSSRLGWRKFNALRELGEKYREFVVHLVEYGFKHGVKSFTGLKKAKYRELRERYPGLPSHYVHTACQDAAQRVRSFLALKCKGKAKTGGPEVRKVSIWLDDHLWKSEGYTAIKVATHRGWIMIPLWPTKLFWRYVNSGWRLRTQIRLKLDEKRRVAYVYFVFEKMVEERPTRSVIAVDLNENNVTVKAGDKVYILETRIRKITVGYHNRREILQSTKGNRYASRMVKRNEFNKKNDIRRKVASLIVREAERLGVAIAVENLPREAPKDMIKDVDDPKLRDRIYRAGFRSMVREIVQKAREKGIPVIKVNPRGTSSTCPQCGGRLVRGNAPRSLLCLHCGWEGGRDIAAVMNIERRALEKLAEGRVPFGPMPSEPTPEVAWLPMRAWARRKSLDMIEHKWMRMNI

SEQ ID NO: 32560 - protein, 442 aa, Desulfurococcus sp.
VKESLAFQGGDAEFKCVVAVVVEVGVSSMGGEGFLTLCAVFRVSPEPVGEPLLLSLLRRYRDALNYSIKRIHGYMEENGLKKTPGDGAVHGLLYEELKSRFGLPSRIAIDCYREAKSILKSWLGNGGNGRLPRARRPRMWLTERYGYRVKDGYVEIIGGLRLKIIGWDRRYDQYPSRQAVLTYRNGKFLLRVAKMVPKPQPINPVDVLAVDVNEKYIVAGNHRVEHRFETAVEKAVRYRELAERLQRKYSNGSYRAWLRRRGIRDRVRRFHEKARSIIEDWARKTSHEIVVVARQNNYAIAREDLTYLVESLRKLPRQHRTRLVLLGYRRLGYWLDWQCEKHGVPCIAVNPKDTSSTCPLCGSRLVESGYRRLKCPSCGFEADRDTVAVLNIRRKALAQMGGSLTTPTAPQMTDVAPNRCGEPVNRPKGNPLLGRGGGQQYA

SEQ ID NO: 32561 - protein, 480 aa, unknown
  TnpB Polypeptide
MKAILTDLTTEQKAIIDHLMLVFCTAIRYSFKRQLEGKPIGALEKMVANIYSLNIRQAKDAVESARQTISSQHELVKLNHRNYAKKVDVLLKKLKHPKLSGLKLKALTSKLAKRQRKLAYWTAFLTSRTFPPVTFGTKEMFLRRCKGLITKKEWQDKRNNRLYSRGDKSKGGNPNLRVVFKDGISFLEISKIEKTKTNRAVKVIMPIYLPQKLSKKTGKINGIHYRQLFLDSLERGDAYQVEILRREGKYYVHITFEELEAKVLFTGHRSMLGADTNSDGFGLTEVSRQGNYQSHAYLRQHELTFCRSDRRLNLCGELVRDVVAKAEKHQCGLAFEDLKFKDDRDVTAKLARISSQFVYATLLQMLERRCLRRGAEYVKVRPQYTSKIGLYKYCHQYGLDVHNGAALVIARRSYGLSESVPKLLRDKLITEKKLAQFHVKNEWSQWSEVTKQIGKLSKKRKEVNSPGLWLANRKRLLGIT

SEQ ID NO: 32562 - protein, 424 aa, Streptomyces sp.
MLESYVGRVKLVVRVKLLPTPVQAAALEATLYACNEAANWASGVAFEKDARRPLSLRKHAYLPVRERWGLGAQAAQHVIKKACDAYATLRAGLRGGRYGKPGTKRHTKVSGKPVAFRAEAAQPYDDRMLSWQHEQRTVSIWTTAGRLKNVVFTGKTEQLAVLADCRKGESDLVLQGGRWYLMATCEISETAQNTQPVAFIGVDLGIVNIAATSGGSRHSGRNINRKRERDRKLRSKLQKKGTKSAKRRAKRYAGREARRNKDINHKISKLIVAEAERTGRGIALEELMGIRDRARLRKPQRVMIHSWPFAQLGSFIAYKAKRAGVPVIHVDPAHTSQECSQCHHIERGNRPSQARFACRSCGFVEHADHNSSHNIAHRGWYAWVCGAQSTAPELALTARVQDAAEPVTASDGSSGKLGRHRPGS

SEQ ID NO: 32563 - protein, 371 aa, unknown
  TnpB Polypeptide
VRRAVRHQELGKILPELLQESQALQLSAIQEEIPTRQLYAVQRRFKVEGSRIRIPRIGWVRMHEALRFENAKLLFATISRVADDWYISFQLELQDLKHLTPAKNHGRVGVDLGVKQMVTLSDGHVFEAPKPLGKYLQKLKRLQRKMSRTKAKGSNRAKLGKVIARLHRRIADIRNDALHKVTNFIASNYSTVVIEDLNVKGMLKNHKLARCIADVGFGEFRRQLSYKMQLRGGELIVADRWYPSSKTCRFCHRKNEDLTLSDREWVCPHCGSKIEDRDLNAALNLCEYRESWGSDDAWASKDPSESSPDLAPPVVVCRQDELVGGIDSLRNNASTDEGASVLKGHPEVNASVDWGRKPTIEPSKLQLGRNS

SEQ ID NO: 32564 - protein, 367 aa, Paenibacillus sp.
LLYHKAFSYRIYPTKEQENLLRKTFGSCRFVFNRFLAQWNQAFTETNKGLSYNTCATQLPALKQEFEWLKEVDSIALQSAIRNLADSFDRFFKRQNADPCFKSRKNPVQSYTTKYTNGNIAIEGHFLKLPKLGRIRFANSRPLDGRILSATVRQNAAGKYFVSILCEAEIQSLPAIAKVVGIDLGIKTFAVCSDGQAFANPKYHSKYEKQLAFWQRRLSRRTKGGYNWKKAKVKIARIHEKIANCRKDFLHKLSTKLIRENQTICLEDLQVSNLIKNNKLAKSIVEVSWSMFRTFLMYKADWYNRTISVVAKNFPSSQLCHVCGTRNSDVKDLALRVWTCMECGSLHDRDHNASQNIKHEGIRLLVG

SEQ ID NO: 32565 - protein, 389 aa, unknown
  TnpB Polypeptide
MDQNKKHWGCSLKAEVKVASQGKILNPNKEKRHKLNVVLEKYMKAVKFFASFCINDKKLLQQKAYKEARRRFGLSSTLTQTARDKAVELIKVNEGREFHVHRVSIRVNYRAFKLVRRDTKLTPYWLYLKLDGDGVWCPVQFGEKQRQMIDDALSDDGEWSLQQVELVKRDGEWYVYFTLEKPFKNYEPKTAIGIDLGERNVATVVALVDDKPTKGTFFKGSKIKEVRHRHFNIRKKLQEKRRLDVIKRLRGKERRVVNHELHVIAKEIVEYAKQFPSPVIAMEKLTGIRENFKKGKKLNRRFHSLPFRKLQKIVEYKAKIQGIKVVYVDPRNTSKTCHKCGYVTHVEGREYHCPKCGLKYNRDLNASINIARALTRGTGRGYVNTPKGT

SEQ ID NO: 32566 - protein, 495 aa, unknown
  TnpB Polypeptide
MSTFVMEYEITVGSQEKNFLEKCFNVGSNINNLCLNRCLKQLNKLKRDKEYLKSVKAIKNLNKRIEKKNISQIEITKSKKIKKILIDKIKDLEKKYKFTENDIQKYSKIPREFTENVLNSSIVQKISSNAFNAVKKIQYGKAKKINFKRKGEISLEGKNNETGFIFDIKMMKLKLNRKLSCNLKSLDKKQRNCLKNRIKFCRILKRYIRGKKRYFLQIVFEGTPETDFQLGEGEVGLDIGTSTVAVSSNDEVKLLKLCETEQEERKIRIVQRNLERKRKISNPENYDVKGKIKKKRKKWKLSKNYLKELNKLKEVYRKKKVKDNQYKNILAKFILRQGDTVKVEKVSVTSWKNRSKKTVKNKNNGKIISKKRFGKTINNNAPGTLLRKLKEKLLYFEKELIEINPFKTKASQFNHIKQEFKKCSLEVRFKELKQGIIVQRDLYSAFLIQNVKNSNEYDIKKINQEFGNFYKKQLEEIERIKKEEKLKFYIRNHIV

SEQ ID NO: 32567 - protein, 414 aa, Streptomyces sp.
VHLRYSFRLEPTPGQRIALARTFGCARVVYNDALAARKAAYAVDKSHVATGVLARRVITEAKRTPERAWLAEVSVDALQSSLRDLDAAYANFFASVSGKRRGRRVSLPRFKSKREMRQSVRFSKNGFRLRDNGRLNLAKIGDVRVRWSRPLPSAPSSVTVIKDPSGRYFASFVVEVEPEPLAPVTSEVGIDLGLTHYAVLSDGKVIDNPRFLRRAERRLRKAQQTLSRKVKGSANRAKARIRVARAHARVADARRDWCHQIASGLVRDNQAVYLEDLAVSGLARTRMAKSVHDAAWGMFRRVLEDKAARAGRHVGVVSRWLPSSQTCSVCWVVDGKKPLHVRAWRCSGCGTEHDRDLNASRVILAAGQAERLNAPGGPVSPGAENPCQARPVERGTHPKPQPVTTGRQAGIPVL

SEQ ID NO: 32568 - protein, 439 aa, Streptomyces sp.
MRAPAEQGRGRGIAVRAIRRRPDGVEGDLEQVQDLGVEGPPVSGGLNGEPGVEFFGDAKHEFEHSAVMALSRYYRDGMAKFRMYPTSAQEQQMLLHCAHARYVWNLAVEQHSHRYPGRRAAPGFAEQCRQLTEARHASEWLGSGNADVQQQALKDFAQAKNARFTSGFGEPTWRKKYRHEGFRVIGTARVPELTDDGSPKLNAKTGRQVMGRSVVVHQLNRRWAQVKVPGCGWVRFRLTRTDLPKAKTFRVTYRNGQWHIAFAVIPAPVTAPATGEVIGVDRGVNITAALSDGRKLNCPQLTVKERAQVRKHQRRAARAPKASEQKTTAYAKVARLKAREADRRKDWCEKTSTMLARTYRLVRFEKLNIKNMTRSARGTTEQPGKQVRQKAGLNRAILAQGWGLLRQRTGHKAPGRVEDVPAPYTSLRCSVCWGHLPRP

SEQ ID NO: 32569 - protein, 130 aa, unknown
  TnpB Polypeptide
MHARIANVRKDALHKATSAIVARTKPNSERPAIIVLEDLHVSGMLKNRRLSRAIADVGMYEFRRQIEYKAREAFVQVKFVSRWYPSSKTCSDCGWIHEDLTLAERVFICQQCGVVLDRDENAAYNLAASA

SEQ ID NO: 32570 - protein, 275 aa, Nocardia sp.
VQLRYNFRVYPTPGQRVAPAQAFGCARVVYNGNLRAREHAHAAGLKLSDTEVQRRVVTDAEHTSERSWPAGVSSVVLVQACQDARAAYRNWFDSLSGKRKGQRLGKPRFRSRKDNRQAIRLTRNGFTLRANRKLYVAKVGELKVAWSRELSSVTVVKDSAGRYFASFVVMIDDRALPEVDSEVGIDLGLATFAVRGGLEREGSRTDPPGEVGARCRVGDVHPAVGGESRPVRPYLRQGGSLVSLDPVVFGMWAGRRRQAVACAGMDVHVWCCPRS

SEQ ID NO: 32571 - protein, 257 aa, Azotobacter sp.
MTKRAYKYRFYPTPEQADRLARTFGCVRFVYNAVLRWRTDAFFKEQQKVGYTQASARLTAIKKLPETTFLNEVSSVPLQQCLRHQQAAFKNFFEGRAKYPAFKKKRHRQSAEFTSSAFRYRDGKLFLAKCDEPLAIRWSRPLPGEPSTVTISRDSAGRYFVSCLCEFEPETLPVVPKTLGIDLGLKDLFVTSEGERIGNPRHSAKYASRLALAQRRLSKKQLGSARRTAPGLDGKWPIFTPKSPIAERTACTSCPAD

SEQ ID NO: 32572 - protein, 565 aa, unknown
  TnpB Polypeptide
MSKKHKKSKQISTCEDVLFSTYQTRMKNQPDAVYGALDDCAALFSQIERKLFAQSQIVPTFKGKIFNQIKSFFLSFFGILSRQFNSINFALQGKIDSYRSNLDRYIKENQERIEKTRKTIEKLSKKEIESDQRQKHDYKIHQKKRRLTRLEKRLEQLEFDKSTGRVRVCFGSRKLFNAQFDLKANGYENIEQWKSDWQKARSNQFILVGSKDETAGNQLCVAKTQKDGTLTLRVRMPDALVPKHGKYVEIQGVKFEYGQDVIEAALNDNEARRVLKSLKSSETKCYGQAITYRFLRDDKGWRVFVSTARPEVPIKTLKHIGTIGIDLNANHVALVETDRFGNIIDTETIQLNTYGKSKGQTESIIGEVVKAIVERAEKTLKPIVIEDLDFSHKKSVLKENSSKRHARMLSSFIYSKFRAFLESRASKYGVRIYKVNPAFTSVIGRVKFARRYGLTVHHAAALVIARRLCRFSERAPSSCRDEVVIPNNKGGHVTFSLPVRNRGKHVWSFWLRGKSLRSKLLPRSVSRKLKSVVHVAQVRATELTARSSQTQGPLVGTGGQPSLES

SEQ ID NO: 32573 - protein, 369 aa, Staphylococcus sp.
MITKKVRLRPTKQQEVQLYKSSGTARFIYNWVLGKQKENYKKGNKFISDSVLRKEITQLKKTEEFNWLNEVSNNVPKQAIKDACNSYKRFFKGQAKFPKFKSKKKTKPSFYNDTQKLKVKEKLVLLEKVGWVRTSEQLPIDTKYYNPRITFDGKYWYLSVSIEEENKYEKLTEESLGIDLGIKELAICSDGTIYGNINKTVKVKKLEKRLRRLQRKVSRKYQNNKEGSTFVKTCNIIKLEKQIKLLQRRLSNIRKNHLHQTTTSIVKTKPRRIVIEDLNVSGMMKNRHLAKAIQKQGFYEFRRQLEYKCKRKGIELVIVNRFFPSSKTCSSCGIINKNLKLSDRVFNCECGFSIDRDFNASVNLANYNI

SEQ ID NO: 32574 - protein, 326 aa, Staphylococcus sp.
MSYLSGYDFHKWLNKEYIPNNPNKIWIKEVYSKSTARAMQNADRAYKDFMRGNRGRPRFKKKQTNGSYYLWGNMEVERHKIKLPKLKWVKLKRKGYIPTNLKVVSATLTKEVDRYYISVMFEEDLKSIFKKPQTEGIGIDLGLKDTLFTPSGVHITDLRKNKRLIKLNKSLKRQQRKLSRKQKKSNNWFKQLLKIQRLYRKINNIKKDIKQKKVLEIVKENPQFITIENLNIKGMMKNRRLSNSFHQVGLGYIIEWLKWKCYQYGIELRQVDRFYPSSQICNQCGNKQKMPLNKRLYECKNCGMIEDRDINASTNLKQAKEYTVLV

SEQ ID NO: 32575 - protein, 334 aa, Cyanobacteria sp.
MFGKHLNGAKLQKHIAKLRKRNPQWQTLGSQSVQDICQRIEKSYQLFFKHNKKGVRPPNFKKVKKYKSFTLKQAGYKFLSGNRIKIGKRVYQFWNSQPIEGKVKTVTVKRTPLGELFLTVVVDTPSPQEIKSETGQIAGFDFGLKSFLTCSEGFEIQSPLFLKRSLKKIRKANKQLSRKEKGSRGRERTRKHLARCHEKVANQRRDWFWKLAHQLTDQFDTLYFETLNLKGMMRIWGRKVSDLALREFLDILEWVALKKGKQVVYRDQWFPSSKTCSHCGYVLEPLELKVREWDCPSCYTRHDRDLNAAKNLKTGGIPSVGVGSVRQACPATSV

SEQ ID NO: 32576 - protein, 373 aa, Cyanobacteria sp.
VKGFKTKLKLNNQQRTLMAKHAGVARHAWNWGLATCKEIYESGGKRPTAVNLHKKLVAEVKSVNHWYYEVSKCAPQQALRNLDQAFKRVWKVKGTGFPKFKKKNIRDSFYLEGSLTISGDWIKLPRIGWVRSHEQLPPVKPKNVVISKRAGDWYISFKIECEPQPHPKSKTSIGVDVGINTLATMSDGTTHPNPKAYRRAKKKLAKLQKELCRRQKGGKNREKTKLKLAKAHKRIADVRADHLHKLTTHLAKNHGEVKIENLNVSGMLKNHKLAGAIAEGGFYEFRRQLEYKCQWYGSKLTLIDQWYPSSQICSNCGHRQKMPLNQRTYDCPNCGLSIDRDLNAAINLELRPELPSRKHQEAELSADSSAVQA

SEQ ID NO: 32577 - protein, 393 aa, unknown
  TnpB Polypeptide
MIASMRVRWRSVNTVCRNFVTKTKWTCIAKTQCLPVRIPSRSAIDQRDIVWFVQLRYQFRVYPTPGQQIALAKAFGCARVVFNDGLRLRHTAHEQGLPYVSDAELSKRVITRAKATPERAWLGEVSAVVLQQALADLNAAYRTFFASITGRRKGAKVAPPRFRSRKDNRQAIRFTRNSRFTVLDNGRLRLPKIGDFTVRWSRMLPSDPSSVTVIRDAAGRYFASFVVRTSDDEPLPPTDAEVGIDLGLTHFAVMSDGTKVAAPRFLRRAARKLKRLQQALSRKQRGSNRRGKAVVKVARAHARVADTRRDWQHKLSTTIIRENQAVYVEDLCVVGLGRTRLARSVHDAGWSSFVGMLEYKAARVRHEALSNRTEVRDHRRVAVAAAAWKLGAV

SEQ ID NO: 32578 - protein, 393 aa, unknown
  TnpB Polypeptide
MKQKKAYKYRFYPGDEQTRILAQTFGCCRYVYNWALRQRTDVYYQYGERLSYEGTAQRLVTLKKQAETVWLNEVSSVPLQQALRHLEKAFRNFFEGRADYPTFKKKRHQQSATYASNAFTWDGHTLTLAKMDAPLSTIWHRPLPDGCKPSSVTVTKDEANRYFVSILVEEDIKPLEVTPKTVGLDLGLKSMVITSNGHTYGNPKFFAKDEKNLAQAQRRHAKKKKGSTNRNKARLKVARVHKKIADRRRNYQHQLSTRLIRENQVVCVESLHVKNMVKNHCLAKAISDVGWSEFVRQLEYKASWYGRTLVKIDTWYPSSKRCFDCGHILDSLALAVRSWSCPECGVVHDRDINAAKNILAVGLTVAACGEAVRPGAVKTKSGKPQRSRKASQR

SEQ ID NO: 32579 - protein, 406 aa, unknown
  TnpB Polypeptide
MLGGDILERIERHVINKNHPMYTACDLLCFQSKNMYNLCNYTIRQVFIKDGVVKKYGDLNKELKHTNAFKELGSNSAQMVTKILCKNWKSFLVAVKDYTKNPDKYFAKPKIPKYLKKDGRFVCTLTNWQTQIHDGYLYFAFKRLKPFNNMFRTKVTGYHLSTRIVPKGGSYILEIVYKTKPQQMNLDKNRIASIDLGVNNFVTMANNIGEKPIVINGKGIKSYNQYWNKEIAKYRSIAKTANNLDWTKRLQKLTDKRNFKMDYFMHCASKWIINYCIEHNVGTIVVGKNNKWKQECDMGKFINQRFVQIPYEMFISKLRYKCEDFSIQFIENEESYTSGTSCLDNELPVKENYNKDRRIHIGLFVSNKGTKINADVNAAYQIMKKVFSNITNEIVGEHLHPVIINL

SEQ ID NO: 32580 - protein, 472 aa, unknown
  TnpB Polypeptide
MAEKVTRSLHSQGLNRDKYDRLARIAILCGKVRTDAWRQCSGVSTAPQSPYDIRDAWMAEGYAWHGLPARLGKAALADTLGDIAAAREAAKVPVKRAVRHRTRGDKAERQRLYSLLKGNRWTEDPFLHRQMRKQWRGGRSHATNQIVADAGSYTTKVWHGRAWIHLQSLERGQRIAIPLKGTHLPSGTLRILLQANGQVEVHHAVDETQVCSTRPCGEATVGVDKGYTEAYTDSDAERHGEGLGDLLSAESDQRKVKGTRRNQLRAVEQKHRAKGHTRKADNIRQHNLGHQKWNRRRTLHHKQVRDHLCQAAHAVVDKAGTIACEDLSAPMKSAKYRHKDTTRRLNGWVKGVMADTLTSISRRRGSALALVNPAYTSQIDSRTGLLQGIRRWDRFYCCDGVVLDADTNAACNILARLYDEEIALYMPYRDVRALLAERTRQSVGTAPPGLELRGLATPSPSTESELPRTHKV

SEQ ID NO: 32581 - protein, 279 aa, unknown
  TnpB Polypeptide
IGIDTNASPLHLALAEISRDGNLISYERRELHNFLLYEKNRKEYEEWILAHEIVNTAIEKQKAIAIENLNKVNKGYRGDGKAKLRKRLSKWNYKSLLSKIESVDIQKGVEIIKVNPAYTSVIGVLKYAPILNIDKDIAGAYVIARRAMGFKERIPVNYRKLLEDKEYINYAIEKLNNKIQKLKESIKQEKNKYKQKPLKQELRKIIGDIKSIQSFQSESSFCKGANGRNPKQNHVTWQVLRVALVIPILGKPFNREYSSLKTILVSGNVERVASRLVPH

SEQ ID NO: 32582 - protein, 382 aa, unknown
  TnpB Polypeptide
MKRKGYKYRIYPNNAQKELINKTFGSTRKINNLLLNEKEAIYELFKDYPELLKSHKYLTPAYYKTVYPYLKEVDSQALTSAWLNLQNAFKNFFTGSNKYPRYKSKKNFRKTYTTHTINNNIRWEGNGIKMSKLGIVKLRKHRELPENSIIKAAIISKSATNKYYVSLRIEYEEEIININNDFKKALGLDFSLNGFYVDTEGKKANYPMYYMNSLKKLAKEQRKLSRKVRGSKNYYKQKLKVAIVHEKISFQRNDFLHKLSRKLANSYDIISIETLDLIEMMKNKYFSKKISDISYNKFVSYLSYKCEDEGKILHKVDKYYASSKICSLCGLKKKTLPLSQRTYSCECGNVINRDHNAAINIATQGMISYLSSITEDGTASIA

SEQ ID NO: 32583 - protein, 195 aa, Okeania sp.
MVEKAYKFRFYPTPEQENLLRRTLGCVRLIYNKALAARTLVWREQKQRVSYKQTSAMLTNWKKHEDLDFLKEVSSVPLQQGLRHLQTAFTNFFSGHTKYPNFKKKRNGGSAEFTKSAFKWKNGQLYLAKCPEPLPIRWSRQLPQNCVPSTITVKLDPSGRWSVSLRVNDTRNLSLKSVTKQIGIDARNYQFSNYQ

SEQ ID NO: 32584 - protein, 382 aa, unknown
  TnpB Polypeptide
  misc_feature (343)..(353): Xaa can be any naturally occurring amino acid
MRVFNNEPAFVNQAYLNVMKTIFRSYKFRIYPTKTQQELLSHHFGCVRFVYNHFLDLRNKNYKELNQKTTYFDCATKLTNMKKEDEFSWLKNVNSQSLQQSIRHLDVAFVSFFQKRTKFPRFKKKTDKQSFVVPQFFTLDSSLNKLYIPKFKEGIKINIHEKVKGKLKHVTVSKTSSGKYFASFSCEQEYQQYVPTGSSIGIDVGIKDLAVLSDGTKYRNVKALKRNLKKLKFKQRQVSKKIKGSSSRKKAIKQLALVHEKIMNVRRDNLHKVTTEIIKNHDVVCVESLAVIKMMKDHVLAQALSDSAFGEFFSMLEYKAEWNDKKIIKIDRWYPSSKNCSVXXXXXXXXXXXFCLVLEWSRTLNKNRWSRRRNICYESRKG

SEQ ID NO: 32585 - protein, 213 aa, unknown
  TnpB Polypeptide
LLYSCEEPVNEIRKAESAIGLDFSMKELYVDSNGNRAAYPHFFSKAQKKLAREQRKLSHCELGSNRYKKQKKKVARIHTHIAHQRKDFLHKESRKIANSYDIVCMEDLNMKEISQDMCFGKSVHDNSRGMFTDFLAYKMERAGKKRVRIDRWYPSSKTCSCCGNIKEDLQLSDRIYECACGNRMDRDQNAAINICREGIRISGMMPDIEKKIS

SEQ ID NO: 32586 - protein, 364 aa, unknown
  TnpB Polypeptide
MANKAYKFRLYPTKEQEIMFAKTFGCVRFIYNKMLADKIKFYNETKQRLNNTPAQYKEDFEWLKEVDSLALANAQMNLQTAYSNFFRTPKVGFPKFKSKKRDKNSYTTNNDKGGKLRIENGRIRLPKIGLVKIRQHRLISNSQKIKSATITKTPSGKYYVSILVEYEQYIPNVRLDKNKALGLDYASHSFYVDSQGREANYPKFYRNVQSVLAKEQRKLSHMKYGSNNYQKQKIRVARVQERIANQRKDWIHKLSTQLANEYDYICVEDINMQNIAQSLNLGKSTNDNGFGMFRTILAYKLVDRGKKFIKIDKWFPSSKMCRFCRAINKELTLTDRVWTCECGKTLNRDENAAINIMNVGLSMV

SEQ ID NO: 32587 - protein, 837 aa, unknown
  TnpB Polypeptide
MSNINKAIEFVEVEESRTARCPAMCASKFDAIRLVNCAKGANRAIISICDRIKECLFDKVFVITNNGVRAMSIFDIYNIGMPDEYLNTDGKITIRYENKEYTLNKSAAIGARTNTRPTRELYNEQSPVLGQRSVAMRIIKELFTQENGSLVEIQSTFWNESVCVEIDKMMKGYAQRVSLLSKKGNGHSDSKWADSIRTAIKKTNYGVLEAGIIARVLLNVGPQPNKAINDEFPDLCKVFGKDNNRIFKTKIEGDEVSISYDSFSRLIHQATEVYRNAFKEFKRLVCEHIPKPQGNRPLTVPKIVVERESNIDSTFFDWKVTLRGIPGGSVNMYIRSHSDKGTSYYPENLFALTKEEPKGTLVFNDTVEVENMICDDLHHPGKISMMLNIPYTIKCRKPLLNKDKTKYIDLSRTIGVDAGVAVAGLVTTVSGATIGRDMMDWHEAIHAYKSECPGAKLFVNTMSKTTRDDLQRLSTEYETGQYNFIAMLTIALRDGAPADKQHNWVPSCDPCAPMFAWLRHRKNADGTPFYSDRQKLVIGHTKCWRKFIRQLIANRRHYFAEQAEWDRTHEPLNEVFAKCSTLAHFLNKEYDRLNNKIMVTGTDVLSNELLNSEVARNVSIIAMENLNLNDIEKTTKFRTLYTTVSRDWHMGASEGCRVTSSRNSNTAVIDFGRIVTRDEVMTLCKETPHWHIPCGIKIDGPIVTLTCEPTDEGIRCRDSEWADHYLKNAMHLALVKHDVERIGTRKGILYKEVSATKTSQTCHACGYGKCAKKELKLSIEQCLAKKLNYRDGRKFVCGNPNCNMHGKMQNADVNAAFCIRNRVKFKDSEFAKSLSDK

SEQ ID NO: 32588 - protein, 366 aa, unknown
  TnpB Polypeptide
MAAVKVCQAYRFALEPTPAQERALRSHAGAARFAWNWGLAACKEHYETERRWYSATDLHKLWNAAKKVDPALAWWGENSKCVYQECFRNLDRALKDFIRSKKGERRGKRLGFPKFKKRGKCRDSFRFSTGVLRCAGSTITLPRLGMIRTHESTRKLARRLEAGTARVLSATVSRTAQRWYVSFIVEIERKIPQRHARPGSAIGIDLGIKTLLVGADNVGDVVSIPGPKPLRVELRRLRRASRTHSRRKPGGANRRKSAARLARIHARVANVRADALHKVTTGLAAQYETIVAEDLFVAGMTRQRRLACSISDQGFGIALRMLAYKAERRGGQLAALNQEPGTASVGQTGTATRQLVAAGKALAHAR

SEQ ID NO: 32589 - protein, 359 aa, unknown
  TnpB Polypeptide
MLTIKYRIYPTRKQQDLLWKQSNLLIRLYNQFLEQKINAYKEKGINIKRFELQAQLPKIKKDNPEYKEIHSQVLQQVPKRLTETYNAFFNRGYGFPKFRSSRFFFGLVYPQNTGCRIVGKKLVFGKEKIKMIQHRPIPEKIKTRTITRTTDNKWFLCLSYENQSVSQTNKDKVLGIDLGLKNIVYCSDGHSIKNKNHTKYFDREIAKIQSEQSKCKKYSRQYKKHQIVINRLYGQKVRKTRDFLHKVSHTLVHKDFDIIGLEKLEPKRMTEQSNWRKLNKSMRNSQLALLVNYIKYKAENEGKQVVFVNPKHTSKKCSICGKKNDMELWNREMNCECGNRMDRDYNASINIMNLARASL

SEQ ID NO: 32590 - protein, 446 aa, unknown
  TnpB Polypeptide
VQSSKLTQTLSFGLNIHTGSGDDLQTGCLEARRIRNETNRLDRDGWDWDDIKSTVVDNADHVNNTSQLVVDKALGELETYHDNKDDGWGRPYPYIDESYPIVMNHGEGYRLFPENDGTVRFRITATRGTHVKGELCGSPDHFDRLQTAFNDEEWRVGTAEVVHKHDEWRLHVTVTHETHRVASKHDADTIVGVDVNEDCVALAAMSRSGAVKDSVVFEYPSVKEQRHEFFTKRKRMQKANQTAFETVVKTEERDYVHDCLHKVSREVVEWISQFNDPVIVFEDLKDMRESIDYGTRMNRRLHSLPFAALQEMVSYKAAWKGIPSDDVDPEYTSQRCPRTECQHTERANRHKKRFKCQRCGFQDHADRKAAVCVVQEWLDEQYGNVPSLETLPRVWKVRRAASGGGGAADSHGAVFASGVHRHGTSAQDSQSRVREELKSVASAVQD

SEQ ID NO: 32591 - protein, 199 aa, unknown
  TnpB Polypeptide
MVCLYSCTRRSRTQRVRQSNCVRSWSQNILDRLRRRIISRVWRGRHWRIRNLVDECHKQVANYLTSQYKVIFLPTFETSQMIVKSKRKLRSKTARQMLTWSHHRFKLTVKQAANKRGVVVIDVNESYTSKTCTKCGHQHSKLGGSKIFKCPSCGHEHDRDWGGARNIMIRALRDGSFALNLSVEGIAIASDVFVHRCTA

SEQ ID NO: 32592 - protein, 307 aa, Methanofollis sp.
MRKAYRYRLYPTKSQVTLLEQTLEICQWVYNDTLALRKNAWEQDQHSISLYETNTILTQWKKERSELSTVCSQVLQNVQMRVDLAFKAFFQRAKAGEKEPGFPRFKGKGRYDSFTYKQSGFKLTEDRLHLSKIGDVKVVLHRPIEGTIKTLAIRRSSTGKWYACFSVEYDPSPLPQKETAVGIDVGLKSFATLSNGEKIENPRFFRTDEKTLAKAQRRLSKAEKGTPERKKARMIIAHVHERIANRRLNFAHQTSRKVVDRFGTIVFEDLNIIKMEKTIIWQKALQMLPGICSSRSQRAKRKRLAHA

SEQ ID NO: 32593 - protein, 405 aa, Methanofollis sp.
MKEIALHPYRNDGGRGVKPPGTDARTGFFRTTYRSFHQQDRGEDQFWDDLYNNSLEQKIRAYEQEGRKLSCFDLNNRLPALKEEHPWLKDVNSQSLQSANKNLDNAFTRFFREKKGFPRFKSKKNPVQSFQVPQSYSVDFDQRWIKLPKISKIRTIFHRIFTGKMKYATVSVTSTGKWFVNILVDDGKPEPEPAPFSLDTTLGIDVGLKDFATLSTGEKVENPRYLKTSLQRLKVLQRRVSRKVKGSKNREKAIQRLARCHEKIANQRNDFLHKISNRIVSENQAIAVESLNIDGMMKNHHLAQGIGDVSWYAFFTMLEYTCRTYGKTLLKIGRFDPSSKICSKCGYLKQDLALSDREWVCPDCGTHHDRDINAAINIKKFALQEQNLVGVSGAERTVEPVDSPQ

SEQ ID NO: 32594 - protein, 367 aa, Methanofollis sp.
MHVIRTITFKLLLPDGGSSALLDTMRAYSAAFSASAQWGFENHTWNKVENHKATYKVVREAVPDLPSSLVQGARDCACEALKAVKCKTIPERKPLAAMRYNQRVITVNPVHGLATIASVRGRIKATVPISGYHRNYLSWTVTSSTLSYDRRKKVFYLHISMEHPDVEPVQEVKVLGIDRGIVNVAVCSDNTFFNSRQVKCVRSKYAHLRQELQSGGTRSAQRKLRRMAGRERRFVTDVNHCISKQIVNSEYTVFALEDLSKIRVQKRRGREFKRKLNTWSFYELEQFLRYKAEALGKQVVLVDARYTSQKCSVCGHTYKGNREGSSFRCRKCGFQLHADLNAARNIAQAGISCLSRLSVNQPNGAHS

SEQ ID NO: 32595 - protein, 256 aa, Methanofollis sp.
MHRPYTGKVKGVLITRSGDRWYVIVPAEQDASGSKREGRSVGIDVGLNSFAVDSDSAVIENPRFYGRSLNTIKKIQRSIVRKKRFSQNWKKAKSRLEKVYDHITNQKKDFLHKLSRQYVDTHATICVEDLDIKGLKEKGNSTGLHRSIHDASWGRFYSYLAYKAESAGTELVKVDPRNTSQMCSNCGSIVKKTLSERVHECPYCGFVADRDYNAAVNIHRVGMEQPFEPVETIPLHRISVMQVLSMKQEATPFRAW

SEQ ID NO: 32596 - protein, 390 aa, Methanofollis sp.
VQHCTREWDHSEDAENAGADRHVERRESCTERGIFQSAPDGELYPLEQHCHTVTYTEERTEDRQTPVQEHIPVPDTQLQQSGFKIDREHSTITFSKIGTIPFNMHRSYTGKVKGVLITRSGDRWYVIIQAEQEASGSKREGRSVGIDVGLNSFAVDSDGAVIENPRFYEHSLDRIKKLQQSIARKKRFSQNWKKAKSRLEEIYDHITNQKKDFLHKLSRGYVDTYATICVEDLNIKDLKEKGNPTGLHRSIHDASWGRFYSYLAYKAESAGTKLIKVNPRNTSQMCSNCGIIVKKTLSERVHECPYCGFVADRDYNAAVNIHRLGMEQPFEPVEMQSISQPGKSSISRAVVTIPLHHISVMQVLSMKQEATPKQVRGSSQGIGIPDRKTR

SEQ ID NO: 32597 - protein, 209 aa, unknown
  TnpB Polypeptide
MDIAANGMFRMELPRPAGIDIGVSNVAVLSDGTVYENNHEYSKAIDEFRKAGERLSGTLTNTEQYRKTKSRLNHRYRRIVNRRKDYVEKTSLDIVKNHTTIVMEDLSIKGLRSISKSPNMTISYNDGSLGMLRKRISDKAMEAGRELILVDPRNTSQMCSRCHNMVHKELSDRVHICPVCGLTMDRDLNASVNILRLGLTRNPSLATTG

SEQ ID NO: 32598 - protein, 418 aa, unknown
  TnpB Polypeptide
MKVRKAYKTELKPNGRQRELLENHAGAARFAYNWGLARKVSSYDLTGKSLSAIDLHRELNALKKTRYPWLYEVSKCAPQEAPRDLDRAYANFFRRAELKKRGKFKGKVGFPRFKSRKRGLGSFKLTGSIHVEESRLKLPRLGWIRLKEKGYLPAEGKTVHILSATVSERAGRWFASLQVEEETPEPVTASGPPVGIDLGVKTLATCSNNMEAHVHYDNPRALYAGARQLSRLQRKLCRQEKGSNRREATRGKIARAHYRMSRVRSDAIHKATSEIAAKAKPPSMRPAVVAIEDLNVSGMVKNRRLARSVVDASMREFRRQLSYKCAWYGIELVVVQRFETTSKPCSRCGWVREDLKLSDRVFRCGACGHVADRDDNASDNILSLAVSSTERINGCGGDVRPLDSERRTPMKRQSERVA

SEQ ID NO: 32599 - protein, 590 aa, unknown
  TnpB Polypeptide
MSNHLSLPIRLPDENTDRFERLASLTQRVANHVLEDHWTPVHLDGIADSSHQAWKYFDEHESFEEFDLYLPSRFRRCILQKVGETLRSHADRRLAFQSIQNVLPDHKIRRIHRRRIKDQLWDDGDYLSSGYVDILINQLNSYYDHHGTYPDTYFEMQDCPAYDNGTLPFSADDGPTSGQAVNYQYDSDSETLTVRIKIPDTRSPETRGDWSWTEYERNGYKAFHDLLAHGDLSVPEFQPSRRKNGDAYYELSFPVEVEHTEVTDGTDRALALDAGMRKDMTAVVVTEDGEQLSTPHYIRFTDRDGMRRLHRERTQLNDHLSALRRDGHAHTDEFRHIHSEYERVNNKIRHKREQLTHDVANQILALALAYDVNTIVHEDLRSLSPPRGEGTLSWELSSWARRDIIENIEYRAECAGLAVERVYPQKTSRSCPRCGATGHTCKSPDHYTEVWWGGHFRCDNARCGFEGDRDYIGALNVARVFFSDGDGLHHGSTSSYTGDCEIVLASRSTGERSDASRSTSELASDAGTRLTFGTGIIAYEPEQAEATAGGGSAVIAPAVAVPESNADGSDGCGPAVQQYTRFLRCTTENY

SEQ ID NO: 32600 - protein, 384 aa, unknown
  TnpB Polypeptide
MYTTTYKLFRAPRLGNLRRKTWIAHTIWNYFLGWQRTRYSLGLPYLSYKEMSREFTILRKSHPEIFAHWRELDSWAARQILKRLDEGYERFYKKIAKRPPKFRSFRKPYSFTMCPSGYKFAAPVAGAKGFGIYSDRVAIMGKTYRFNLSRPIFGNIKTVTLKEDTLGDFYMSVVTDHIQSHLKPMTGNAAGFDMGIKTMLTCSNGKEYKSPHFYTESIDNVRTATRNFSSKQRGSNNRERARQHHARMHRKVKRQREDHHWKLALELVRRFDVLFFETLNLDGMKRLWGRKVSDIGFYAFLQKVKWQAKKRGKRVAFIDQWQPTTSVCHICDMRVSLELSDRTWTCEHCNTHHDRDLNAAINILTVGASTFGVENIRLAIVSCS

SEQ ID NO: 32601 - protein, 432 aa, Cyanobacteria sp.
VYGCQQVLIKADSETLAVLEYLSSEANKLTNCGLYYARQMLFKTGHYVSKAELDKKLKTNIHFKAMRSCCSQEALHSVYESFKSYRELKKKWDKGKLANKPKLPKYRKKGGMDVVTYPARWVKQIDNNIKFSLGKQVQVWFGIDSFELKIPSNLNFSNVKEIRILPRNGCFYAEYVYKCSNKKAKADTDNALGIDSGLNNWLTCVSTIGKSFIVDGRKVKSQNQWYNKCVANLKEGKPHAYWDWELANLAEKRNRQMRDAVNKSARFVINWCLANNVGTVVFGWNQRNKDGAKLGKKTNQEFVQIPTAKLKNRIAQLCEQYGLRFIETEESYTSKASFLDNDFLPTYGEKPERWKSSGKRIKRGEYDTNKKENINADCNGASNILKKVSTQLDLNLTKVSRAVLTLPQRYRLDDLSKSDRNRCEDACVQTAS

SEQ ID NO: 32602 - protein, 384 aa, Allochromatium sp.
MLIAHKIELRPTSEQAVYLNQACGARRHCYNQLLNHFNQPGVKWSKAAAYQHYMTVLRIQFPWYADVSSRVTRNAIDDLDAAFKHFFRRVKAKAKKPGYPQFKKKDVNDSFALREPTKFAVTGRQLRIERLKTRIAMRQPLRFTGQTKQATISKQAGRFYVSILVETEDYNPHAPDQPSVGVDFGIKHLATLSTGEFIPANQQLKKHLKRLKRRQRNLSRKQQGSRRRAKAKLRVARLHQRIKNQRQAVLHELSDKLTRTYQVIMLEDLNITGMVKNCRLARAIADAGLGELRRQIEYKAHWRGVTVIIADRWFPSSKTCHACGQLHDMPLSQRTLVCDCGHVMDRDLNAAKNLDQYGRDALRRDLKRTEEPGKTGSPALALTT

SEQ ID NO: 32603 - protein, 484 aa, unknown
  TnpB Polypeptide
MLVTQAYRFALDPTATQARALASHCGGRRFAYNWGLALVKERLELRERVRRAALAEQLADGEVQALARTVAVPWTLPALRREWNRAKAQAAPWWAQNSKEPYSAGLADLAKGLDAFWKSKRGERKGPRVGFPRFKGRRRRRESFRYTTGRLGVSGRCRVQLPRVGHVRTHERTVKLLRRVEDGRARVLSASVCRENGRWYCSLCCEVSREDRPAVQSESVIGVDVGIKHLAVLSTGELVENPRALSQAQRRLRRYQRKLDRQRRTGNPGCYDQRGRAIEGRRPVKRSRRQAKTERRITRLHARAGYVRRDALHKLTTALASEHRTIVVEKLNAKGLCRSGNRGLRRALHDASLAEIRRQLAYKALWRGGELIEAPTLFPSSKTCSRCRAVKAKLPLSERTYRCERCGLVLDRDLNAAINLAALPETVVPSGGETINARSRPPSGGRTENPCKTRPSRRAVGRPRSPQRRPARQTGTASEQSEAA

SEQ ID NO: 32604 - protein, 372 aa, unknown
  TnpB Polypeptide
LTYRYRLLPLKSQHRALMGLLHAQRELYNAALEERIDCYRKTGKTRTYIDQCKALTACRHELPDMGEMPANLQRWTLKRLDEAFQGFFRRLKARGGKAGFPRFRGKGRWEAFGFNEFSGIRFDGKRLRFAGMPGGLKVHLHRELPEGADIRSCVFRHDESRWFVCLQIAVPTPEKRAIGSVIGVDLGLEVFAYCSDDVPIPNPRFARRAEKKLRRRQRALSRCKIGSRRRYKVRAQVARLHRKITNTRNSWLHKESAGLVRRADLIVVEDLKVANMIRNPTLARSIADASWSRFVSMLDYKAEKAGGHLIRVDPRNTSQECSCCHELVPKSLAVRTHQCPACGLVIHRDYNGSLNIRRAGIGARALNVIGLR

SEQ ID NO: 32605 - protein, 519 aa, unknown
  TnpB Polypeptide
MSNGKSKSDSFILELPLKVNLSQEKILLVRLDCARQLYNAVLSEALRRISLMRESKAYQKARVMPKILASPKLLKNKKVKVKEANNPERAQAFKDLNKKFEFNEYALHAFAAITKNSCHIGDHLDINTCQKIATRVWSAVQQFAFGKRGKPRFKGWNQLDSVEGKNNTSGIKWRESQVVWSGLKLPALFDPKDKHAVQAHGLSCPTKYVRIVRRKLAGKNRFYVQLVQEGRPKVKYEARMAVVGLDLGPSTIAAISTEDAFLEAFCAQLEPIQKEVRRLQRRLDRSRRAFNPEAFSPNGTIKKGARLKKSNAYRRDQVILEDTSRRLAAYRKALQGQMVNRVLAMGKFINLEKLSYRAWQRMFGKSVGFRAPGMFVSILRRKAESAGGVVNEFPVRNRLSQICHQCGTVEKKTLSKRWHHCDCGINVQRDLYSAFLAMNVVGDDLDMCQAKSAWPDAEPLLYRAVSRCDQTMIGEARLASFGLNRSRNGSHGEGRSALDKAKDVVTCPRASESLGESYA

SEQ ID NO: 32606 - protein, 327 aa, unknown
  TnpB Polypeptide
MRSRSTSRNSRRRTTQANFTMPTRPFHERRATTRPQARERYRVVRQNPAPRGLPPLDASTTESRTTGLVGSVERGRRHDGRESAIRAGRNVVSSRHRNPRRRGAVPRCPTKNGHPSVSILGKRRSSRCVTVTTTVARPLPNYGPTKGRPFVGSARPTFTATRRLQTRGSERIAESFGDDLWNQIDDVFHRVTREVVDYAESVKNPVLVLEDLTYIRESMDYGEYMNRRLHGWGFAKLHAQIRYKAVEKGIPVKTVNPRNTSKECHACGEVGYRPQQATFKCTNDACWMGEYQADVNGAVNIADRYLSGESRFREHENDDDSAEDGGV

SEQ ID NO: 32607 - protein, 395 aa, Ignavibacteriales sp.
VKTIYRSYKFKISPTKKQELLLAKHFGVSRFVYNYFLNERKNEYLLNKKSMSYCDCSNQLTKLKKEPQYSWMKEVSAQSLQSSLRNLDAAYNIFFRKQASFPRFKSKGDRQSFTVPQYVKVKNCKLVILKFNEGIKISGYKELAGKILSATISKSVSGKYYASISCEVSYEPYSKTGLTVGIDTGIKTLATLSSGKTYENVRSLKTKLKKLKFNQRQLSKKIKGSNSRQKQKEKLARIHEKITNVRKDHLHKVSTEIIKNHDVICVEDLSVKSMMKNHILAQALNDVALGSFYSMLEYKAEWNDRRLVKIDRFFPSSKMCSGCYFIKQDLTLNDRTWVCSQCGIKHNRDLNASINILNQGKKILESCGSGIESQDKQKQVEALLSNKSMKPDIKL

SEQ ID NO: 32608 - protein, 455 aa, unknown
  TnpB Polypeptide
MGKVRTSLSLFRFDVINGNKEKVIEDLMEMIHQIQDAESSFIASPEYQDLAENILSGQVKVSGKKNYCGRGVVPNVVFPCNSYNMNEMLRSSIMSRAETYAVSYGLFAVLAGNPTEIDVRQVKKLFRGRYPNSRIPRYYEISSHIYRFYNKNQQAARLPGSPAKIDLSACDGHYLSVSYTNREIILKFRNLPTAGKQVKIRFAIPEGDRFKGDKISKPIVQIVNNKLVFKFTIEYMVPNITPNKIIGVDLGKVEPFVATIINESLLWHSAPFFASNRIKGLGRKYDDLMSRATHLRNKESRCRASNHSDKADVLARHQRGIRDKARRVKNEAVHQIGLEIAKTAYSMNAEVVMENLSWLGSKGGRWNFREIQDAITNSCARKGVPVSFVSARDTSNTCTRCGSSVRHAGRDNVCTSCGFRLNRDVAASREIALRGTDIRLRELLRQRRLGVPVPH

SEQ ID NO: 32609 - protein, 490 aa, unknown
  TnpB Polypeptide
MVNMVVKAFKFRVYPNSVQKRFFDESIQACWWFYRYVLHHYEDDYKTAKKNFERDILSHYTSGNYQVDWEDVDPRLHFARFHFKKRKVVRRDYYNKNKEVRSEILKITIPNECYFLGSPLRHQGVGKTSTYKLLQKVRSNTPTFSRYNLPNRLSMVNSQVNLSIIPATVMQEVLERVAHAFNKFWKEGGGYPNYPKERDYSSITWTGASSIELFKKESLLKLSKLPGLLEISYHRPIQGTIKRANISRDILGQYYVSLMCDFEEIQEKCGVGVIGIDMNIKQIDKDSRSFIALSDGRKIDIPRWATQFEDELAKKQRAVSKCVLKSEDWVRQDRKVKHLHEKIQNKKNDWLHHITFDLSQKYEYVVIEDMDLTKFHKKRTNPEEIDNMQLAGERGQRKGWTEASHGEFKRQLAYKFGDRLIKINPAYTSKTCNSCGLINNELTLGDRVWKCPCGAEHDRDINAAINIRNAGLLIKNQQEKMGEKSVAECC

SEQ ID NO: 32610 - protein, 374 aa, unknown
  TnpB Polypeptide
MLGTLTYAVRVEASPDQSRVLSDTCAAYLDCCNMVSKTAWEHKTLSQKTLHHLVYRRLRDEYHVGAQMAQSSIIRVIGNYRTIKEMHGSPWATSQPEYHSPGYDLVWNRDYSILKDGRLSINTLDGRIKLPVDWSHVPEEYRHGKFGTARLLNRGGKWLLLIPSTVELPEPSQPQQVVGVDMGVRFLATTYDSDGRTIFYDGKEVKRKREHYKKLRASLQKKGTRSARRRLRKIGRRENRWMRDVNHQVSKALVNRQSKPTLFALENLSGVRNATEKVRKRDRYVQVSWAFYQLRQMIEYKAAQAGHSVIAVDPRYTSQTCPTCGIVRKANRRKKTHEYQCSNCGYRSNDDRVAAMNIQRLGYQSIVETQSDKL

SEQ ID NO: 32611 - protein, 394 aa, unknown
  TnpB Polypeptide
VFFLIKAIWSDFIMNVIRSYKFRLYPNKLQENEMQAHIFLSKNLWNDGLEFAKQLYADYQRFPSRQAYQEISKNSGLHSQVAQNVFIRLALAIRAKIRRKNAGLKGGFPRFKSIDRLKSLHYPQLGFSPREKKLKVSPFGEINIKKHREVEGTIKTLTLKREASGKWFAVLTVKTEATPLQKNDGNPVGIDLGLINFAVLSDGTTIKNPRHLRKYEERLKKNQQDLSFKKKVSRNRKKAKKRLAVLHEKVRNTRKDFLHKLSRQLVHSHSLLALEDLASQEMAERNYGKSINDAGWSEFIGMLSCKAESAGSRVILVNPKNTSKECNDCGTLVSKTLWERHHDCPSCGLSMDRDLNAAINILNRATAGIAGSNACEDEALVSSMKQEAHGFSRG

SEQ ID NO: 32612 - protein, 410 aa, Streptosporangium sp.
MLSGRRYRIEFTPAQAEFAEQIGGICRSVWNTGLEQRREYRRRGAFIGYAEQCRQLADAKRDFGWLSDAPSHVLQQTLKDLDQAVTTHGAWKIRWRSHRRWSPSFRFPDAKQIVVQQIGRRWGRVKLPKLGWVRFRWSRPLGGVVRSATITRDGRNWFVSFLVEDGKSTPEAHPGPAVGIDRGVVVAATTSDGTFHDRPFITGGERQRYRRLQHQLARTRKGSNRRKRVVAKLGALMRRVRSRRADFNAQLAATVTVRYGTVVLEDLTTRNMTATAKGTIERPGSRVTQKSGLNRAILDKGWYGLELAVNNAARHTGSKVIKVPAAYTSQTCSACRVVDAASRESQARFACTSCGHVEHADVNAAKNIKAAGQAVSGRGDLAIRRSVKRQPPRPRARQHAAPAARGIPVL

SEQ ID NO: 32613 - protein, 453 aa, Sediminibacterium sp.
MLKAVKYRLYPNKEQEALFLRYFAACRYVYNIALEVKIYAYRAHGVTVSEYDLVKQLQEAKKENEWLKEFAAQTLNYEMTCLDLAYKAFFKTKKGFPKFKSRYDKQSCTFLQNSFVPDDQHIDLPKVGLVKGSIHRRLEGVVKRITVSRSASGKFYASAIVEMEESKHQLPGTGKAVGVDMGVRNLVTIHDSVSQDKVDLAGIIKSGKSEGMKRRLEHIQALIRRVQRHLSRKTEHRKRDKKERSKRQEKCRIRLARLKEKESFIRANLLHEISCGLTNQYDTICIEDLAVKNMSRTAKGTVEEPGKNVKAKQGLNRVIVNSGLAMLRTQIEYKAAQKGRKVVVVSRWEPSSKNCSHCGVKNTTLGSKTKWTCNNCGESHDRDGNAAKNILAAGMAASDVLTEYTRGAERKTRNKKSGGRVSKEASTPENYPTNKERKSRTKRIVAPQGVTDG

SEQ ID NO: 32614 - protein, 450 aa, unknown
  TnpB Polypeptide
MQQLYTYETELKPKYNQEIIDYFNDYTILFNKIVRNIWQYYNHQNVLVSQKSKLNTLIQKQFGISKRTANSIILYVSGKYNSLKGTKKYELKRNSSKIEKLDDLISELALKLDVMAMKAHHNQLKEKELIKYRGLKKKFVAIKKAKDRLLKENIKVQKQLDDQHFSLCFGSKSLFNHQYLEVDHQNWYNKFKTARDSSILFVGSKEETCCNQQLQLFYNKKNNQFTVQLRKEYAYQANDRDKYLYGQVYFSYGNKELQKVLKTKNSPITYNIIRRDDRYFLQTTITIEKNDISKQDRYIGIDFNKGFIALSEVKEDGNLINTDKIYYRFKQGNKTTNDLRQLAHDITIRCKENNMSLAIENLDFSKKKSKTSKYKKDEKYNETLHSLAYSKFDEYISRACFSNGVWLSRVNPAYTSYIGKKKYNEIKKLNTHTSASYVIARRGMRFKDAA

SEQ ID NO: 32615 - protein, 411 aa, unknown
  TnpB Polypeptide
MIKKAFDIRLYPNKEQRTFFNRTFGCCRFVYNHCLWMKSCIYEETYMNFNPNLRSFKEEWPWLKEADSQGVANAYMDMKKAYQNFFEKKTGYPNYKRKTDKQSYRNAMMKSNIRELIQGNKIIIPKAGPVVFRQGYDFANLGITKVWNITIKRTSTDKYFCSICCEIEDREPLPETTNDVAFDLGIKDFLIDSDGCVINNPKYFKKSQARLAREQRKLSHCVKGSQNYKKQKKRVALVHEKVKNQRNDFQHKISTQLVAENQCIYSEDLKVKNMMKNHKLAKSIADASWSSFCNKLEYKALWTGRTYLKIGTFFPSSKTCHCCGYKNNELKLEDHEWICPNCGTPLDRDTNAAMNILIEGRRLLNIQCTQGTWGTVSTVKPVDTGKVTCLEQEIYLDTPGVTETHRSLAGG

SEQ ID NO: 32616 - protein, 414 aa, unknown
  TnpB Polypeptide
MNRAFEIRLYPTKEQKLKLNQTFGACRFVYNNVLGLRQSYFNDYGFKDKDLDIMDMLKAFNPWLNEIGSQAICQSLNDLDKAYKNWFDSLKKKTKQKTKAPKFKKKHDKQSYRDCMMKKNIFELLDVQSRKITVPKIGKITYRCGYDFSKYGITKVCNITVKKSKTNKYFCSICCECKEPEKLSTNNFKIGFDLGLKDFLIDSDGLVIDNPKYFRKSQEKLVKEQRKLSHCVKGSNNFKKQKLKVALIYEKVKNQRKDFQHKVSSQIINENQVIVSEDLKPSNMVKNRKLAKSIADASFSSFCNMIDYKSKWYGRTYIKIGSFYPSSKICHCCGYKNTTLTLSDREWECPNCHTLLDRDKNAALNILEEGLKILYRGCQNQNSLLYLNMSGQELPIEPVDTENIGSLAQEDSSF

SEQ ID NO: 32617 - protein, 453 aa, unknown
  TnpB Polypeptide
MKVVSSYAVEIKHFNRIFQETVRIYRKALSFLIDVYDKEWEYLSAITKQKERFNTAERLIHTTKNNKAKYDFDTQFYKMPSYLRRDVINAALGAVSSYHSNLKNWEAAGKKGKLPVLQVNRYVTPVFFRDNMYLETESGIVCKLKVLHNNDWIWITVNLKKTDVAYLKKYWSHCKSSAPRLEKHHKKWFLRFAYEESVELSSTPVENQTICAVDLGINHDAVCSIMESDGTVLARRFINFPSEKDHLYHVLNRIKKFQRQHGSKNSGSFWAYAKRLNEELSKKIAAAIISFANPSSMEFEFDKVKFAAECSTDVIVFEYLDMKGKKSGSKKQKLHMWRKNDIQDLVEHKAHRIGVRISRVCAKYTSRLSFDGSGEVVRNPDNHSLCTFQNGKQYNCDLSASYNIGARYFIRELLKPVSVKRQSLLWTKVPEAERRTTCTLDTLRKVSDFLKVS

SEQ ID NO: 32618 - protein, 457 aa, unknown
  TnpB Polypeptide
MNQKDKLIQSITLNIDKIWKPKASYKFKNMNVCNSSTWIKSSFALQKPDQRSASSSFQKDKFDVTHINEEPLKDKQLFRAFKVDLDFTKKQKRIINRWMNAGIKMYNKTIDLLKNKHEENCSFFTIQNLLKNDKRNIINSSAINPIKSKKPIGNVLYTGIPKIPVHVIDKSIKLACSNLKSALSNKENGNISYFRLRRWKFGKKVKLLGIEKGMFRKDTIFPSIFKKVKAFRDNISFDLSTIKCDSKLFSSDGKYYLLVSEKINNEIKQKEEKPVSIDLGVRTFITGISNDEIIKIGTNNINKLNMIEDNITKAKNNHNKRREKQHRAKLKNMVDELHWKSINYLINNYSTVIIGKLSTKNAVENGKSKLISKMKTLMLSLSFYKFFQRLIYKCEINRIKLKIVNESYTSKICSCCTNCKDDLGSSKIYKCDKCGVVMDRDVNGARGIYFKSFPIIE

SEQ ID NO: 32619 - protein, 440 aa, unknown
  TnpB Polypeptide
MDKVSRKTVTSYMVKLRQIRHSLDATVSIYRAAVEFLIKVVLDHYDIIQELNAKESVNFIEHLVHNTKNNKASYPSFDKKFYKFPSYYRRAAISDAIAHIKSYMELKEIQETTFLDRNPDFLPCFFKGNTFNQLSSNVFQIKVFNGSDWVWLTVKANASNMKYLRNHFSLSDLSCPRLVKRHHGWSLRFAVERKPLLKYVKDIDTFRALGVDLGINTDATCSAICKDGTVNGAKFINSPLQKDRLNRLLNDIKKAQQNGNRKNRRLWSYVDNYNKEIAIRTAKAITEYAIEACCQVIVFENLSSIKPRGGKKQKIALWRKRDIQKRVETMAKAYGIRVAYICPRNTSRLAFDGSGLVTRGKDAGFKNNKLCRFDNGKIYSCDLSASKNIAARYLLRALQKSMSEKAWSEAMAKVPELSVRTNCTLSTLISLNAVTVAIAA

SEQ ID NO: 32620 - protein, 381 aa, unknown
  TnpB Polypeptide
VAVVKKRVRVRLYPAEKQKILMDKTFGCARFVYNQTLADCRQSYEQSKHFPSQNERIKNLVPLKEKYEFLKEVDACALQQSVRDFNCALDNFFKNRQHFGFPKFKSKHNSKCTYRTTYGGGKASILDDKHLKLPKLGKVKTKSFSLPKICKIFNVTVEKTHTDKYYASICIETEVQPLPKTGKRAGFDLGLIDLLIGSDGTKVGRPKFDYLNKGKLVKEQRKLSKMRTKLERAQLNLDECKNYQKQKHKVAKLYEHIANCAKDFNHKLSRKLVEEYDFIAMEDLNVSGMLKNHNLAYSISDVRWSQLLNFIQYKCNWYGKEFKQVDRFYASSKICSCCGTYHKDIVNSLSVREWVCPDCGAHHDRDVNAAKNILTQALSVA

SEQ ID NO: 32621 - protein, 142 aa, Saccharospirillaceae sp.
MVTQKSGLNRSILDVGWHKIETYTKYKAYQAGKAVFKLSAYQTSQACAACGHTHSENRKTQSDFQCLSCGHTDNADHNAAEVIKQRAIDLIKDSGTELTKKGVLRPNRLSDSRGKVRRSSASENANANEASKKKMGLQRQAA

SEQ ID NO: 32622 - protein, 333 aa, Hydrococcus sp.
MGRRRTKKKQSSQPIIRTDVWDLAVTADQKHQMILTVAQYRVYLRPLVLIVNAQWINLADLTSKERINAVEKMIHQTADNPNPKHEYFHSSVNKYPSFRKFPSYLRRAAIADAIGIVSSFNTRYREWQSGERKHRFAKSPRLTAMCDTYPALYKGQQIRYGEKYQTVELKVWSGTDWIWITNIGVSGYGLNRHQVQGNEMQSPALVVNKRTCQLSMPVQIKAVKIEESEFVASVDLGVNNAAVASIVGRDGTVKARKFINPARDIDQRDRRRMMIKRKSRQTANITKQRLAGGFCKGLYRKSSNINLEIARSVMRSIIGLAKLIMLKPLSSRI

SEQ ID NO: 32623 - protein, 414 aa, Actinokineospora sp.
VGHAIPFLSVLISRLIGMSRFRLQPTPAQERLLLEHCGHARFVWNLAVEQHAHWRLGRKAAPGYIAQCRQLTQARAENPWLAAGSVMVQQQALKDFAQAMASFFRRTHRRPTWRRRGQIEGFRIVTVGPGDVRRVSRHVGEVKVPKVGWVRFRWSRAVVDGVKSYRITRDRAGRWHLAFAVVPEPIAGPGTGAVVGVDRGVVVSAALSTGELLKAPALRGTEQARLLRLQRKLARAQRGSNRRGKVKTAIAKLKARETDRRKDWVEKTSTRLARQFDLIAVEDLKISNMTRSAKGTIDTPGRGVRQKAGLNRGILANGWGLLAARLGQKAPGRVVKVDPRFTSQRCSACGVVVRGARESQAVFRCRSCGFACNADVNAALNIRFAAGHAVAARGGLPLGEPANREPQRDLLMVR

SEQ ID NO: 32624 - protein, 407 aa, Actinokineospora sp.
LSVVVVTLIGMSRFRLQPTPAQEQALLEHCGHARFVWNLAVEQHAHWRLGRRSAPGYAEQCRQLTEARAANPWLAAGSVIVQQQALKDFTEAMASFFRRTHRRPTWRRRGRAEGFRIVAVKPDGLRRVSRNIGEVKVPKVGWVRFRWSRAAVDGVKSYRITRDRAGRWHVAFAVAPKPIAGPGSGAEVGVDRGVVVSAALSTGELLNAPTLRRPEMARLLRLQRKLARAQRGSNRRGKVKTAIAKLKTRETDRRKDWVEKTSTRLAREFDVIAVEDLKITNMTRSAKGTRDAPGRGVRQKAGLNRGILTNGWGLLVTRLDHKAPGRVVKVDPRFTSQRCSACAIVDREARESQAVFRCRSCGFAANADVNAAQNIRLAAGHAVTARGGPPLGEPVNREPQRDLLSIG

SEQ ID NO: 32625 - protein, 600 aa, Rhodococcus sp.
MTGPGSTVPRRFAFTTRAHVAVDDATGERIGLDDVDTRVGWLLDLITAAGGELVSRLWQPATFDVLAAGCDRQDRRLPAQGHVAATRLGWTPHYPEGIYVPSRVTRVVTAQVMATLRTLAYRDNAIAALSARFDPATGVVAPPTGSADHVSAGFARGVLRQLVACARVEGSRAGRLRITDVQGPPQIAAMARLSAADRQLAQIAVTGRELVLTVKLPTSPAPAGRAQWRSIRLTAAIPEHLHGRAITDWHLPTLGLDRRGLLWRCAATELVPALDLDSATMAVGVDWSPSTLGAAATATENPEGLLSDYRGWTYDDRGLGIKLARLQTEGQLLHRKAARLTQLAATAEPEVRAQLEEKIAVLDAHRTAVGVKRGKINRELAFHFARQVTDYATDTQAQVIAVEDLTTLETRGHGRVNNNRAAQSARRQAVAALAHTAAGAGITVVSVPARGSSALCPGCDEPLARPGGYHDAWCARCRVGGNRDHVAGVNLAKRALLGKGKATSRRGQMPAIRVAEHAPVRKCRDKHAPTRSRPRHRRVRRSLPTATLRVGVTPKQHVPAPQASVWDTVQPTPPHGDAGSRDTRPSQAPATPVTDSMRST

SEQ ID NO: 32626 - protein, 367 aa, Deinococcus sp.
MFETLRLTRMLYNAGLEQRREAYRKHGKTLSAYDQQRELTALKDACPEYGGVYSHVLQDVFDRLDRAYKSFFSRVKKGAKRAGFPRFKPRQRWDSFKFKQCWDNKKGDWTACGKPVDEGRRINIPKIGAVKIKLHRPLEGKPKSLQIIHDCGQWFAAYVCEVPLAPLPATGSAVGVDVGTTWFAITSDGEFVENPRYLKNGLKNLRVQQRTVSRRKKGSNRRRKAVQQVAKAHRKIRRQRADFHHKTARRLVNEHDLIAHEDLKVSNMVKSNLARSISDVGWASFFEILNAKAASAGRSVIAVNPAYTSQTCRICGHVGKENRVSQSRFLCAQCGHAENADVNAAHNILGRAVPSALNGSGVSHAVV

SEQ ID NO: 32627 - protein, 402 aa, Escherichia sp.
VKRLQAFKFQLRPGGQQEREMRRFAGACRFVFNRALARQNENHEAGNKYIPYGKMASWLVEWKNATETQWLKDAPSQPLQQSLKDLERAYKNFFQKRAAFPRFKKRGQNDAFRYPQGVKLDQENSRIFLPKLGWMRYRNSRQVTGVVKNVTVSQSCGKWYISIQTESEVSTPVHPSASMVGLDAGVAKLATLSDGTVFEPVNSFQKNQKKLARLQRQLSRKVKFSNNWQKQERKIQRLHSRIANIRRDYLHKVTTTVSKNHAMIVIEDLKVSNMSKSAAGTVSQPGRNVRAKSGLNRTILDQGWYEMRRQLEYKQLWRGGQVLAVPPAYTSQRCACCGHTAKENRLSQSKFRCQACGYTANADVNGARNILAAGHAVLACGEMVQSGRSLKQEPTEMIQATA

SEQ ID NO: 32628 - protein, 416 aa, unknown
  TnpB Polypeptide
MKVHRTIRYRLHPGSSRKHQLLHGTAGACRFVWNHMVGKLKDEYEFGIKPDFRHYSLCHVFTIMRRGDGTTKWLQDYPSKVVRISLKPIETAYKEFFKDVKTGGKLNRQLPRFHGRYTTEPSFPIDYQSAKVAGDSLYVQKVGWMKMVGNNPYPDGEFKSGRIKHECGDWYAYLSYEVQAEASLPRSIREVGIDRNIADGRLAVLSDGTKHAGPELEKKIARRKRYQRKLARQVKGSNRRKVTKLRLQKAFQAERFARLNWAHHVSKDIAEQYDVAYLEALNIRGMTKSARGTKQRPGKHVSAKSGLNQKILASAWGTLELCLDYKTEVRKVNPAYTSQTCHQCGHVDKGSRKQSDFKCTACGHADDADVNAALNILAFGNEAAGRGGGDTGGASCHSRPGKRQEMGNESLADFAT

SEQ ID NO: 32629 - protein, 705 aa, unknown
  TnpB Polypeptide
MKKVKSYITCTKDNIKNIVDNPVLEDCFIGYTSKKKKKKSKTVLFEILEDAVIRTNKIMFHVYNFLKIYLLYKYKKSGIGDLEVKLNVQFIRKIINIIAVKSEKRGKKITKDKETKDMTTFYKEKYKPFLNDSDYLNKDSLNYILNYEATAVITNITTNIKKHYVSHLRTYIWIKFGFRDKIRKIDSLTYKTAGIEKNCKDKEQRLKSIKREKKKILNKIFNTIMDDIVYVREPSNFVSLEKYHTDIEISIGDFVPSKRFYKRDDNGNTNIAWDIQENPLDYLNKMITLNLAFEELNQSIIDSHNDPNTHPPIIKTFNALPLKTSLIPSYITIDTAGLISLFTKKDKKQHLKNLADKKTKEKLWGRIFDLDVKSFSRKGYTFHYMLKTDGVGVSILMIKTDKKGNPIKEPSKKDLREERKEIYDTPYINDIQMTKELLKRNIVAADPGDGDLLTFAKEIPKEKCLTTFEKKFHIGEEKKYANHVHYSYTQGQRNHDIRKNKYIEIREDLKDLKIDKTSIRKIESPLCEYDSKTCNYEKFKSYLGEKISISRKLWDHYKEYIYRKLKLNTYINTKRSESNMINKFKSKMGNPEDILLVIGDYSRGQGVRGRAPSKGKSFRKLFRDNDYKVCLIDEYNTSALCSHCHSKNEHFLEVERNGKKIKLWKLLKCTNCKVIHNRDHNAAKNMLTLSKLIMAKKSLPKPFQR

SEQ ID NO: 32630 - protein, 394 aa, Streptomyces sp.
VKRAFKFRFYPTDAQAAELSRTFGCVRKVYNLALAARTEAWALRQERVNYNATSAMLTVWKKTEELAYLNEVSSVPLQQTLRHLQTAFTNFFGKRAKYPRFKSRKTSRKSAEYTTSGFRFRDGRITLAKMSDPLDIVWSRPLPEGAKPSTVTVSQDAAGRWFVSLLCDDPTIKPLPVTDQAVGVDVGLDHLLTFSTGEKITNPRYERRDRARLAKAQRSLARKAKGHGTNRAKARREVARIHARIADRRRDGLHKLTTRLVRENQTIVIEDLNVRNMVKNRSLARAISDAAWSDFRSMLEYKAAWYGREVIAVDRFFPSSRLCSHCGTLHGAMGLHVRTWTCECGTTHDRDANAARNLLAAGRAVTACGAGVRPQRSSPGGQSAMKQEVSRREP

SEQ ID NO: 32631 - protein, 381 aa, unknown
  TnpB Polypeptide
MTRRVKAIRATVSMKIALSEPLLALVNNYVKALRFALFWLKENVPNPNEKGVLGKVHEELYTRLREEYNLPSKVAEDCYRDALSVYKGWYNNPKKGRFPRVYKPTVWLTPKASYNMDFERMTVRIASVGELPILGYPRNLREYMSWRMKEARLVVGDGKAFLKVVFEKKEGKVEPKESIAVDINMADVVVGRDDEHYVRIPTRLEEVHHWKSLAENLQRKYSKRWRENKRILHRVRSFHLKAKRVMEDFARKVGKWVIEIAEDFGANVIKLESLKNLIKNVDKLPRELRDKLYLMQYRRLQYWISWQAKKHEMVVEFVNPKYSSVSCPKCGQKMREVSHRWFKCSCGYENDRDVIAIVNLNGRGSLALSSAPQMRDVVPNR

SEQ ID NO: 32632 - protein, 457 aa, Gammaproteobacteria sp.
MKVTRILKSKNLNKGKYQQLEEQAERLGQVRSEVWHSFGSINGVSIKSDRIIRDQWLKEKRRFNVSANAWKETLRDSFGNIKANRESAKEKVRKVLYKQVSDEKKRVELYKKLKSDNWTSDNYLRRLMRKYWKHGCNHTYNQIVVRSDNYTTFQLGGHAWIKIPSLQKGKRIAIPLNTTVEPTGTLRVILKDDEVEVHYTIEITENHNCGSATIGIDKGYTEVFVDSEGEHYGEGLGKLLTKHSDRLKKKYQARNKIRAIANKKHHKKPNIIKNNLGRKKLNRQNEKVQSQVKDTIYQATHKLVDKAEVIAAEDLTSPIKSRKFEKNIIRRLSAWTKGVIATALDTISRRRSSSVILVNSAGTMQMDSRYGILLGKRSGDSFHCFDGVVLQADENAAQNVLARLHFPTIDRWTPWQKVKSILLERTERQRLGLLNQDSSCNRCGLSTESELHINRFE

SEQ ID NO: 32633 - protein, 622 aa, unknown
  TnpB Polypeptide
MRSYQVVLKCADQSQREEINQRIRALEEQQYQLLTPQVIKQAVELYRTNPKERFFTRQLCKKVGKSPNIAQSTFHWLYIAIKGKIDKEKKVQGLLSFLAKNPQQLIEWLIFGRSPYTERSLEKFWRLKRRYIINLLTSTRFQTDSYWRKKHKLIYTSDFLQLNALLPTCSQPEVLQALDDALFYYIHEFSHLPQLTKNQKAFLKKLKLLKKEQSIVVPFLTSWINGPQTSRWKSLKVLAEQLAQVIGKPSRKLFSAVRLIIVFTLFDNYMQSVPQLVKVLPIANVVPPPFKRKKKGRLPIKLLIKKDYVIIREGNAQELTDQIKKQGWTEFCFPLKGKQRLKAQVHFPKKVLNYLNNGAHIKVFQVSSGKAPNYKPRVDVVLEGSHSCFHSSKLLYHYLTNISAKKTSILGIDINRLGQYMVAFNIPVTLPPDLLDLAAHYEHLSTKVLDELNRGFLRKRKEYDPHGCCKLKGELNRVYTRRHRIIREITRLLPHFLAAVMVKKKCKVLKIESLTVDPTGTKSALAKAIYTMPDSLFIYKKAVWLASIELGYEVQLEAVRPYHTSTIHYGCGGVLSRQQGQYDVAPCKKCGQKVNTHANAAQNIASLKGILHPSDSFPSPHV

SEQ ID NO: 32634 - protein, 376 aa, unknown
  TnpB Polypeptide
MFRTIKVALSFEQSLLQTAIAFNKACQIVLNYGSIHKVYNKNVLNRETYPQVRREIPNLPSALVQTARDEASEMLLRTDFAKVIKKRLSVRYDNRCFKFFADSNYVSLTTVMGRLTFYFKHYDYMDTWKGEYTNAQLVIRRNKVFLNVQVKLPDSPLKATGKVLGVDRGILNIATCSDNTFFDSKRLRAVKGRYQFLKRRLQHVGTRSAHRKLQVLSGRERRFVLNTNHCISKAIVSKPFDVFALEKLGVSKKKKSGKRFNRKLGGWSFAELHLFVQYKAEAKSKCVVLVNPKYTSQRCSKCGFVHKQNRKGLGFRCSNCGFSLNADLNASRNIGVLGKSEYLRLFVNEPNVASGEASPTDVVDGSYKPTTLVVGS

SEQ ID NO: 32635 - protein, 249 aa, Microcoleus sp.
LGQSKLKEALPKVFSDGRLTLACGEYYLIVSEKVQQAHTDNQGRLVALDPGVRTFMTFFSEDSYGWLGVDSNLFIQKLCFRLDKLVSKISRAPGRQKRRFLKAASRLRCKIKNLVKELHHKIAKFLVDNFDVILLPTFETSQMVSKSRRKLKNKTVRQMLTLSHYDFKTFLKWKAWESSKLVIDCNEAYTSKTVSWTGEIVQNLGGAKTIKSQATGLKMDRDLNGARGIFLRALVDTPLLRDSLDLSVC

SEQ ID NO: 32636 - protein, 363 aa, Scytonema sp.
MKTKLKLTLEQKTIMSKHAGISRFTYNWGLAMWSALYKEGLKPNHRQLRTFFNNEVKPVLTWIKEKGICQKITEFAFENLGKAFKNFFEGRAKYPTFKKKGKSDSFTINAGGKPISIGGTRIKLPTIGWVSTYEGLPHTTVKSLTISQQVGDWYISCSHEIEPEVTEKKHDYVGVDLGIKELAILSTGFVFANPKALKKAQKKLTRLQRQLQRQVKGSNRRNRQRLRIGKAHRRVSNIRKDATHKATSYICKNHAVVGIEDLNASGMMANHKIAGAVADSNFYEFRRQIEYKAERYGSTVVLVDRWYPSTKLCSNCGEKQPMKLSDRVYICKHCNYTADRDLNAARNLENYARKANPCLDTDG

SEQ ID NO: 32637 - protein, 404 aa, Scytonema sp.
VLKAIKVRLYPTTEQEIALAKSLGCARWYWNYALNACIQHYSETGKTLKLSVYKAYLPQLKVEYPWLKEDCYSAVLQCVAINLNKAYTNFFEGRAKFPRFKSKHHKQSIQYPQNVKVVDDCLEVPKIGTVKAVFHRPIEGKIKTVTISKTPTDKYFASILCEVEDGIGQSTGDKTLGIDLGLKDFAIVHDGEQITKHSSPKYLKRHEKNLARKQKKFARKVKGSNSRNKYRKLVAKVHERVSNSRQDFLHKLSRKLVDDSQVVVVENLNVKGMVRNRKLSKSISDVGWGIFVNFLDYKLKAKDGQLVEIGRFFPSSKTCSCCGHILDELTLDIREWDCPKCETRHDRDGNAALNIRNEGIRILQNNGGGNPVTASGGSVRPTNRKGKKATSIESGSLHRTVRSV

SEQ ID NO: 32638 - protein, 407 aa, unknown
  TnpB Polypeptide
MVRSMQRAILLQTEATKRKKEILNEFSNRAVSLANLLLQHRKSKRPMDLHKEMYSTCKAISSFNSQVICDIERCVVRSKGKTIKAITVKFNVPRNCKTFNTKSRFFVELGLYPRKRVAVPIRENRNFQRYTDLIRSGWVCKTYGLTPGGQVVAFLSKEQVVVVSKRNVVGVDVNSKCFAVSVLTPEGKVFKQLYYGKDIWIKRKRIMERRTKLQSLADKGSHRAKRSLKRLKVNEHNFVKNRVGEVVRDITNLAVKYDADIAIENLKRFTPKGKRFNREVLRIPFYAFRKNLESRCFDKNIKLTVVDAYHTSKWCSHCGAVVKSGHSSNYALFKCGKCGQTVNSDRKASLAVAVKSLLVRNEHTPDRDAFFQFTSGPVPVNALWRSDAVGSSFAVHELDHPMESHRL

SEQ ID NO: 32639 - protein, 638 aa, unknown
  TnpB Polypeptide
LQGAGRGAAAGGGGEADDAAGRREIVERAAAGARTPDLAARARRPRRFQPPAAGRGQPAGGQPADAYPGQAQQEPPARHGIARRQQVHRRSSLARSRPPAHARHGRQGPIVPTLPAGAQGRASSALVVRRFSRQGRPSAVWRGRRFLACSAAVAPGSVGWLAWVFVVGSWWDDGMPRHNEPGSPALVHRTARAGLRLTRGQRRRLLGLLMSAGDVWACVLEVNAWRKARQDTPLVSYQALCRELAASGPACFGELDTTGARSVLRRYSDAWFAAAARRKKGDGSARFPRRRRRMMPARWYHDRLAVDGRRLRIPVARGCPPLQVRLDRDLPYPPGRIRSVTLLYEAGRLWVDVTAEVPVTVYPLGAEPDPGRVAGVDLGIIHPYAVAGRDGQALLVSGRAIRAEHHQHLKDTKARQRAVTRRAPKPGQRGSRRWRHYRRRQQIVEARHQRRVRQAQHEAARTVIGWAADRRVGTLAVGDPRGVLSIDAGRRHNQRTRDWRVGHLIATLRDKAELAAITLVLTDERGTSSTCPACRARVPKPRGRVFCCPHCGLAGHRDLIAAANIAGRLPGGITPAVTAADVTHRRAGNHLPGVSAARRDPRRRPHHGDIRGSPGRHLPAPTGVTAGRGVARLTARTS

SEQ ID NO: 32640 - protein, 212 aa, Aromatoleum sp.
SFKRHEARLRRTQRAMSRKTKFSSNCKKAKARIQHIHDRIGNARRDYLHKATTTISKNHAMVCIEDLQVRNMSRSATGTPEAPGRNVKAKSGLNKAILDQSWFEFRRQLDYKLAWTGGWLVTVPPQNTSWTCPACGHVSADNRRIQERFECVDCGFGENADVVGAVNILARGHRVAACGEPAQSGRSVRQEPTEATCSGLTPAMSAVGIPCF

SEQ ID NO: 32641 - protein, 411 aa, unknown
  TnpB Polypeptide
MTQLVLKAFKYRIYPTKEQTSFLDRNFGAVRYIWNQFVASFNHNFIGPCLPQDEKFIKDLPGKEFLTEVISYGLQQKRMDWVEFKKQFFSKKRAVKLGRPKFKKKGVSNDSFKIPGQCLKFNSCINFETSRIKLPKMSPIKLVIDRKFSGLLKSVTVSKNKANQYFVSVLVEEPIELKQNTGRSIGIDLGLKDLLICSTGMKISNPRWFRKTQTKLKITQRAFSKKVKDSSRYKQMKLKVARLYLKVTNQRKFIYDNLSTWLVNNYDTIIMESLKVKNMIKNRKLSKSIQDASWSTLIGMVSYKSNWYGKTFHQIDTWFPSSKTCSCCGHKLESLDLSIREWTCPSCNTKHDRDLNASVNILYKGLDDLYSLTSAELADYRCRESVNPKVEIPKVDSLKRLVSFIDFYKTA

SEQ ID NO: 32642 - protein, 387 aa, Chloroflexi sp.
MIKAHKIRLHPTPEQANYFARAAGTSRFVWNWALAEWNRHYEAGEKPTALKLKKQFNEIRREQFPWTWEVTKNASDQPFLDLGKAFTAFFEGKARRPRFKSKKRSKASFYLANDQFELGDHRIWIPKLGWVNIAENLRFKGKVTGARITKTADWWFVSLTVEIPGELPEKRKGAVGIDVGLNRLATLSTGEGFENQKFLTTALKELRQANKRLHRRKLGSKNREKAHRQVARLHYRITCMRDDVLHKMTTRIADCYGIIGVEDLNLKGLLKNRRLARSFSDASLGKLLTLLTNKVEQHGGQVIRVGRFFPSSKTCHCCGWKWEDMQLSDRVFLCQNATCAYYQFPQDRDHNAGLCILSEALRLIGLVDQVVSGTGSDADVNLTADAG

SEQ ID NO: 32643 - protein, 852 aa, unknown
  TnpB Polypeptide
MPKVKNPNFIVELKLLTHEQDLALLNKRFNIANGIYNRLVKFANKQLKRMRENKSYQTTLHNFFYYKALNDTKMVKLHSELLKNIRLSYSLSEYQFHSFVKVQQQKYKKHIDSFTAQKIASTVWKAVETVLFKKGKKVHFKKFGQLTSLEGKSNKAGIRFIKEKELLSWNKLNLKVKIRKNDLFIQEALTNDIKYCRIVRKPFKTGHKYFVQLIIGGFPPAKRINQTGAFRHSASPNEKVGLDIGTSSLAVCSKNELILTELAKKSSNYDKEINRLYRKLDRSKRAMNPHNFNPDSTIKRGIKLTWVRSNNYVKTLFKLKNLYRLKANYIKLEHNKLANKVLSLGNEIYVESMNFSALQKRSKETTINKKGKFNRKGRFGKSLGNKAPSMLLTIIDRKLGYIDKSLNKINTTTFKASQYNHIEDTYIKKKLNERWNKIEGELIQRDLYSAFLIMNSKPNLKETDIEPYENPDITLTWDAVSSGDQTIYYRLEISEDKITWKDEGSYYEPTAKIHAPSGKSVFYARVCAYTAPYDYAYMDDKNLCDIGNWSDTLKVVARISDKTSKITGTKATAASLSFKWAAVSGASGYKVVYYPSGLSDLSKELTTSTNSCTIKNLKEDGSYAICVYALNSNSDFTAVSNTYTETYATTLPKKIRDFKVTTAYPGDASFEWKGINGAKAFQLQITKVSDSKKFKKPIVNETKFYSYLGTYTNSKKIKAGTFYSARVRSYVTLAGTKQKVYSPWSTVITFGTSPKKITAKRSGSGIKINWSKVSGASAYEIYVSTSYDTKTFTKVDTVKSKNTSYTLKKFKKKKLKKNTMYYISVKPVCKVGKKNCSTTVYVSNPTSVFYSK

SEQ ID NO: 32644 - protein, 248 aa, unknown
  TnpB Polypeptide
LGKGFDWAMRLIGSGAPRLTVPVPSTALINQRLADGWQMSKTIRLGMRSGRLFVDFIFEKERPVLREDGKTVGMDSNYKAWLVFSDSQIVGRELYPKIQGFAKRQKHTKALVKSALGKAIKQIDFSKVKVLVIEDLKKVKHGTRGTFSRVFNRRLSHWLYAYAVDLLSRRCEELGIEVQRKDPYKTSQFCRICGKWNRRNRRGDKFRCVSCGHADHADLNASLNLEFLGLAGIYGLRSLKSLKYQSFG

SEQ ID NO: 32645 - protein, 159 aa, unknown
  TnpB Polypeptide
LRQRLQKRGTKSAKRHLKKLSGKEARFKHNTNHVISKRIVQKAKANGQGIAIEELRHIRKRTDSTVRRSQRNRHSSWAFGQLRSFLSYKAALAGVPLYAVDPRNTSRTCSACGYSAKENRKSQASFVCQSCGLSMNADINAAINISRASVMEPIAAGRA

SEQ ID NO: 32646 - protein, 241 aa, unknown
  TnpB Polypeptide
LGTRDDWFEDHRVEAECRLVYDRRVGTYTLQVPVEIDYTLPYAKRSVVSIDPGVRTFLTYYTPDGETGEIGKGLRTIHRQFGAIDKISGMIKRREGNHRRLRHLRQARRRIYNKVKYLTNEIHWKAAAFLCGNFDTVLLPEFGAAAMLKKRGLSSRTKRDMQAWAHGRFRERMLHKARETRTRVVVCGEAYTSKTCGHCGWQHDRLGSSKTFVCGQCGKVFDRDVNAARNVLLRNLAAICP

SEQ ID NO: 32647 - protein, 432 aa, unknown
  TnpB Polypeptide
VVEEAFKYAATPEDTSTAESAWRAIQTCREVYNHALTQEYKSAPDDNKPSYTAMQNKLPQWKQTWPAWNSVYSKCLQMAVRRIKHSESVLDSLKERGFDVGELKWKRPRGYRSITYNQSGFDVDSNTGRTDHATVDFSKIGTFHVNLHRPLPDDATIKEVILKKQKTGDWTVSIVVTYDADYPAKPDVEDIDSEDTVGVDLGITKFIHDSDGRAFTPLDEETDRTRIEKCHRALSRKEHESNNWNNARQRLARAYERVSNKRRAYREALANAYTKRYDAVFLEDLNVESMLQQSGNSRNIASVSWYETIQAFERFGEKNGCHVVLVPPDGTSKRCVQCGVASDKPLWVREHSCPGCGFTTDRDLNAALEVKRLGLFELGVVEDGSGLGQELAESTPAETGTATGARHRDVVPASAVVDTGSPTLTEATSAAE

SEQ ID NO: 32648 - protein, 402 aa, unknown
  TnpB Polypeptide
MELRKIDYKLYPNSAHEDALLNVLRLQKDLHNGALEERIDCYKKTGQSLSYNDQQKSLTQIRGDSQDYKDMPVYISRMTLRRLDKSFKAFFGRVKRGETPGFPRFKSMKRFKSFEICEGSGWKFNSGENNKHGVLYIRNIGHIKARGKARTFGKIKTSQIIHKHGDWFLSLTVECEPTRVTDSKKACGIDWGVEHLLSITHEDASFRQVENPRYYETHKTEVLELERSMARKKRGSARWKRACKALSQSRAKIARKRHQDHHQLSHNIAKEYALVASEKLDIKQMTRADNPSGIYNKTSLNRRVLDTSPAKLMGMIRYKVEETGGRYEEVQTKKVKPSQRCPDCLVTKKKPLKVRHHICTCGCTMKRDVASGLVMLRSVLGTLHLRVETIPNGLPRKTPSKH

SEQ ID NO: 32649 - protein, 280 aa, Mycobacterium sp.
LIAAGKVRSTRIVRTVINGRDTYRMQLVCDGRPSRRYPVGEGRVSFDLGPSQIAVAVERSDGSWSGWVEPLADAIRLDTLRLRRTQRHLDRQHRAGSPDCFRSDGTHTWVRCGWRRSAAAMRTTRQVAELHRRLAEHRKTLHGALGNRLMGHGADIACERLDYVSWQKNFPRSVRDRAPGSLVEMVRRKAESAGGQQLYEYNPRTTALSQTCLCGNRKKKPLSQRVHRCECGIKEDRDLFSAYLGLHVRTGSMGSIGWTCRQPVRAGASSGRRRVAEVQP

SEQ ID NO: 32650 - protein, 391 aa, Mycobacterium sp.
VKRGLHSLAAKDGNGALRPKTDEAGALVGLQWGAGLVVPIAPAAVSGRRGREQQAELAEIEALIAAGKVRSTRIVRTVINGRDTYRMQLVCDGRPSRRYPVGEGRVSFDLGPSQIAVAVERSDGSWSGWVEPLADAIRLDTLRLRRTQRHLDRQHRAGSPDCFRSDGTHTWVRCGWRRSAAAMRTTRQVAELHRRLAEHRKTLHGALGNRLMGHGADIACERLDYVSWQKNFPRSVRDRAPGSLVEMVRRKAESAGGQQLYEYNPRTTALSQTCLCGNRKKKPLSQRVHRCECGIKEDRDLFSAYLGLHVRTGVDGVDRLDLPSARQGWGIVRTSTSRRSPAVVHQHASGEAADIRLRGGQWRASKRGVKPKPRCDRAARRKPPLPTSPRR

SEQ ID NO: 32651 - protein, 379 aa, unknown
  TnpB Polypeptide
VERSYEIRIYPNARQRELIGRTFGCCRYVYNRVLAMRQEEYGRNGKSRGIGSYMTQLPVWKKTDAPFLAEVDSMALQQSLRDLDRAYQNFFRNPGRTGFPKFRSKHAGRRSYRTNMACVPDPRHVKLPKLGLVKARVSRRIEGRVLSATVKQVPSGRYFVCLCCTDCPEPEAAPGAIAVLGIDAGVHDLMARSDGMKVANPKALAKGERKLAREQRRLSRKQKGSKRREKQKRKVALVHERIANQRKDAIHKATTDAVRESQAIAVEDLNVSGMEKNRRLAKSVADASMSEMARQLEYKCAWHGRRFVKVSRWYPSSKMCSCCGHVLEELPLSVRAWTCPVCGASHDRDLNAAVNIAREGARLLNEADGTAGLAGTGDA

SEQ ID NO: 32652 - protein, 430 aa, unknown
  TnpB Polypeptide
MLITRRVTFRLYPNRQQSDQLHYWRKLHASLYNAAIANRKTQWERFKRSVNYFEQQNCLPEFKQVWPEYIELGSHALQATLKRVDIAFQRFFKGLGGYPKFKAARRYSGWTYPCKAGWKAITDGGNGHLNISNLGIVQMRGQARTWGIPTTCTIFCRNQKWYTSITVQCQPARKTSDGAVGVDLGCKDALTLSDGLKIGLPDFTKEGLRKVKAASKKLRRKRAPNRRRKIKASRRWKRERRFVSKLQSKVARKCAGGKLPPGQLPCQRENWLHQTTSNIVSGNSLVAGEQLNVVAMTAKAKKGKRKRQKAGLNRSILDVGFATVGQMFSYKLAEAGGFYVESPTKKLKPTQRCVKCWDLTPKTLADRVHICSNPNCRHTEDRDVNAAQVNLAWAKGLGTSLSDVDVPSSTACGSMQQLGQRKRPKPRPNS

SEQ ID NO: 32653 - protein, 389 aa, unknown
  TnpB Polypeptide
MLREFCHLSKNLYNHANYLVRQAFKETGKYMDRKELEMRLRSDEEYPDYRAMPGAQSAQQTLRLLDRNWKSFFAAIKDWKVHPEKYPGRPRMPQYKRKDGYLVLIMTNQSCKMKQGKLHFLKIFNGFTVSPSFLENVDAYFLHARFVPVSDGINLELVYRMPDTAELPDNGRYASIDIGVNNLAAVATNTEAGNFLVKGTPLKAMNQFYNKKLAKKKSICERMNGCHSSQRIAQLTGKRNRKVSDYLHKASRSVIDWCEENKITSLVIGQNKGWKQDVELGKKMNQHFVQIPFANFIQMLQYKAADAGIKVVLTEESYTSGTSFLDGELPTKAFYNKKRRVHRGLFIANDGRKINADINGAFQIMKKVFPNVHADGIEGAVSRPAVVVL

SEQ ID NO: 32654 - protein, 427 aa, Cyanobacteria sp.
  misc_feature (366)..(414): Xaa can be any naturally occurring amino acid
MIQRAYQYRFYPTLEQEQLLRRTLGCVRLVYNKALHTRTEGWYERQERIDYKQTSAMLTDWKKQEDLQFLNEVSCVPLQQGLRNLQKAFTNFWAGHAKYPNFKKKHSGGTAEFTRSAFKWKDGQLWLAKCSQPLPIRWSRTLPDNCEPSTVTVRLDASGRWFISLLVEDHTVKPLPQVDKVVGIDAGITSLIATSDGEKIANPKHFKRLRYKLRQTQKALSRKAKGSLNREKARRQVARIHAKVADARTDFLHKLTTRLVRENQTIAVEDLAIENMMKNHKFAGAIADASWSQLVLQLEYKCQWYGRTLVKIDRWFPSSKRCGNCGHVVDKLPLDVREWDCPECSSTHDRDINAANNILAAGLAVXXXXXXXXXXXXXXXXXXXXXXXXXXXXXXXXXXXXXXXXXXXXXXXXXSTAVRMSTWPITY

SEQ ID NO: 32655 - protein, 376 aa, Thermoprotei sp.
MSKSVAEYITLRLPFHVTGVDAKLIYWTAWLCKLCAHRLLEAIKLNPSLAYLSQYDFIKVGRRLCYDIIPNRRYVDGISTLIHASLQSAKALKVDITKLEPKHWLLFQSEAEPWAKGNLNIQFVDYDKVKVLVFDRDKSSRRIIIEPVIPKGYIRLVKALVDKALKKEIGYPARIYITDYGERLEHLYGEIQVMVKYNFYLEVMKRYDKPLGDNIAGVDVNVDRLNLVVINRDGDIVWKHTVRFPQITSRGCPRKRAWSIIGEAIHSILRNAYSHGASVVAVENPEVLGYLRYYWIKNGDRGTKNYNYRISIFRNSIIERIVWKAPLYGLHVVTVNPKGTTHSKDHEYVMRRYGLDRHTASAYLIALKTRRNLQRP

SEQ ID NO: 32656 - protein, 180 aa, Okeania sp.
LYGCQQNLIKPNQDLKSILEFICSESHKLTNCGIYYGRQLFFKSQKIIGKYDLEKEYKSNKHVSALYSQAAQQILRSIAESFKSYKELNKKYKKSYLNFQPRIPKYRKKDGLAIVTYPKQGLRLMGNNIIIPLGKTVKRWFKLESFLIPMLSNLQFSDIKELRILPRNRCFYLEFVYKKK

SEQ ID NO: 32657 - protein, 408 aa, unknown
  TnpB Polypeptide
MTREQDIRSSDDNALVAQAPLIRTLRLKVRPSVKSWLDAAAVEVNQCWNWANATSAKAARPFAGRGRWLSSYDLDRLSAGATEYFEHIGADTIQKVNAELVTRRRQFHKVKLRWRSSRGSKRALGWVPFKSASLRRRGKSLRFCGKSIRVFEADRLKEVKRWRDGCFAQDAVGDWWLCLPVEYEAVQGPAASREAVGIDLGLKDTATTSDADRLHAGRYYRDLEPQIAQAQRRGHRRQAKRLHRRATRRRAHALHQFSRRIIDQYQFVYIGDVSAQKLTQTRLAKSVLDTGWSMRKTQLLYKSQAAGRWVAIVDERNTTRVCSSCEALTGPRGLDKLGVRSWECRECGVVHDRDVNAARNILKVGVRSRAYPGSPPSVSGNESRRSKLPPSQTSRRCQARIATKTAAA

SEQ ID NO: 32658 - protein, 396 aa, unknown
  TnpB Polypeptide
MLVFEFKTYGKSSQFTAVDEAIRTAQFVRNSCLRYWIDNQKVDKYALNKYCAVLAKNFPFAGELNSQARQASAERTWSAISRFYENCKKAIPGKKGYPQFQKDCRSVEYKSTGWKLADDRKSIKFTDKKGIGKLKLKGTCDLHFYQISQIKRVRLVKRADGVYVQFCIDVDRKENTEPSGNTIGLDVGLKEYYTDSNGVMVENPKFLLRSEKVLKRCQRRISRKVKGSKNRGKARQVLGKRHLKISRQRKDHAIKLARCVVQSNDLIAYEDLRIKNMVKNHCLAKSINDASWYQFRIWLEYFGKVFEKVTVAVNPQYTSQECSSCGEIVKKTLSTRTHVCKCGCTMDRDKNAARNILSRGLGTVGHTGTLALNASNALGKLTSTQTGASLPEQVSS

SEQ ID NO: 32659 - protein, 312 aa, Fusobacterium sp.
MRYYSIGEFAEKIGKAIQTLRNWHKNNTFKPDYVTAAGTRYYSQEQLNNFLGLKIKTKIKDKKALIEKVGWIKINEQIPSDIKYSNPRITYDNKYWYISVGIEVNKKQENLTDISLGIDLAICSNGQVFKNINKTIKVRKLEKRLKQKQRQISRKYEMNKIKKEGGVRCQFIKTKNIEKLENTTKLIHRKLANIRNNYLHQVTTSIVKNKPYRIVIEDLNVSGMMKNKHLSDSVRKQCFYKFRQYLTYKTELYGIKLVIADRFYPSSKTCSQYSSIKKDLKLKDRVYRCPHCGAVIDRDYNAALNLSMYKLA

SEQ ID NO: 32660 - protein, 443 aa, Deferribacter sp.
MITCQAFKFKLKTNEELENKFAQFAGSCRFVWNKAIALIKQKLDIKKVDKIINIHLPQYYKNTATIPTYNEMAGMLKLWKQSEEYAFLKEAHSQILQQTLKDLYKAIDSAFTKGNGISFPDFRKKGKSPDSFRYPQGFKINNNRIFLPKIGWVRFYKSRNIVGKPKNVTVKRYADGWYISVVTEKDTSIKENLSNPVGIDVGVKKIITLSNGCYFEPLDLSKYEKKLIKLQRQLSRKQHPTKKGDKTPFSNNYKKHQRKIAKMWLKIANVRNDYLHKITTAIAKKHGFVAVENLKVKNLTKSAKGTKDSPGRNVKAKSGLNRSILSRAWGRFFELLEYKLQRNGGKLVRVDAKNTSITCPLCDYTNKENRKNQAVFVCKKCGFTSNADLVGAINVLMRAMRKENLITLPQGLREVTPVEYAREYTLKQEPAGNREGLPLPSIA

SEQ ID NO: 32661 - protein, 321 aa, Synechococcus sp.
LKKLRYRYRLYPHLHQQAALAQAFGCARVVWNDALALCQDRYKRGEKYLGGTDLQQHCISQAQQTLERSWLCQVRNIPLQQSLRDLDKAFSAWWGCLKGKRKDKVRAPRCKKRSNSQSIRFARGGFWVEGETLRLTKVGSIPITWSRALPAEASSVTLIKHGAGRYFTSFVVEVERPTPQPNSKAVGIDLGVASLAVTGDGEKIAPPKFLRSALKRIRRLQRSLSLSHKVKGSSNRQKARLQVARAHVQVADKRKALPVRVWRCSACGTEHHRDVNAARNILAAGLAARQNACGAESKSSLLVSGREAGTHLNREVQSCAA

SEQ ID NO: 32662 - protein, 430 aa, unknown
  TnpB Polypeptide
MSYGCEQHLISPDKDLKGILEFLCTEANNLTNCGIYYARQLYFKTGKIATNFDLNKQLGTVQKNIHYQAFYSDTAQQILGTVAESFKSFLGLLKGVRKGTVTQKPKLPNYRKSGGFSLVTYTGRSIKLTDGLLKFPLGKKVKAWFGLEAFYLPMPTNLDHKNIKEYRILPRNRQFYVEFVYQASIVNVDVDKSKVLGIDHGINNWLTCVSNVGTSFIIDGLHLKSLNQWYNKSIAKIKEGKPQGFWSNRLAAITEKRNRQMRDAVNKAARLVVNHCLNNKIGTIVFGWNEGQKDSANMGAMINQKFVQIPTGRLKDRIAQLCEQYALAFVETEESYTSKTSFLDGDMLPTIGAKPEGWQASGKRVKRGLYKTNSGYLVNADCNGSANIIRKVAIKLGLNLSGISRSCLSQPKKVRLWTLQKSPHLQVGEA

SEQ ID NO: 32663 - protein, 289 aa, unknown
  TnpB Polypeptide
MGAALLFPSILRLKATEYSSRNSKGGIRFAKSQDVLGELRNMTVSVTPGGKYYVCIMAQVEVGDLEKTNLSVGIDLGLKDFVITSNGDRYSSNKFIKKYSKKLATMQKHLSRKKKGSGSWNRQRIKVARLQEKIMSCRKDKLHKISINLIRRYDVVCCEDLNVKGMVRNRHLAKSVSDASWNTFVTMLEYKAKWYGKTLVKIGRFYPSSKTCHHCGHVKEDLSLSDRYYTCPNCGELIDRDLNAAKNILDEGLRKISAGTVDYTDGEGVRLVYKHSLMKSESHKSLACG

SEQ ID NO: 32664 - protein, 387 aa, unknown
  TnpB Polypeptide
MSQIIKGIKLRLYPNQTQKDQLWQMFGNDRFVWNQMLAMAKERYKNNPNSQFVGKYGMDALLKPLKQEYPFLKESDSTSLQVVNRNMDQAFKRLFKHQGGYPRFKSRKSVKQSYTGKSTVKVVAKRYLKLPKLGYIKTSKTGQLNDVKIKRYTVSYDSTGRYFLSLQVEASMPKTLAKTGKSVGIDVGLADLAITSDGDKYAVFNADWLEKQAIKWQSKYNRRKYRATIATRQWNHNHKLVKMAVDDYQNWQKARQLKARYQAKIANKRKDYLHKLTTDLVEKYDVIVIENLRTKNLQKNHHLAKSIANASWYQFRTMLEYKCQWYGKRLVIVSPNNTSRICSACGHNDGPKPLKIREWTCPQCGTHHDRDVNAAVNILNKGLKAVG

SEQ ID NO: 32665 - protein, 211 aa, Microcystis sp.
  misc_feature (15)..(48): Xaa can be any naturally occurring amino acid
LSKYFAAKSGNSCLXXXXXXXXXXXXXXXXXXXXXXXXXXXXXXXXXXNNWLKLQEKIARLHEKVSNTRRDWHFKLAHYLCDLADNIFVEDINFVSWSRGIVRKQSLDSGIGSFINEILPFVAWKRGKYYLKVDKNGTSQECPNCGAITGKKALSERVHRCDSCGHIEPRDTASAKVIENRGKNAVGLTVLENACGGDLTGIDWVKLGRSS

SEQ ID NO: 32666 - protein, 285 aa, Mycobacterium sp.
LCAGSTAAATRSSPRRAAARAWRPSAAPTRQRSARQGWDQTVNRTSWLADHLHVRLSQPIRAYTSVRVNWTRRQLVFVNEPLPVAGKVPTGEVISLDRGVVHTAADDRGRFYDTPDTAALDKQRKFHQRRMAKSKLVAPRQGRRFWESKRYQAHNAAAAGLAAKQARLREDFAHKLSTQLVREHDFIGIEKPSLHRMTRRGKGKGAAAKRGLNRVLQRAALGRVATCIEYKAELGGVTVVEVPAAYTSQRCHQCGHTCKENHESQAVFRCLSCAWTGNADTNAAV

SEQ ID NO: 32667 - protein, 528 aa, unknown
  TnpB Polypeptide
VNRARSAAGANSPAWPATPYVTDGELSARLTAAKATTERAWLNDVSSAVLQQALADLNAAYRNFFASRTGKRKGPKVGAPKFRSRKDHRQAIRFTANARFKVLPNGKLRRPKIGDVPVRWSRALPSEPSSVTVIRDCAGRYFASFVIWARPGALPGTEPVIGIDLGLKHFAVLSDGRKIESPRFLRRAEKKLRRAQRALSRKQEGSRNRDKARLTVARAYARTADVRRDFHHQLATALIRDNQAVAVEDLTVQGLARTRLAKSVHDAGWSGFVAILEYKARLYGRAFIKIGRFEPTSRTCSACGVKDGPKPLHVRAWQCPACGEWLDRDVNAALNVARAAALAVTACGAQVRPGPALRPSTPRPPSSAPPSSTRSGPRRASDWWRGDTCPRSGAAPTADRSRVFRDPGPLRVAGLLAPGTADPLGLRGGERPLQRHPGAGQVLLGQRDEQAVDHGEQGDPAGHGAGPEGGLAGRGDQHQVGDLGDRGPREVGHRDGGGAVAACLAQRVDRVDGGAGVRQADRDVPAAA

SEQ ID NO: 32668 - protein, 381 aa, Vulcanisaeta sp.
MKAHRALLIRLSKDKCDVEHIRRLIALTNIAYRGFEILVPDLLKNIQYQLYGFKNYMGSLVFGTEPKRWFTKVWVPLKTLRIYSDGSKKGDKSAPVVLEFRSDVDFKSNVIRLHQICRNEPRYTVEVPMPKWVIDRVKEGGVIKYAMIGLKDDEPYLALIAEREVAQYTPSEYRLVVDVNSWKYGISWGLVRDGRIVSYKQERINLGRYYGLYDEFIRLGKKYGELKRSGLHRTTEGRKLWKRIRAMHARLYAITRDKAYFLASKLVRKALKYKALLIIDDMTEESRKELLEEKLPPDVIKLLMSNLKRFVHQLETLARWYGVPYEFRRLPSTICPVCQHELTQEEGRTMVCENCGFKAPRDKVPIHWALNASPEPRRVYP

SEQ ID NO: 32669 - protein, 536 aa, Lachnospiraceae sp.
MPKARSKKKTEFSLSQERSVFLYGRPNKDKYELLSRMECAYTELVNSDIKLINSAESRFLLQLVKNDKKDPAVRAFEKANRPAGINSAFCQNAFDEAFTKLANRLDAIRLEMYRRDQTIFTQSKVLFAMSAAGKSRQAMAAAMSGIAASIKKDASFYLETAAFLNSITDADFRTAMLSFADEYAMASMVYQIPEVSRAQVPLDSRLMRFEKSCSTSFTHVLTVTDPFQKCHRVSIPVSASGDGLRRLLQYGAAGTVHISVRPGRILRIQASFTKPHRKPHTDKTVGVDTGMKDCFSCSDGRSAGSMDQVIRFYKDTVEPSFGGLTSLRNKKRKILRYIRNHDLPAAVRQRLLHKADRLEQMIRTADAPYRKKRHYYAMLDKEAADSVRTYISGTDRDTLTVLERLDIKEFRKSRKLNGELSVFARGLLQKKLMEELNWNGMDFLEVEPDYSSQTCPVCGLIDSASRNGKVFCCTCCGHTDDADHNAAVNLKARASDQEFLDICDKDRFNHKALQKDIRTLWDGRHSRWQKIRTASA

SEQ ID NO: 32670 - protein, 392 aa, unknown
  TnpB Polypeptide
VLKGFKTELRVTKQHIAKIHQSIGTCRFLYNSYLAKNKELYELFKEGKIDKKTAFMSANDFDKYINNEVKVLDEFEWINNCGSKARKKTIVNAEMAYKRFFKGQSGFPRFKKKKNQDIKIYFPKNNTTDWTVERHRIKIPSLGFVEIKEKGYIPTDAKVVSGSVSMKAGRYYVSVLCEINDNSDYSDIKTKGIGIDLGIKDLATVSNIDEPFKNINKTEVVRRLKKKLKRLQRQVSRKYEMNKDGKRFIKTKNIIILEAQIRILHQRLSNIRLNYVHNITNTLVKSKPEYITIEDLNVRGMMKNRHLSKAIAEQNFYEFRRQLTYKCLWNNIELRVVDRWFPSSKMCSECGNIDNGLTLSDRVYICKECGIILDRDKNASINLKKAKVYKIA

SEQ ID NO: 32671 - protein, 382 aa, Frankia sp.
MSRSKVVKRAYRYRFYPTPEQADELNRTFGCVRKVYNLALEKRTRAWQQEQRRVSYVETSAMLTGWKKTEELAFLSEVSSVPLQQTLRHLQTAFSNFWAKRAAYPTFKSKRKSRPSAEYTRSAFRWRDGQLTLAKMTAPLGIVWSRPLPDGAEPSMVTVSRDPAGRWHVSVLVETTVSEPPPTGAVVGIDAGITALLTLSDGKKVSNPKHERRDQERLARAQRELAHKAKGSKNRAKAREKVARIYARIADRRRDHLHKVTTRLVRENQTIVIEDLNVAGMVRNHSLARAISDAAWGEMRRMLAYKADWYGRKLVVVDRFFPSSQTCSACGYRDGKKPLNVREWTCQPCGTVHDRDVNAAWNILAAGLAVAACGDGVRPDRR

SEQ ID NO: 32672 - protein, 399 aa, unknown
  TnpB Polypeptide
VQVRRAYKFLLRPTSKQAAALSACLEDHRQLYNAALEERREAWRMRALPVSYNRQAVQLPAIRAADPGGQDRWSAGSQQQTLRRLDKAFAAFFRRVKAGDRKPGYPRFKGRGWFDSIQWPAEKNGARWDSVPHPAVTRVYLLGIGHVRVHGHRAVKGRVKTITAKREGPRWYVVLSCDDVPAEPLPATGAAVGIDMGVASFLTTSDGAHVPNPRHIAAYADRLAVAQQALARKRRGSNRRRKAVRKVAALHGKVRRSRLDHAHKTALTLVRGYDVIGHEALNVANMTRRPAPRRAGDGTYEPNRAAAKAGLNRSILDAGWGVFLNILRAKAESAGRVVVGVNPRHTSQRCAQCGHVAAGNRVSQAVFQCLACGNEAHADVNAAINILRAGLALQGAEAA

SEQ ID NO: 32673 - protein, 352 aa, unknown
  TnpB Polypeptide
MISTRLTIQCGVVRLTKLKQKALDREYNNIQDAVQLSSNDLEDSALFKNLKLYSANKQQAIRYFKKYNSKEYPISLRNDLINLKKAKSFWFLKIPVYDVRGGIKIPIKPHREFPDNFTICESKLVKRNNEYIAMIAIEFDTPKLRRCSSVLAVDLGERFTATAVLLQDRNAMKVKFYGREIRGIRRHYSWLRKRLQERGLTKIVKRIGNKENRCINNILHNISKEIVSLADSADSCIVWGNLKGIRKSAKGRRFNRIVSNMPFFKLTQMIKYKAEAVGIPVIEVDESYTSKTCHICGEIGKRRTQGLFKCKSCGEYNADLNGAINIAKRLVSYMLVSGVFCEQTLNNVVLNH

SEQ ID NO: 32674 - protein, 282 aa, Chloroflexi sp.
IHEASRIRPRAHHDSHVNFRVVRTKRAIERPPGSAVIGVDVGINALATLSSGQVVTGPRALAVGLRKLRRLSRAHSRKRLKSRNRRRFAQRLARCHARISSVRRDHLHKLSTYLAKNHGRIVIEDLNVQAMMSNRRLARSIADSGWGELSAMLEYKCRWYGSTLIQASGWFPSSKTCSSCGLIKDSLPLAVRVFDCPACGLTLDRDVNAAKNLAKWPEVAASASETQNACRGNVRPGVRRAGPDEAGTEQPIVASGSEPNAQALAFTADSLGPDEGRVARGI

SEQ ID NO: 32675 - protein, 467 aa, Streptomyces sp.
MLLLSACDGQQATIERGEDDPQRALLRLQLPTRHDPRSYRDWTWVACPIMLPPTIPPGAVLHLPTLRLAGNRVRADLAHTHAVPKARRTGHTVALGVDWGLNTLLSAGAARLHDDGHITALGHGAQFRAAGVLAKQHQLRRLSEHLHAKASQYQRLIDGDEQHELSGKHGVLEDEIRFVSDRRSSLNDTLGWAAARWTVDQAIAAQATVIYLEDLRSMEAKGMGRTHNTRLSQTVRGQIADRVRHLAAEAGIAVVTVPPRDTSRRCPRCLTPLRHRKAPDRPTAPGWKWAVCPDRAGCGWQGDRDHGAWQRIAGLAHQTKTVTDRTTATMVIRSVVDTLETKAVITPTTATSRADRSKTGPTLHRTTRPAPRRRGAPSPTGPCGPAGKRPEGHAPTGQRTLPRAAHRHQGGTTISTPSPRLRPGTPIPPTPAARGTAGRRIPPARPRHPSTMAEPISDTMSDMGSLN

SEQ ID NO: 32676 - protein, 307 aa, Lachnospiraceae sp.
VDSIALQQSLRHLDDAFMGFFKREKSGYPKFKSKRSSRRSYSTVCVNGNIRLEDGKIRLPKLGEVRIKQHREIPEDWILKSVTVKQTPSGKYFVSILFEYESQVEKKEVERSAGLDFSMPKLFVSSDGYSCEYPRFYRKTEEKLAREQRKLSKMEKGSSNYRKQKLVVARLHEKVANQRKDFLHKESLKLAQMYDRISIEDLDMQAMSKALHFGKSVHDNGWGMFTRMLEYKLQDLGGQLVRIDKWYPSSQICSGCGCIHPEVKDLNVREWFCDWCLEYHDRDINAAVNIREEGMRLQKKKEMRESA

SEQ ID NO: 32677 - protein, 188 aa, Salmonella sp.
VRDFFFRQADFPRFRKKGQSDSFCYPDPKQIKPDQGNSRIFLPKPGWIRCRNSRQVTGIVKNVTVSQSCGKWYISIQTESEVSTPVHSSASMVGLDVGVAKLATLSDGTVFEPVNSFQKNQKKLAVLQRQLSRRVKFSNNWQKQKHKIQRLHSRIANIRRDYLHKVTTTISKNHAMIVIEDLKVSNMS

SEQ ID NO: 32678 - protein, 482 aa, Lyngbya sp.
MFFKANHFLSKYDLDKMLKTNPHFKALRAACAQQTLHGVVESFNSYKKLIKMYKRGELSNKPKLPKYRKKGGLAVVSYSRRWVKFTDGQLQFSLGKQVKAWFGIDNFTLPMPTNLSFDDIKEFRFTPRNNNFYLEFVYEQPKVKQVEKTEHILGIDPGLNNWLTCVSTTGKSFIIDGKKVKSQNQWYNKQVAKLKTGALQGYWDEQLAAVTEKRNRQMRDNVDKAARFIINWCLKNKVSTIVFGWNQRNKDGINIGKKNNQSFVQVPTAKLKSRIAQLCEQHGIEFVETEESYTSRSSFLDNDTLPTFGEKPVGEATPKELGWISSGKRVKRGLYRDSKGQLINADCNGAANIIRKINVSTQQLAKVVRGVLSLPHRYFLDNLSRSYRKQHCEADFNPCNNSAHESMFFKAWRTQYSPSLKLSLRMARLLYPILAPQQIPQIFTNLRRGRELGKQAKILLNYRFEENWERPLTEIKAELGLV

SEQ ID NO: 32679 - protein, 146 aa, unknown
  TnpB Polypeptide
MKQKKKIARLHAHIARQRKDYLHKESRKITNFYDLVCIESLNMKEMSQDSRFGKSVHDNGWGMFTDFLSYKLERAGKKLVRIDKWYPSSKICSCCGKLKKELKLEDRMYSCTCGNQMNRDENAAINICREGLRILGVELDAERKIS

SEQ ID NO: 32680 - protein, 432 aa, Paramecium sp.
MPKLTPWWSHKSQQLTKVIPWETENVNTFQNDVIAKRVLRTRKVKLNPTKEQKMLLMKFADAARYSYNAAVSAVNDKTQKANKIELQNAFLSLKRRDGTYNQFFQKRRWLLGCPQPIRQQAIFEAARNFKAAFTNLRIKNIEHFKITYKTKKHQRQRGFSLGIGTHLKHNDGILTILPKNLGKVRYFGSMPFEGKPDAECRIQRDPYGDHWLLVPVYKTTKTQTSKPIVAIDPGVRTPFACFGSNGGSKTLGEDMNAKLTDIRTRVSLVDRRISKCQDVSLKRKMREHRRRLFRKHQRVRDAYHWDIIKDITNECSGVLLPPFETQRVSRMLKTKTNCSMLGISHFTFRMRMKDKCEEKGLLFDEPTEEYTSKTCGVCGQINYLLGSKKTFECFCGNVCDRDVHAARNILLKWLSTEAGARVVETFLASRSS

SEQ ID NO: 32681 - protein, 493 aa, Moorea sp.
MPKKVGATRKISTQIVPVVGIAKSVELELLSTMKKLGVVRSESYNKLGSISYWGLDWKKAYPEVRSFRSPESLGLPSKLMEWTVSDVAKAITASQAACTEAVIKKVYKRFPGKDNQKKRKELCKQLKTVAFLDNSLLHRFVRKEFQRGHSWGKNQIVYQQGGYKCKRLSRNTYQLEIAGLKRGKRNRIVVRSNRKIKGQIRLIHNQLLQRFEIHFLVDYGTVEISSERRSIGVDKGYTEAFYDSEGQAHGKELGKVATKKSERICAKNRNRGKLWALHRKLEKIDPAKSARILENNLTRKTENRRYRKNQSELTAIIGAASKSLFNGESLKVFAVREAWPTASDLTQPIRNKRQSKAVSRKLNSWMKGVMRDSLQKWADWTGSLVTEVQPSYTSQIDSRNGTLLGKRTGDNFTGFDGVVLQADCNAAKNILARGTDKEISRYMNKTEVQAVLLRRTARFLKGMGLSLLDAVELGWIDSKHTKTKAFKELLNGI

SEQ ID NO: 32682 - protein, 278 aa, Okeania sp.
MYKSIHTKLKLNNKQKTLLAQHAGYSRWCYNWGLSLWNAAYIDGYKPNARKLREVFTNHTKPLYPWMKNLSSRVYQYAFMNLGEAFKRFFQGLSKYPRFKKKGKSDSFTIDNCGKTIELNGWSHKLPFIGMIRTYEPIEVSTKKITISRQAGSWYLSCSYEFDPDTTPKKTDVVGVDLGVKTLATLSDGKVFESVRAYQKFEAKLSRLQYLNRHKDLGSANGRAAQRKIARLHRKVANIRQDALHKLTTYLAKNHGSVVIEDLNVSGMLANHKLAKIS

SEQ ID NO: 32683 - protein, 408 aa, unknown
  TnpB Polypeptide
MKRAYKYRIKPTVKQQHMLSQFFGCARFIYNWGLDRKVKAYKESKTNVTYIQLAKELTLLKQENEHKWLNDCSNEALQQSLRCLDNAYTNFFRNKKGFPKFKSKKKAKDVCKFINAVRFDFEQSKVKVPKVGWVKLCPNKEFDLSVCKLGTLTVSRDKCGDYWCSIVVEDGKPNVPKAKIRKETAVGIDLGIKDYAILSDGTKYGNPKFLEKGLKKLATLQKKFAKSQKGSHRHEILRIKVAKQFRRITDRRVDFLHKLSIDVIRRFDTICLEDLNVNGMMKNHKVARSIQSAAWSEFVRQLIYKSEWYGKNLVFIGRFDPSSQICHVCGYQNKEVKNLDVREWTCPVCGSHHDRDINAAKNILQFGLHPQALVAFENKIPQEGGIKDGEGNGIGHPMKRQYSKSKLV

SEQ ID NO: 32684 - protein, 408 aa, unknown
  TnpB Polypeptide
MRLVYKFKYNGKEAKRLLELCKISKNLYNQALYVIKKELKENNKFLFYNDLDKLMKKMTNLEGEINYRLLKAQVSQQCLKTIDKSVKSYIKSIKDWSKHKEKYCGMPKLPNYKKDYNLLVFTNQCSSIKNGNIKFTKDLSIRIPQYDKYKDCFFGFQQVRVLPQNDNTLVIEIVYEKECINEELDNTKFASIDLGVDNIATAIFDEDETLIYNGKPIKSVNQFANKLIAKCKSELEKINKKKISKRIRKIYYKRNARMEDYFHKLSRRIVNKTIEHKIGTIVVGYNKGWKDSINIGKRNNQTFVQIPFDSLLQKLEYKCKQYGINLIIQEESYTSKCDALAMESIEKHKEYMGKRVKRGLYQSSTRKLINADLNGALNILRKVIGDSDVIYRIIDSGLLFRPLKCNVL

SEQ ID NO: 32685 - protein, 233 aa, Bacillus sp.
  misc_feature (2)..(42): Xaa can be any naturally occurring amino acid
VXXXXXXXXXXXXXXXXXXXXXXXXXXXXXXXXXXXXXXXXXTKVLGVDLGLKVPAVAITDDDKVRFFGSGRHNKYKKRKFRSVRKKLGKDKKVNAIRRMDDKEQRWMQDKDHKISRAIINFAIANHISVIRLEQLTNIRQTARTSRKNEKNLHTWSFYRLAQFIAYKATIAGIQIEYVNPAYTSQSCPKCAEKNKARDRKYKCPCGFKTHRDIVGAMNIRYATVIDGNSQSA

SEQ ID NO: 32686 - protein, 386 aa, unknown
  TnpB Polypeptide
VELTVVAKLDLSQQDKERLERTLEVFAVACNAISQVAFAERCFHPVALQQLTYYDIRQRFNLLANYTVRAISRVAKAYKTAKAKNQPLKLLTFKVQSLDLDARLFRLFLKDDEVWVSLAACDGKRIKCPVKVGQRYLPILKASNPTSAVLKRHRDGELYLHIAVSVPVPKPSDPPQNVVGVDLGEIDLLVASNGVKISGVESIERRKRFRARRSILQRKGTRAKRARTRLGDKERRWARNYLHTVSRRFVDSLPPNSLVVLEDLGGIRDRCKRRGAEQRAQFHTWAFRQLQFMIDYKARLAGHQVVFVRPAYTSRTCPRCGHVSSSNRLSTRLFRCQQCGFQHNANFVASINIATRAVQAGLGGAGLPSTSLRLREFHPLSANCRL

SEQ ID NO: 32687 - protein, 432 aa, Streptomyces sp.
MKADMGRKYRAYPTPEQDEILTRWGHHARALWNLALEHRMMVRRKHDGRSWVWSAEQCVLLTEIRNDPDESINWIRDLPASAAQQVLRQMDEAFKRIANPKLRARNPKFKRRNCGAHLTFPAQRLKVRKLNRHWASVRIPKLGWLRFRLSRALGGTVRSCTLSRNGLGWHVAFGVHTGAKSAPPNGKPGCGVDFGVHVSAWVSTETAPRLMPSSLTDGEQQRLRTLERRKARQLTYAKKQNGGTYSNRLRKTIAQIAALKARQARRRLDFTHKLTTDLAKNHGFVGIEDLRVLNMTKSAKGTVAAPGRGVGRKSGLNRAIYDHIPGERRRQLAYKAPMYGSQLRPVAPHGTSQTCPECGKRDPRSRVGCGREFACVHCGHTDHADKTASIEIEARARRMGDTVTKSTRSPARGARGRETVTRLRAAPATHVA

SEQ ID NO: 32688 - protein, 480 aa, unknown
  TnpB Polypeptide
LSCYFSLIISVFIWGDSFSLFEEVFSPLFFQLWIWEFIYQCQENPKVFSQWDELAQNTYKKRNILANNCIFPSLFKKKSYLRGMIVIQKTYKFRLYPNKEQEKMLANYFGSVRFVYNHFLAKRKEQYEQTRKSSNYYEQAKELTAMKKTEAYSWLKEINSQTLQHALRHLETAYVNFFKGRARFPRFHSKKHGGSFAVPQHFKVEGNRIFIPKFKGGIRFAKSQNVLGELRNMTVSVTPGGKYYVCIMAQVEVGDLEKTNLSVGIDLGLKDFVITSDNDRYSSNKFIKKYSKKLAMMQKHLSRKKKESGSWNRQRIKVTRLQEKIMSCRKDKLHKISIDLIRRYDVVCCEDLNVKGMVRNRHLAKSVSDASWSTFVTMLEYKAKWYGKTLVKIDRFYPSSKTCHHCGHIKEDLSLADRYYTCPNCGELIDRDLNAAKNILDEGLRNISAGTVDYTDGEGVRLACKHSLMKSESHKSLACG

SEQ ID NO: 32689 - protein, 408 aa, unknown
  TnpB Polypeptide
VLTNQAYRYELKLSCKQAGLLYQCAGTARFAYNWGLAQQFRSLADETDFPNAIRLHKILNQRKQDDFSWMYSYSKCVPQEALRDLDRAWRNKAAGRSKPPRFKRKYGSRDSFRLTGIIRAKGKTIQLPRLGQLRTKEDTSKLQGQILSATVSREADRWFCSLQVERDRPNPTRPTGRPIGIDLGIKSFIVTSDGLDIKAPKPLLRGLKRQRRLARQVSRKKKGSRNRKKAQLRLARHHSRVRNIRKDFLHKLSSDLTKTKQIICVEDLNIAGMVQNRKLSRAISDLGWGEFLRQLGYKASWYGSKVIKIDRWFPSSKTCSRCGYKLDQLDLGTRCWTCPGCSAELDRDLNAAVNILLEGCGEDLTKQYPEFQGNLRLWRSSKSIACSSEDLGSRKQTLVELVSFGQDL

SEQ ID NO: 32690 - protein, 390 aa, unknown
  TnpB Polypeptide
MLEDAQQSYQETKKFSYPTPASYKAEHPYLRMVDSMALCNVQQNLRTAFSRFFADRKKPKKRRKAGLPRWKAKKQFKKSYTTTCTHAKPQIRIQQGKLRLPKLGLLTVVFHRRVVGKIKSATVSQTAAGQYFVSILTEQPDVQITSSIDTNKTVGIDMSFHDIAVYSNGARLKHPRWYRSVERRLARAQRKLNRRTFGSSGYERQKVRVAKIHERISNQRRDYLHKESRRLVDKFDVIVVEDINLAGMARRGRRRRFGKSIHDMSFGMFREQLRYKAEWAGKLFCKADRFYPSTQLCCLCQERNITLRGNLSIRSWTCVACGAHHDRDVNAARNLVVWYHDNNTGASPGIYADGDLATTGSLAVTGKLDRGSRKSRKTRFCEPSPLGWGR

SEQ ID NO: 32691 - protein, 399 aa, unknown
  TnpB Polypeptide
VKIYRAHKIELRPNKQQTSYFVNACGVARFAYNWGLGEWKQQHALGEKPSASKLSKQFNQIKRQEFPFVLDVAKTIAARAFRDLGHAFSNFFRSLKTGQHFGYPRFKRRGKHDSFYLANDRIKLDGKRIRVSKLGWVRMTEPLRLQGKIMSAVISRTADKWFCSIRIEIEITDIVAEGPTVGVDVGIKELATVSDGRTFENSRAFRQGKRQLRRLDKAVSRKKPGSQNYRKAIRRLQRQYYRITCVRLDAIHKATTAITKGAGRIVIENLNIKGMMRNHCIAGALQDASLAEVHRQPQYKAEQLGIEVIIADRFYPSSKTCSGCGAVKTTLTLKERQYKCSRCGLEIDRDLNAAINLKQVAEGSSATACRLGSSGLAAGQLNETTDWAGTPHNAAAQQP

SEQ ID NO: 32692 - protein, 384 aa, Vulcanisaeta sp.
MAAGGEGVLTFTVRIRVSPEPAVIDLLKRYRTALNMAIRVLIANNATSISKAHALLYDWLKSTFNLPSRIAMDCYREALSIVKSWLRNPNKGKIPTVKTLRMWLTPNQGYRVNGDYVELIGGYRLRIIGRDPRYADAPNREARLVYRDGEMYLFITRQVPKPAKYEPKGVLAVDFNEHKIVFGNFKSHIEVPTPIRRALHYRRLAEELQRKYSKSNYLQWLRNGRILNRVRHFHRRARSIIEDWARRTAVRVVKHALVSNVLIVREDLNGLINALRRLPKSHRRNLIMLGYRRLAYWIDWEAMKHGVPVKAVNPRGSSTTCPICGGKLIKAGYRRLKCPACGFEGDRDVIAVMNLSKMGGALPTPTARPMTNDTTSEGGNRTAQ

SEQ ID NO: 32693 - protein, 367 aa, unknown
  TnpB Polypeptide
MNALRMVTFKLRLFEADRRSLLETMKAFTKAFSESDRWGFKNKSWNKIDNHNATYKLVRQSIPDLPSSLVQGARDCACEALKAMKCKTLPERKPLAAMRYNQRVITVNLVHGIATIASTKGRIKAAFFIPRNYRDYLTWKIKSSTISYDQRAETFYLHVSLEHNDPDPTTDLQVLGIDRGIVNIAVCSDNKFYNSKKVKNTRSKFAYLRKELQSKGTKSAKRKLRRLSGKEKRFVTDVNHCISKQIANSDFTVFALEDLSKIRVQKRRGKQFSRKLNSWSFNQFEKFLQYKAEALGKHLLLVDARYTSQKCSKCEHVYKGNRDGPAFRCRKCGFELHADLNASRNIAQAGIACLSRLPCQPAEFSPA

SEQ ID NO: 32694 - protein, 451 aa, Hydrocoleum sp.
MYGCQQELIKNPESIPFLEYLCTTANKLINCGIYLARQWYFKLGYITGKHDLEKELKSNHNYQFLHSQAAQQTLRGVTESFKSYKKVSYKHYLGELENKPQLPKYRKKGGLGVITYPKQALKLKNGTVKVPLGRKVKAVFKIDSFFLDFPSNLKFKKIREIRILPRNGCFYVEWVYQLEVEKSQLDKDQVLGVDHGVDNWLTCVSNIGTSFIIDGKHLKSKNQWYNKQVATIKENKPQGFWSKKLANITEKRNRQMRDAVNKAARLIINRCVRYGIGRIVFGWNKRQKDGIHIGAKNNQKFVQIPTAKLKDRISQLCELHGIEFIETEESYTSQASFLDDDFLPKIGEKPDKWKPSGKRIKPGVYQTKNGLLVNADVNGAANILKKVATTLEFSLEGVSSGTLIMPSRIQCMDCLRIPRASAGGVSNLNQITINFLCKVKYRVLLLCIIEN

SEQ ID NO: 32695 - protein, 424 aa, Cyanobacteria sp.
MLVFECKLKGKTEQFNRIDEAIRTGQFIRNSCLKYWQENKETTKNDLQKYCAVLAANPDFSWAKKLNSQARQAHADRAWFAISRFCALNAPRFANDNGKNKVPGKKGYPKFKKNSHSVEYKTTGWKLSEERKRLTLTDGFNAGTFKLKGSRNLHFYQLKQIKRIRIIKRADGYYAQFLIDVERSEEQCYTGTQVGLDVGLASFYTDSNGNKVDNPRYLRKSERQLNHLVIRLSRRYQNPNKGKKGEKMSKTKIKQSKRFHKARIQVARQHLDISRQRKDFVVKTARCVIQSNDLVAYEDLKVRNMVKNRKLAKSISDASWSSFREWLEYFAKVFNKVVIAVPPHYTSQNCSCCGEVVKKSLSVRTHSCPSCKTVLDRDENAALNILMKALEVLGINTVGHTGINAQGQTNPCLVGENLLGKLTG

SEQ ID NO: 32696 - protein, 232 aa, Thaumarchaeota sp.
MLFKGGSVLSEFKKITKQISIEEKRLSRHGLKTSRKLEMLYKKRALLLKNAREGLAKEIVERLYDKGVGEIKIGYPKGIARDKGNERNTNFWSYSAIINRIKDVAQEYGIKVKLVDEENTSKCSLCGEIHENGRIERGLFKCPHTGKIINADLNGAINILHIPEPFKNMVKWLKAQPVVYCWTSEAGWVTASYGVMKMKAVNHKPMIRLKGKTSLLRRGGCQIDLFRHYAII

SEQ ID NO: 32697 - protein, 420 aa, Lyngbya sp.
MMILTYVYRIKPNTEQVATMERWLELLRRHWNYALGQRLDCLNRTRCQIDRCSIVSEPIGEIPQTVNYYSQQAALKETKRLFPEYVQIYAETQQVNLQRLNKAWDKWRKPDKTGKRGGRPRFKKQGQLRSFVFPRVNKSRAGAHIKDGVLKLSRIGEISVVMHRPIPDGFTLKQCTIIKKADGWYCCRSMLDDSVPELLPVDELKSAVGIDVGLEKFLTTSDGEAVAIPQFYRKAADRLAQTQRAMSRRVKGSKNWEKAKQKVALLHLHLTRCRKEFHYQVAHWLCSKYDLIAHEDLNIKGLARTKLAKSIHDAAWGSFLEILQAVAVKRGLLIEKVNPRGTSIECFNCGSRVEKSLSDRVHHCSSCGVAIDRDWNSGINILNRALLAVGLPLNGCDQSIIDIEDQQVSFVSLGSPHHNL

SEQ ID NO: 32698 - protein, 517 aa, unknown
  TnpB Polypeptide
MAKKGKYRTFLISMPQELIPIYDFVQKKLNQFLSDPVFRSKLLALDFSRHRGNIWRDIRDIVGKEELTSWKEYIPNPVWYFYMLCDDLLRIVKSKDDAIVCFNALKENGNKINQELFELLNDQGIYPTVGFLRNLKRSDEPPTIARKATFVMDYSISAEQNCKRIADNIFGFNYKSGKYLTYEVVLPLSVRKNLTGVIAKPRFIKRKSDGRYIGHCSYEVETESTAKGKNVLGVDLGKKKLFSSIVLHSDGDYSDEIVSSRLSHRIDEKLKRKLKDLERLSEKNKTLEGLINGDINLFNSHLEEIRQNRVSQIMELRGNISNTKRYVAKLIASEIVSIAKENGCKEIHVENLSWLESKGGRWNHAEVQDFITEFAELEGIKIIKIYTKYTSSAHPVTGELGKKRNRNIQFQNGDVIDRDLLASINIAKRNKRNQKENKVTKLRKHHTSTPKKVKKPSNRKVSLAIRQKLLTNQRGTEIVVLYPRKTGNRTWEVLNIMSKPHKLSLMSRLSHQCQFVT

SEQ ID NO: 32699 - protein, 382 aa, Caldivirga sp.
MQKSNEAWNAFFSLLKLRREGKLPPHMRRVSPPGYWKDRESKKRKLLLVVRQDRYIVDVESKVLILKDFNLEIKFVGRLRWFGRQGRLEMHYDDARNAWYACIPVEVGVEEAKTGRRSRHIVKGERGVIQIKSPKGNKAASIDLGINNLASVVVDDGTWLLYKGIGAKEDYFYLQRLISRIQSLRDTLKDKLLSDAIEELNHEMRRLYGKLARRLLHLYRNFASHLLKQLHELGVSTIYLGYPFNIAQQKGNKFTVNMWSYRKLMEAIELKAQEYGIRVFEVVEYNTSKHCAYHNVEVKRQPRGVVSCPKGHKLHSDLNGALNIMKKATGWIPLVIKKPLSFIVEHNRVAPIKRGNPQDLREPPPLRAGGGQIGCSWHLLDY

SEQ ID NO: 32700 - protein, 395 aa, Richelia sp.
LVDVKQVLTLVVKLQLRSEQQQLIAATATGFASACNSINRTVNPKLTNRNSIQAVCYHEIKKESGLTANHVVRACARVAANRLTAKQKGKEVKSFKPTSFDCDARTFQFFEEDWTISISTTGKRVRCPIRASNYHKGKLSGQTPTSAQICQHRDGEWYAHIQIKNHVPSPTKTKNVIGVDLGRREIAKTSTNKGWDGKAINQIRDKYSRARSSLQKKATQGTRTTRRRCRNILKRLSGRERRFQQWLNHNISKQIVAEAKATKSIIAIEDLTGIRDRSNSKQRSKTERRRSNSWAFYQLRTFLKYKGIKEGVEVVAIPPAYTSQTCHCCLHIGLRTNKQFKCINKSCGWLGDADFNGAKMIELWGCSVSQPRGSELLSCTIEPGLLKAPSVLASL

SEQ ID NO: 32701 - protein, 388 aa, unknown
  TnpB Polypeptide
MRKTFKYRIYPTGRQTRLLEKQLEECRWLYNETLAMRKNAWEQEGRHVSYYDTKKCIPILKEQRLTLKEVHSQVLQNVTERVELAFQAFFRRVKAGEKPGYPRFKGYGRYDSMTFTQISTGGCSIGPDGKLVVSKVGHIKLVLHRPLPQACTLKTATLTRASTGKWYVCLVVETEPVRLPKLETSVGIDVGLKTFATLSDGQEIENPRFFRKEEKALAKVQRKLSKTTKPEKGQPASKERKKARKVVARVHERIGFERTNFSHQHSRKVVNQFGHIFVEDLNVNRMVHNHCLAKSISDAAWTNFFGMIAAKAEEAGRLFVKVNPAYTSQDCSRCGHRQKMPLSQRVFNCPDCLLHIDRDLNASLNILRVGLDSLGNQSVEAPAFTRGE

SEQ ID NO: 32702 - protein, 335 aa, unknown
  TnpB Polypeptide
MVSKSIGYYDQQNQLPAIKEVRPDLEAVHSQVLQDVLKRVDKAFKGFFSRVNRGVKAGFPRFQGRNRYDSFTFPQGGWSLKNDRLTLSKLGTFKMKLHREVLGKVKTATIKREGLGWYVVFSVEYEFEPPLQHDGPAIGIDVGLEHLANLSNGEQVDNPRFFRKSEKHLAKVQRKLARLRTKPRTDPTKIKAKRSVTRAFRKVRNQRLDFAHKLSHSLVTQYSLIAVEDLNIKGLAASMLAKSVNDAGWSTFITMLEYKAASAGSLVVKVDPRQTSQTCPNCGTIAKKDLSVRWHSCPCGAQMHRDTAAALVILSLGLATVRNQSVDALAFTPGE

SEQ ID NO: 32703 - protein, 376 aa, unknown
  TnpB Polypeptide
VFRTIKVALPFEQSLLQTAVAFNRACQTVLDYGSEHKVYNKNVLNKATYPQVRREMPNLPSALVQTARDEASEMLLRTDFAKIIRKRLSVRYDNRCFKFYPDSNRVSLTTVMGRLTFPFKHYNYMDTWKGEYTNAQLVIRRNKIFLNVQVKLPDVAIKAVGEVLGIDRGILNIAACSDNTFFSSKRLRAVKGRYQFLKRRLQHVGTRSAHRKLQRLSGRERRFVLDTNHCISKAIANKPFDVFALEKLVVNKKKKNGKRFNRKLGSWSYAELQLFIKYKAEAKGKCVVLVNPKYTSQRCSKCGFVHKQNRSGLGFRCGNCGFSLNADLNASRNIGVLGKSEHLRLFVNEPIVASNEASPAGIVDGSYKPMSLFIGS

SEQ ID NO: 32704 - protein, 334 aa, unknown
  TnpB Polypeptide
MSNLTKTIKLRIYVTPEQEILFRQMTEQYRLACNFVSQYIFDHQFDLAYQNLNKELYSNLRHLFGLKSQLAQSSIKTTIAKYKTVKQQLFQNPYRYKDENNDWQRIPKTLEWLWKPIFFSRPQADLVRNRDYSFVNDGQTLSINTLDWRTKCPFESKHFAEYLNGSYKLGTAKLVKLKGWWYLHIPVTKTVEDFQKVNVRHVVGIDRGLRFLTVSYDEQGKTEFVSGKKIATKRHKFQELRKQLQSKGTKSAKRKLKAISGRENRWMSDVNHQISKTLVQKYGKDTLFVLEDLAGVSFEERNLSKTTKQNYDLRSWAFYQLEQFFNLQSSRKPI

SEQ ID NO: 32705 - protein, 465 aa, Acidimicrobiaceae sp.
VASRPTTPTFSHTGQVLARAVTFQFALDPNVQQNVLLAKCAGARRFTVNHHRARVKTNLDARSDEREAHSESGESPEPSTPSLSWSAFSFINEFNAWKNGEADDSPLNEDGSCGLVWRHELPHDVFECASVDAARALENFFASRRGERSGTPVGFPRFQAKGKVTPSFRLRNRATPGKAPSSQPIRFTDPSHLRLSKFGPVKVFGSSRKVRRMIDGGRFHVYSATLTQRAGRWTVSLTGVAAELHQAERSRSNRHAVPVGVDRGIISLCVAADANGVPFESFEGVKTLKQAHASLKAANQALARTTPGSKGRQRAKSRLATRHRKVANTRRHLVHLASKALVDRCQVLAIEDLNVAGMVRNRRLARSISDAAMGELFRQILYKARWHGVEVRVVDRFFPSSKTCSGCGEIRNDLDLSTRTYVCGACGLAIDRDLNAAINLARWRPKEPSAVTLLALTPALLLSTA

SEQ ID NO: 32706 - protein, 435 aa, unknown
  TnpB Polypeptide
VVEPLFEKLKKNHLQGKRLKELKRKWKEKRQGTLISIGAKHITHKGNLNLRFISAENSKNNLWLRIALKDRKFILARVKRDLSGKSDKWALFLAKILSGEQFPYTVELKLKDSQIYGFVRFSLGVPPQTITKAKGVIGIDVNARPFHLALAEVSPDGNLQSYKSIYLSHLLKYKSRNRKEYEEWLIAHEVVRFAKEKGKAIAIEYIKKLPKGRRGDGKAKLRKILQFFSYMRILKKIESLAIKEGIEVVKVNPAFTSVIGMMKYCPQYFIDKDVAGAYVIGRKALGFQEEIPENYKKLLKSQIYIQYALWRLGKMEEELRNKLNQEKNKYKANGIKRDLRRLKREKKFLERFLMETNKSSQSEPETQKQVDRRKEPVRGEKSSQKLWRVLRVAFAMPLLGGFFVRDFSPLRPVMVQGKWEGVASRLGPDGFAGPP

SEQ ID NO: 32707 - protein, 380 aa, unknown
  TnpB Polypeptide
MFRAYKYRLYPSELQKELIAKHIGSSRFVYNLALETKTTAYLGSKHNFSPFDLIKQLPELKKECEWLKEVNSQSLQQSIQNMDIAFKKFFKGAGFPKFKSKRDRQSFSIPQNVIVENNLLIIPKFKEGIDIVLHRPIKGTIKSATISVTPTGKYFVSILCDTKKDIPIKAPIEENTTIGIDLGIKDFAITSDGEVFENPKYLRKAQSKLKYAQRKYSKHKGKRTKKKLAKLYEDVVNKRKDFLHKTSTKLIRENQTICLETLAVKNMVKNHNLAQAINDVSWSTFVSMLEYKADWYGKNVLRIGRFAPSSKTCSNCGNINKELTLKDREWTCGSCSTVLDRDVNAAINIKNFALKNILSGTDRKNQGKLPTLVGALTLEA

SEQ ID NO: 32708 - protein, 482 aa, Micromonospora sp.
MVLGLVMPRRRDPAAPRVVYRTARVALRVTPGQRRRCFGLLRSAGDVWACVLEVNAWRRRRRDAPLSGYQELCRELAASGPGTFAELDSAGARSVLRRFSDAWFAAAKRRKDGDVSAGFPRRRRGLVPVRWHHGTFVLDGRRVRIPVGRGAAPLWVRLAREVPYPLEQVRSITLLCEGGRLFLDLSAEIPIATYPVGAGPDPGRVAGVDLGIIHPYAVTGPDGAGLLVSGRAIHAEHRMHLADTKARRRAVARRAPKPGQRGSRRWRKYRRRARMVEGRHRRRVRQAQHEAARSVVSWAVEQRIGELRVGDPRGVLDIEAGRRHNLRLRQWQVGRLLQVLTDKATLSGITLCLVNERGTSSTCPACQRRVPKPRGRTLSCPHCRFSGHRDLVAAATIATRSPGGGPTTPTAVVLSEVLTHRRAGRHLPGAGQSRRDPRRPRAARGSVGPRWPAPPLGGESLAHKARIHNDHRTPGERSWTPH

SEQ ID NO: 32709 - protein, 383 aa, unknown
  TnpB Polypeptide
MCMYKAYKFRLYPNHIQKKLINKMFGCTRFVYNYYLEKMKKEGYTYACDNIKDYISNLKYKSAFLQEIDSIVIRKSIFNLDLAYQKMYKEGKGIPVFKSRFGKNSYNTDAIYNTYKDKQYCNIELDLIKRQVKLPKLKWVKIRGYRNKTKIQGKIKSATISRDVNGKYYVSLLYEIPDVEALSKPKSIVGLDLGVKKLITLSNGISYNNNKYILKYEKRIKRKQRELSRKEKNSNNYYKCKRELARLYTKLKNARKYYIHKITKEITDIYDIIVTETLHSKKMIIKGKKNNLSKSISDASFDEIIRQLLYKCKYKGKQFYKANEYYASSRICSLCGNRDDEYKDLNKREYKCNSCGLRMDRDLNASINIMNEGISMYMKELRV

SEQ ID NO: 32710 - protein, 374 aa, unknown
  TnpB Polypeptide
MKTLKFKLYQHQRNRYLKRIINVSGIIWNRCIALHKRYYRMYGKHLNCAKLQAHIAKRRKRIAFWQQVGSQSVQDICQRIEKAYQLFFKHHKKGVRPPSFQKVKKYKSFTLKQAGYKFLGGNRIQIGKRVYQFWNSRPIEGKVKTVTIKRTPLGELFMAVVVDTEPVPQVKIETSKIAGFDFGLKTFLTCSEGFSIESPEFFKQSLNAVKKANRELSRKVKGSHNREQARLNLARKHEDVANRRSDWFWKLAHKLTDQFDVLCFETLNLKGMQRLWGRKISDIAFGSFLQILEWVAKKKGKLVVYVDRWYPSSKTCSHCGHVLESLDLSTRWWRCPECHTGHDRDENASLNIKMVGTSTIKLGDVRQALPAIAV

SEQ ID NO: 32711 - protein, 392 aa, Fusobacterium sp.
MDKGLNNFEGGGLMKQLKAYKFRIYPSDEQKIFFGKTFGCVRLVYNLMLNDRMKAYEESKGNPDKKLKYPTPAKYKKEYEFLKEVDSLALANAQMNLEKAYKNFFRDKSVAFPRFKSKKNPVQSYTTNNQNGTVTIFENWLKLPKLKELVKIKVHRKIKGIVKSATISRNGSGKYFISLLCETDIQEMSKTNSAVGIDLGIKDMAIFSTGEKIENLKFRKQLENKLKREQRKLSKRFFVAKKENRKLSESKNYQKQRIKVAKIHEKIMNMRTDFLNKLSTYIIKNHDIICMEDLNTKGLLHNHKLAKTIADVSWANFVNKLEYKAKWYGKEIIKIDRLYPSSQICSVCGHRDGKKTLDVREWTCPICHAHHDRDINASKNILAEGLRMRQAV

SEQ ID NO: 32712 - protein, 329 aa, unknown
  TnpB Polypeptide
MEQTLTAKVRLYPTAEQAEMFKAVTKEYQRLCNIVSQWVFDQRFKVNQKKFQKEMYHPLRAESPDLNSLMVQSTYRTVEARYKTVRTQLSQHPYRYNTGKKNKDGKEIWKSVDRTLEWLWKPIHFKRPQADYVRNSNYSFVKRGTLLSINVLGQRIKVPFKADYLQKWFKLDAHLGTAKLVCLKGHWFLHIPVTFDTDDWQIADNQHIVGIDRGLRQVMTVYDEQDKTKFFPGRAIAYKRKKFAYLRAKLQSAGTKSAKRHLKKMAQRENRWMADVNHCLSKTLVNHYGENTLFVLEDLTNVSFDEKNQSTRDRNRDLHLGLSMTCRLN

SEQ ID NO: 32713 - protein, 522 aa, unknown
  TnpB Polypeptide
VKYYDTVTRHRFTSEDGVDSEQMSADLAQMVTWMAQAEREVLASTEFHDLALKALKGDRPYGALTSWGRKKLSRYNFSFQKHNMNEMLVSNVVSVLEAYAVSFGLFQVMSTHSKETKPERILFHYRKTYPDAPQPTSGMVRAHLIRFHKKGEKKASLPGVSAKLNLAVCDMNFAPKAAREDNDPLSIIVQVKTPSYGLTKIYLRLPENTERFGIGKVCRPTIRLNNKGQIVFDIAIEHEAEQRDTSKIAGVDLGKIEPFVATVINPTTKHRSAPYHTNYKRRLGSLVKAEKKRRDLSAHLHKRANLCEKYNRDQHAQILRTEAKRVSAKATRIKHEISQCIASQIVEIADRNDAHVSLENLSWLDAQGVRWPHAEIQSRIENTAKRYGLKVVKVSAKDTSRTCSHCGSKTSNNTKTRVGTCIVCGFSLNRDVSASREIALRATSNTRNRERMRSLLRQRQEMRSSAATRQSKPVTVLSGNQVHTGTSERKSEATLMVVRDNLDSRGSPTQSASGHLLETLLE

SEQ ID NO: 32714 - protein, 457 aa, unknown
  TnpB Polypeptide
MQTIKLKYTCEQNTLDLILEYQKQYSNCLHYNYNRLQDNKLLSEKDLRNNSNNINNCELIKSYLMQCSIKEAKQLVFDSNKPIIFGGKKLFFKRLKNQISKEDYKIKKLNPVYIIGEKLKHGNRLIQIDKKLNTLHIKFSKENHFDLNLSNIRNRLDILKRLYYCQVNNLIPITYKIDFEHIYISFNESVLKVNDYMPIKNRIMALDLNPNHIGWSILDWKSSSEFNIVKTGIYSIKNLNDKDFDLKNKGFASDSRQRTYISNKRNHEVLQISKNLIDIARYYKCEIFSIEDLNIKSSDKDKGTRFNRLCNNLWCRTKLVNNLNKRCNIFGIKFLKVKANYSSFIGNFLFKDLNMPDMVLASIEISRRAYEFNAQYIVKTNNIKKNIIQPRISDFKDLVSKSLEEFKINEKFENLIDIYYFFKNSKLKYRVSLDDLHLKFYRFFSFNSKIKRTFYYI

SEQ ID NO: 32715 - protein, 231 aa, Succinivibrio sp.
VKLKGLWYLHIPVTREKEDFKKENVKHIVGIDRGLRFLTVSYDEEGKTEFISGKKIATKRNKFLELRRELQAKGTKSARRRLKAISGRENRWMSDVNHQISKTLVRKYGKDTLFILEDLTGVSFDERNLSRTAKQRYDLRSWSFYQLEQFLKYKAQETGSEVLRVSAKYTSQRCPVCGRIHKQSRDHNRHLYSCPCGYKSNDDRVGAMNIQNLGKRWLSGEKNPRYKKDNN

SEQ ID NO: 32716 - protein, 426 aa, Succinivibrio sp.
MTDTNLAKLAFKFKLEPNGEQRRFFSRTAGCTRFVYNHLLFKCREDFREYLEEIDSRQSNGEALNRDEAKKLSFRPLCYKCITGLNYLLPDLRKEYPFLQECPAQALQQKAQDLMRAYHRFFDGKGGLPRFKKKALHNSFRFPQGFELDEDRKKIWLPKIGWVKYRKSRNIFGKPKNVTVSLNHGDWYISVQTEFELNPLIQELNLNTAVGIDMGVVRFATLSDENYIPSLKDRLNPVYEKIEKLQRRLSRKKKDSKRYIKLRIKLSKLHKKLTDIRYDYLQKESTRLVKNHDIICVEDLKVKNMTKSAKGTIEEPGRNVKQKSGLNREILKESWSMFFKQLEYKLKLKGGIFVQIPAKNTSRACHVCGYVDKENRKTQAEFKCIHCGHTENADVNAAKNIKRAGLAKIARQVNCNSSQQREAIEA

SEQ ID NO: 32717 - protein, 213 aa, Succinivibrio sp.
MGVVRFATLSDENYIPSLKDRLNPVYEKIEKLQRRLSRKKKDSKRYIKLRIKLSKLHKKLTDIRYDYLQKESTRLVKNHDIICVEDLKVKNMIKSAKGTIEEPGRNVKQKSGLNREILKESWSMFFKQLEYKLKLKGGIFVQIPAKNTSRACHVCGYVDKENRKTQAEFKCIHCGHTENADVNAAKNIKRAGLAQIARQVNCNSSQQREAIEA

SEQ ID NO: 32718 - protein, 369 aa, Succinivibrio sp.
MNKGVIFRAYPTKEQAELISKTLGCSRLIYNKGLAYRNESYKKGEKVGYNQTSAMLTAMKTEEKYSFLNEVDSIALQQSLRDLDSAFTRFFNKKSKYPVFKSKHHYQLSYRTVNQKNKKQKNYSIRIEGNRIRLPKLGFLKFKQTMEVGHINNVTVRRTATGKYFVILNVDFEPEKLESSSNFTGIDVGIKTFYKDSNGNVVNNPKYLEKSQKKLKREQRKLSRKKKNSKNRQKQRLKVARVHEKIANQRNDFIHKITTKLINENQVIAVEDLNIKGMLKNHKLAKSISSVSWSKFFDTLEYKAEWYGRKVIKVPTMYPSSQTCSKCGYKNPLVKNLSVRVWECPCCHARHDRDLNASVNILNKGLSVA

SEQ ID NO: 32719 - protein, 421 aa, Succinivibrio sp.
LEKTVLIFTKTLKIRINVPSEQETLLRQMTEQYRQACNFISEYVFTHSFDLNFFSLNKVLYRNIRGKFRLKSQLAQSSIKTVIARYNTVKEQLLEHPYRYKDEKGEWQSIPKTLEWLFKPVYFSRPQTDLVRNRDYSFVENGSLLSINTLGERIKCTYEREHFKEYFDGSWRFGTAKLVELNGLWYLHIPVTREKEDFKKENVKHIVGIDRGLRFLSVSYDEEGKTEFISGKKIATKRNKFLELRRQLQAKGTKSARRRLKAISGRENRWMSDVNHQISKTLVRKYGKDTLFVLEDLTGVSFDERNLSRTAKLYRELAQVKRFSQRYDLRSWSFYQLEQFLKYKAQETGSEVLRVSAKYTSQRCPVCGRIHKQSRDHNRHLYSCPCGYKSNDDRVGAMNIQNLGKRWLSGEKNPRYKKDNN

SEQ ID NO: 32720 - protein, 429 aa, Succinivibrio sp.
MNINWKQAYKYRLRPNGAQQRRLLQLCGSARYAWNEVLEGRNEEYKEYLEDIESAKCWGEDVSLVPKPRPINRFSFTYDLNKLMTEEENSFLKTQGHSQVLQQKMQDLYSAFSRFVKGKGGYPQFKTKNGYNSIRFPQGINLDEKNKRIFLPKTGFVRYRKSRDIEGDIKNVTVSFFSGEWYVSIQTQKEIEVPEINLKTMLETEADNALGIDMGAVRFCTFSDGRYEESLKSNELTRLDEKIAIVQRQLKNKKKGSNRRLRLIKRISRLHQKKANIRNDSHQKLSTLICNSHAIVVAEELKIKNMTKSAKGSLLNPGKNVKAKSGLNRSILSEGWGQFFKMLEYKQKKRGHIFLQLNPKNTSRTCPKCGHVSKDNRRTQAHFCCTNCGYTANADENAAGNILRAGLARLAQEVNSKRSQHCDPSEAEQ

SEQ ID NO: 32721 - protein, 407 aa, Cyanobacteria sp.
MRTAYQYRLRLTTGQQATIDEWLELCRRQYNYRLGERFDWWEQNRCDVNACPLICYLPELKDKPDFYSQKRDLVNSKQLFPEYKDLPSHTLQDVISRVDQTFERWLKGDSTGKRSGKPRFKGQGRYRSLSFPDPVKPEHIDGKFIQLPKLGQLKLILHRPIPSGFKIKTATITKKADGYYVTLSLQDVSVPVLMPELPVMANTIGIDVGLKSFLVTDDGEAVDIPQPYRKAEKNLKRRQRSLSRKKKGSNRRRKAIKRVAKAHLKVANQRKDFHYKTAKKLLNKGKHIGHEALNIKGIARSRMAKSTQDAGWGQFLQILSIKAERAGLLTIAVNPNGTSQDCSTCGHKVPKKIQDRWHSCPNCGCELNRDHNAAINIKHRAVGHSVLKAQATPDGIPGVTEKPALYA

SEQ ID NO: 32722 - protein, 384 aa, unknown
  TnpB Polypeptide
MVGMEKAFECRLYPNRRQVQLLARFFGCVRWVYNFFLRMCIDASKKTGKKPSCFDCIKMLPNLKGQEDTAWLAEADSNALQQAIIDLDRAFDNFFKRKSQGVGYPKFKKKKMARKSYRTTKARIIDDSHVFIPKLGVVKARITRPVEGRITSATIKQVPSGKYFIVFTCVDIPEPPQVKTGKAIGIDLGIKSLVTTSDGEKINGVAGTRKLDKKLAREQRKLSRKKKGSNNRKKQKIKVAKVHEKIANKRKDHLHKVTAKLISENQVVCAETLDVSGMLKNRYIAKKLANQSFATILGFLEYKAKLNGKTFVQVGKEFASSKTCHSCGVKMNAMPLNIRSWQCGNCGAKHDRDINAAKNILAEGIRILNGTEGHSGTAAITVAA

SEQ ID NO: 32723 - protein, 389 aa, unknown
  TnpB Polypeptide
MNKTYKFRINPTAKQAKILEHILEICRVLYNSCLLDRKRNYEETGKSLTRIQQQKILTSDKKRIGFLNDIHSQVLQNVLFRVERAFQNFFRRVKAGEKPGYPRLKSEGRYDSITYPQEPAFQIMEHGLKLSKIGTVKMKLHRPIIGIIKTCTIKREIDRWYACLSVEYEAVKKPVHGKFVGIDVGIKSFATLSDGAVINNPKYLRKSEKKLKAKQGQLSKKIKGSGNRRRARTIVAKLHRKIRNQRSDFLHKESRKIVNTCGFIAAEDLDIKGMVRNHCLAKSISDAGWGQFLGFLEYKAEEAGVQFEKVAPHYTSINCSHCGNPVPKTLKDRIHFCIACGTILNRDHNAAINILKKSTVGTYGKLRLGRQLMSDAAREPGSPIQSSIG

SEQ ID NO: 32724 - protein, 343 aa, Frankia sp.
LTEARREFNWLAKGSIIVQQQALRDFSTAMANFFRGSHRKPSFRKRGRGEGFRIVAVKPGDVRHVNRRWSQVRVPKVGWVRFRRTRPVPDAKSFRVTRDRAGRWHVAFTVAPEPIEASGTGEVVGVDRGVAVSAALSTGELLICPGLRLKEAERLLRLQRRLARAKRGSNRRGRLKAQIARLRAREGDRRKDWVEKTSTDLARRFDVIRVEDLKIGQMTRSARGTVDTPGTNVRAKAGLNRGILAGGWGLLVQRLEQKALGRVEKIPAAYTSQRCSSCGQVAAASRESQSRFVCVACGHESNADTNAARNIAAGRAVTARGGMALAVPVNREPQRTAPPLAGV

SEQ ID NO: 32725 - protein, 424 aa, Paraliobacillus sp.
MYGVQKQQLRNLTKKEYLATKTMCHLAKNMANVGLYNVRQYFFKEKKYLNYYENNKISKSNENYKLLNAGVAQQILMKVDENFKSFFALRKIGAKAHIPNYLPKDSHFELTFPQIKIQKDGSFFLPMSPAFKREYGKVNIKLPSNLVDKKIKEVRLSPRYDGRFFSIEYVYQVEEVKPKLLKKNMMSIDLGIDNFASVLTTTGASYLLDGKIIKSVNQWYNKRNSQLQAIKDKHGLKVLSRKQMSLIDYRNHYINDYMNKVVHFLVNNCLKNKIGRVIVGYNKGWKKESNIGKVNNQKFTSIPHGKFVKKLKAMCERFGIAFYEQEESYTSKASFLDKDVVPIYGKGEKTKQKFSGKRVRRGLYRSADGTFVNADINGAANILKKSGFRYNFKKMCEIVKQNPTKIRISETRTPKANTDLRASA

SEQ ID NO: 32726 - protein, 403 aa, unknown
  TnpB Polypeptide
MLKAFKYRLYPTKAQADKINQNIGCARLVYNLMLDAKTKHYKQYKQYKETLYVTPAKFKNDYPFLKDADSLALANAQLNLEQAYRNFFKNPEHFGFPQFKSKKHSRLSYKTNNQNGSIRFDGNRLKLPKIGYVKIIEHRQHEGEIKSVVVSHERSGEYYASVLCEVKEPEKLPETDKHVGIDLGLHDFIVCSDGKRVEAPKHFRKAEEKLAKRQRSFAKTVKDSKNHEKMRIKVARCHQKIKNQRKDFLQKLSTRLIRENQVICLEDLSVKGMEANHCIAKSVADASFSRFVNMLEYKAEWYGRTIVKIGRFYPSTQICSGCGFQNKSIRGIKSLKVREWVCPCCGEVHDRDLNASRNIDRKGLRILNRRDDGDSSLTVHQTAERVLVCDELAREATQSSCAW

SEQ ID NO: 32727 - protein, 346 aa, unknown
  TnpB Polypeptide
LNNWFGASRFAYNKAVAFLKQPNTKAQWKSIKTPLLHEMPEWSKEVPYQIKSVAIRDCCHAVSNAKKKFKQTGKFNEVRFRSKKRGDNNLFIPQSAVSKDGVYYTILGKLKTAEPLWKPNHDCRMFLENGRYFVSIPKDIFVKRPENQRLSACALDCGVRTFQTVFSKELILKVGEHDFQRIFRYCYALDKLVSRKKKEKSNKFNKAMHRIRWRVHDLIDEIHNKLALTLCRMFDVIYIPIFETRYMVSKLKHKTSRAMLGWAHYRFKKKLKSKAEEYSCKVIDCTEEYTSKTCGNCGEISSIGGKEVWTCKHCGCVHDRDINGARNILLKQLFLALRDPSTPCLV

SEQ ID NO: 32728 - protein, 423 aa, unknown
  TnpB Polypeptide
MSKIVVTAKVQIHPERSVRKILDRSMVQYSIACDRIAAYCFENKCLKRETIHNDLYDELRDKFGLKSQMACSAIITVIAKYKTILAEEHQWIQPKFRKPQLDLVWNRDYSLVQGVFSVNTLDGRIKAPFDIKGMEQYFDKDRFKFGTARLVCSKRKYYLHIPVTSEVEDCEVSEIYNVVGIDRGINFLAVSYDSKGKSTFFNGGKVKHKREQYKELRTELQKRGTSSSRRRLKKIGQRENRWMNDVNHCVSKALITSNPSKTLFVLENLKGIRGATEKVKRKDRYVSVSWSYYDLEQKLKYKAQRNSCLVINADPRYTSQCCPKCGHIEKSNRDKKLHCFCCKNCGYRSNDDRIGAMNLFNLGLNWIKEQTECSESISLQTGVQSITPRCNDSQHSEKKVGKKRSRASKTRSRATGQLQANRL

SEQ ID NO: 32729 - protein, 481 aa, unknown
  TnpB Polypeptide
MCKQDVKRYYQWGGTEQMDMRINTCYVVKIQSQLDAEPDKKTGSLVVSGKHQVDDRLMRQTADVCLEALKFCVSVIQDEWDAIMATESKTRKRLVDVLIHKTKTDKPKYPEFDLRFPNLPAYTRRAIIADALGMVRSYKSNHENWEQTLPAERGAEPTLGLPSRYELTFYDQERKMSSLADGQIGLKLYNGHTWSWYYFQISRSDAKCIHGLSQTRKMLSPVVDKVRGRYRIRFAFSESKALVSDENRLAYRILAVDLGINAAASWCIMTSDGTVHDKGVIHLDCEEGRLNHMINRKRMYQQAGKKSRCVYRWVKEANRQLSIATAKALMNVAVRYSVDCIVFEHLDSKGKVRGRKYRERIHMWRKNDVQNRVTLQAHRYGMRISRVCAWGTSKYAYDGSGQVDRHSIYHYEHGRKVYNYSLCTFQNGKIYNCDLSAAQNIGARFFLREYVHAGIEGLPATPQRTLSTLWSVVSNGLPVAA

SEQ ID NO: 32730 - protein, 384 aa, Actinomadura sp.
MRLRYQYRVYPTPGQREALAKAFGCARVVFNDGLRAREDARAAGLPYLSDGDLSKLVITEAKKTPGRVWLGEVSAVVLQQALADLNTAYRNFFASVAGKRKGRRVAPPRFRSRKDSRQAVRFTRNARFQITASRKLRLPKIGDVGVRWSRDLPSEPSSVTVIRDAAGRYFASFMVETADTPLIETRNEVGIDLGLTHFAVLSDGRKVTNPRALRRAERRLRRAQQAISRREKGSANRVKAKARLAKLHARVADTRRDHAHKLSTLLVRDNQAVYVEDMNVTGLGRTRLAKSVHDAGWSQFTAMLEYKAARYGRTFARVGRFEPTSQTCSVCGNKDGPKPLSVREWTCLACGTTHDRDVNAARNVLAAGRADRVNACGGTVRPAA

SEQ ID NO: 32731 - protein, 351 aa, Natrialbaceae sp.
MIIRKLKLKLNKTQEQQLDTWLWRLTGVYNWAIKKIENNAKNKIYFSKYDFQNLLAGHGKKIDIPSHAIQGVLIQAYTAWERCFKKMSRKPRLKGVRNKLNSIPFPDPIKPPEGNKISIPGMGKVRFHKQDIPEGAIKCGRIIKKPSGWYLCLWIDTVHTFPVKKTKDEVGIDPGFSTLLTLSNGEKIENPRELRKGAERLAQAQRAGDKKLVARLHERQANKRRDRNHKISRKIVENYKKIYYSKDNFSELARTHGKSVSEAGLGQLISTITYKGSACDREVIPVDSQFTTMTCSVCGSRTGPSDWDKLAVRQWNCACGAQHDRDINSARNVLLAGAGSALKATGKNRGN

SEQ ID NO: 32732 - protein, 427 aa, unknown
  TnpB Polypeptide
MSVFRAYKTELDPNKGQWSALYSHAGAARWAYNTGLAVEQRYYDETGHGLGHFRLNKLLTTWKQHPANSWTYEVSNYCFQSALKDLTCALQNFFAGRARYPRFKSRATGANRFRLYGKIKVEGRKVRLPVLGSVATKERNYLPSDSKIVSATVSERAGRWFVSLQVEELSPNTATASGEAIGVDLGLKVLAAVSDGRVYDAPKALVKHQNNMARLQRKLARRVKGSKRRQAAKVAVARLHLRITNIRANAIHEMTSDLVGVGLSAGQRPAAIVIEDLAVSNMMKNHHLAQSIADASWAEVRRQLTYKCEWWGVELIVAPRFFASSKTCSVCGEVKAELSLRERTYKCAACGAVIDRDLNAARTLMGLAGKAPDNENGRGGECAGLAVTCAAKPAPAKRLSEMLSVAPAERQDSSHVGGEPICASASA

SEQ ID NO: 32733 - protein, 391 aa, Okeania sp.
MVEKAYKFRFYPTLEQESLLRRTLGCVRLIYNKALNARTTAWYEKKERVSYKQTSAMLTSWKKQEDLDFLREVSSVPLQQSLRHLQTAFTNFFSGRAKYPNFKKKRNGGSAEFTSSGFKWKDGQVYLAKCAQPLPIRWSRQLPAGCVPSTITVKLVEPSGRWSISLRVNDTRYLRLKPIKKQVGVDLGITNLLTTSDGKKVANPKNLQKLHKKLRLAQKSLDRKPDKKSNNYYKARLKVAKIHAKIKDSRLDYTHKLTTQLIRENQTIVVEDLAPKNMVKNHKLARAISDANWGELVRQLEYKADWYGRELIKIDRYFPSSKLCSNCGHVVEKLPLNIREWDCPECGIHHDRDINAAINILAAGLAVSAPVAHGGDPLWRRWQVFRSDRKT

SEQ ID NO: 32734 - protein, 380 aa, Archaeon sp.
MEAVKSYRIPVEAPEDLIEEYCEVKRRTLDSILSHVKISKKAHLEFSKDDRRKLRDELLKDWKYSKHYIDSVINSVIGLVKGWVMLYNRKKAECKPEITKRSVYIKNTLFSLRDGILKISIESNKRYLEVDLRKYEWIPKDFDRLGGLILTEKELIVTLKKNVEPKTDRFASFDVNLTNVTALIDGEVRRYDLKPLYHIHRAYELKRRRIQKLSKFKPKTSKRLLKKYSSREKNRAKDFLHKLTTYIARGLHHVGSGAVLEDLRNIKSRILNGSKESNRKLSKWDTRTFQFMLKYKLKWLNLPVKYVNPTNSSKTCPLCSGSMASYEGRLMKCERCNLNLDRDVVAVLNLQMRGAGFPQRALNEIIKRERLRTSIKDYVT

SEQ ID NO: 32735 - protein, 380 aa, unknown
  TnpB Polypeptide
MSRRVVKRAYKYRFYPTPQQAGLLNRTCGSVRYVYNRALAERSRAWTQDQHRVTFAETCRMLTAWKNDPETAWLYEVSNVALQQGLQHLQQAYVSFWQKRARYPRFKSRKRSRASATFTTSGFRYKNGQVTLAKMDEPLAVAWSRPLPAGAEPSTVTVSRDAAGRWHISILVEDTVETLPTVDTTVGIDAGITSLVTLSTGEKITNPKHEKRDRIALARAQRNLSRKAKGSANRAKAQIKVARVYARITDRRRDHLHKLSTKIIRETQTVIIEDLPVRNMIRNHSLARAISDAAWAEFRRQLEYKADWYGRTVIAVDRFYPSSKTCSACGAITASMPLNMREWTCQCGAVHDRDVNAAKVLQAAGLAVLACGDGVRPPRT

SEQ ID NO: 32736 - protein, 341 aa, unknown
  TnpB Polypeptide
VLSVLLSSRTNKKNLFFRREARSGFRGLEIRVYPLQQSLRHLDRAMVNFFEGRAEYPTFKKKGNQQSATYVGTAFTLKGTSLTPARMSTPLDIHWSRPLPEGCKPSSITITKDEAKRYFVSILVEEDITPFPVVKKMVGLDLGLKRMVITSDGHTYGNPKFFSQDEKKLAKLQRRHAKKKKGSKNRDNARLKVARCHKKIADRRRDYQHKLSTKIIRENQVVCVESLQVKNMVKNHKLAKAISDVGWSEFVRQLEYKANWYGRTFVKIDKFYPSSKRCNGCGHILDSLTLDIRTWTCPECGVFHDRDINAAKNIVAAGLAVLACGETVRPGRVKTRPGKSR

SEQ ID NO: 32737 - protein, 374 aa, Methanomassiliicoccus sp.
MRTVRLKLVLTEEQKGSLLRTMEEYTRAFDHAARWGYEHHCWDKRRLQYEIYYDTRAAVPKLGAGLIQSSKDVACEALKRCKCRAVPKRRTYAAVRYPWKEAKVYFSSGTVSLYSIEGRIHAPVVLYAYLEKYKDWKCKISNLVWNKITKLFFLNVVVENREVLAQSKGDILGIDRGLKNVAVCSNNMFFNSSQINATRGRYAKNKAELQAVGTRSAIRRLRKQSGRERRFVTCENHRISKIIASTEFAVFALEDLANINMCRWLDRRTRGRLRSWAYHQLEVFLRYKAEEMGKAVVLVDPTCTSQWCSRCGWIDKKSRKGNEFHCVKCGFQLNADLNASRIIARLGRSDASRLLIYQPHAAGDEGDVSGVHSK

SEQ ID NO: 32738 - protein, 197 aa, Enterobacter sp.
MGRFAGILTDGLSCSALRQPGCLCPPGLHPDVTGLDMGLSHYAIKSNGDKIPNPRYLINASRNLRRKQKGLSRKKKGSANRHKARVQLAGVHERVANTRADFQHKLSRTIVDESQAVIVETLKAANMMKNHHLARAIGDAGWSGFITKLEYKAAEKGVHLVKLDHMTATSMRRLTLNAGAYWNYKRGTRRFCPWRPA

SEQ ID NO: 32739 - protein, 262 aa, unknown
  TnpB Polypeptide
MVRRHACKRAYRFRFYPTPEQEQLLRRTVGCCRKVYNLALEARSVAWTAEHRSVTYVQTSAMLTQWKKTAEYSYMNEVSCVPLQQALRHLQTAFSNFFKQTGDYPRFKAKSHGGSAEYTRSAFKWDAKRNELTLAKMREPLPIRWSRTLPRKTEPSTVTVSLDAAGRWHVSILVEETIRPLPARRNAIGIDLGVDSYAVTSDGETIANPRHYKKLAERLETGSNRTLSPQNQKAATIVGKPPSRWPAPTPESRTCAVTSSTS

SEQ ID NO: 32740 - protein, 267 aa, unknown
  TnpB Polypeptide
MVQNTAPQDGAEHRDRKLGRRRTMARQHPRGGDHPPSPRPKERNRNRLGSGQLRRHQRRGDHSEPTPLQETRRTVGNREQPDAVPAKPKGSNNRRKAALKVARTYARITDMRRDFLHKLSTRIIRENQTVVLEDLNVKNMAKRCAPKPDPDNPNHWLPNGQSAKNGLNGSIMDAGWSEFRRMLEYKAEWYGRQLITIDRYYPSTQICSHCGAKTGPKGMPGLKVRAWTCPDCGTTHDRDLNAAENILAAGLAVSVCKDGRTGTKVSH

SEQ ID NO: 32741 - protein, 292 aa, unknown
  TnpB Polypeptide
LYYTSQSCKIKDGKIILSKNLSIDIPQYEKYSDLIKDFKQIRIKSLACGYKIEIIYEVKDTEVSKGREEKVASIDLGIDNLVTLVSEDFTYLFSGKFVKSYNQRFNKTLAKLNSIKDLQKIKGITKRIKKLYYDREQYIEDVFHKISRKIVDLLIDSKITKLVVGYNKGWKTGVNMGKRNNQKFTQIPFARLVSYLEYKCELAGIEIVIHEESYTSKCDFLAFEKIGKHENYLGKRKNRGLFQSSVGKLINADVNGALNIMRKVVGDSCESIRRIIDRGLLFNPVRITNVFC

SEQ ID NO: 32742 - protein, 412 aa, Synechococcus sp.
MLTRRITYRIYPNKQQEQKLHYWRRLHCNLYNAAIANRKTQYQKFNHSVDYFEQQNSLPEFKRVWPEFKELGSHALQATLKRVDFAFNRFFKGLGGYPKFKAARRYGGWTYPCGAGWKVETEGQHGYLKLSNVGRMQMRGKARTWGKPTTCTIFFRHGKWYASITVKCEPKREAGDGSVGIDLGCKEAITFSTGEQISKPDFIKEGEQQVKQASKQLRRKRAPNRTKKVRASRRWKRQRQKLSKLQRKVAHQREDWIHQTTSRIVSSNSLVAGEQLNVKNMTRKGKKQKRQKAGLNRSILSVGFASIGQCLEYKLAEAGGFYVESPTRKLKPSQRCAKCWELTPKTLADRVHICSNPKCSHVEDRDINAAQVNLAWARGKGLASLVAEPPSSTDCGSMRQLGAMKRRKLHAS

SEQ ID NO: 32743 - protein, 441 aa, unknown
  TnpB Polypeptide
MIITNAVKFKVIEDSEEWLQYFANHAGCHRFVYNHFAKLNIDKFNDNNDKDYLLSYQSMDLLLTQLKKEYTFLNNVHSQMLQKATKDVSRGIKQFFKDINNKIPRKRLLKFKKKYDDQSFTLPNQTTYNYLKDENGNKTIKKESKNFKFIHNYKVFNKPKVCYLKIPKLKTPIKILKHKDFEGEIKNVTFSKKGDCYYVSLQLEQSINELPENNKISSIGIDLGVKRLINTSDNEIFKPVENYDKWQAKLKKAQRKLAKTTKFSNNFKKLKLKINKLHRKISQIRLDYLHKISTYLVNNHANIIVEKLNVKNMTKSAKGDSENHGKNVKQKSGLNRSILEQGWGIFKTLLKYKSTWYNSHFEEVNPKNTSLKCCQCDKVHKENRQQQAVFKCTSCGFSINADFNAALNILYLGLLKLGLLKEEAQLEVNKRISNQELLTNL

SEQ ID NO: 32744 - protein, 342 aa, unknown
  TnpB Polypeptide
MLITKKFRIKDSSSKNILRAMSNSVNFVWNYCNETSIAYVDKKNKWLSNYDLHNETSGCSKELKLSSKTIQAVCDEYVIRRKQFKKKKLNWRSSKKSLGWIPFKSDGISYKGNGIVKYNGVILKFWESQCVGKIKCGSFNEDSQGNWYINFVVEAEEYYYKKTNKEVGVDLGLKTTATYSDGSEFIGVKATKKYENKLAIAQRAKKKKQVKSIHTKIKNVRKDSLHKETLRLVKEFDLIVVGDVSSTKLIKTKMAKSTLDNSWGAYKSMLAYKTIRFGKEMKVVNESYSTVTCSHCKERTGPKGLSCLNVREWVCSSCGTSHLRDVNAAKNILSFSVSDMKR

SEQ ID NO: 32745 - protein, 365 aa, unknown
  TnpB Polypeptide
MYKRLKIRLYPTKEQEQVLQQHVDGYRFAYNLCLEYKKHLWDYHKKSISGYEMQKELISILKEVSFLSNLKVECIRQAGSDVDNTYQKFFKQKKGYPKFKSKKNRQSFTANQAICVKKSKLSFFKQKINFKTSEKYRAKLQSNKIKQCTFIKDRTNKWFATCVIEDDEIKALPQTRGSVGVDLGLKHFLITSDEEYIPNNKFSIRNQYKLRRLQRRFAKTKKGGKNREKLRLKIAKLYQKIINQREHFYHQVSNKLIRENQLITIETLKVANMMKNSKLSRVISDVAWSSFTNMLEYKCNWYGRELTKVPSNYASSKICSCCGNKKEDLNLSDRTYNCNSCGISLDRDLNASYNLKQFREKFPLI

SEQ ID NO: 32746 - protein, 407 aa, unknown
  TnpB Polypeptide
MQKEVQVTVVGKVFKPNRQKVLALNRCLHEYFRLVKWYLQFNSTSKKFLHENTYEKAKRFFELNTALIQTARDKAVEVLKSFERNKKDDSILRLKRISVRFDKRCYSFAKTTNVLTPYWLTLSLNRRKRISLPIVFGEKQKQRIEEALRGEWSFTTVEMVKRNGEWYAHFVLRKNVELIDDPETVIAIDRGERNLAVAVAVSENNPDKPMKGQFWRGEEIKRVRGLYSHIRRKLQEKKLLKKVKELKGREKRKVNQQLHIIANQIIEYVKQFPKPVIVMENLNGIRRNFKKSRKLNKRFHSLPFRKLQAIIEYKAILEGIGVKYLTKRETKNTSKTCHKCGYVARIKGRTFKCPRCSLTYNRDLNAAINIAYALTRRMGWGSCEPPKPADEGIGVKPTLNAGSSLLQ

SEQ ID NO: 32747 - protein, 402 aa, Moorea sp.
MIILEFKAYGKQKQYSAIDEAIRTVKFIRNSCIRYWMDNKGVSKYDLNKYSAVLAKKFSFANELNSTARQSSAERAWSSIARFFDNCKKKVPGKKGFPRFHKYCRSVEYKQSGWKLSPEKKSITFTDKKGIGKLNLKGKWELWRFDKKQIKRVRIVKKADGYYVQFCVSVDIKEELDPTGKAIGLDVGLKDFYTDSTGKAEPNPRFYRTGEKRLKFYQRRVSRKKKGSSNRKKAVNRLGRHHLRISRQREEHAKRLVRSYRKIVEPYYKRFNPFMQSRTPIKAPLSKVSSPARCVIRSNDLVAYEDLRVKNLVKNHCLAKSINDAGWYQFRKWMEHFGTKFSKITIAVNPAYTSQNCSSCGEEVKKSLSTRTHVCKCGCKLDRDHNAAINILVRLVPSRSFS

SEQ ID NO: 32748 - protein, 428 aa, Actinomadura sp.
MSRFRMYPTAEQEQQMLLHCAHARYVWNLAVEQHSNWKPGRKAAPTFAGQCRQLTEARAESEWLREGNVTVQQQALKDFAKAKAAIFTSGFGEPTWRKKFVHEGFRVIGTDRVPARRPDGGPLLNAKGKQVMNRRVIVSKLNRRWAQVKIPGCGWVRFRLTRRELPVAKTFRVTLKNGQWHVAFAVMPTPIPAPGTSEVVGVDRGVRITAALSDGRKLNCPGSTLRERARIRKYQRRAARAPKGSPAKAAGHARAAKLKVREVNRRKDWCEKTSTMLARSYDLIRFEKLNIITMTASAKGTVEQPGQNVRQKAGLNRSILAQGWGLLRQRTEHKAPGRVEDVPARYTSLRCSACGWIEKNSRKSQAEFLCVSCGFSCNADENAAVNVAAGQGGASRPVRRARAGGMTPRDQRSSVREPQPARVGISFV

SEQ ID NO: 32749 - protein, 284 aa, Streptomyces sp.
MPWHRKAAPHRHRVPVRELTRTHERSRLEVKPAPHAGPEVGIDAGVNLPLALSDGNHQDHGRVPRLPDGTADRDKWLNPDEKAKLLRLEQRAAHRKSFRKPQGKSSNRLHRTYDQIKQLRARATRRSVDWQHQTTTAIARQYGTIVVEALQITNMVKSAKGTLEEPGKNVAQKSGLNRSISQEAWGRTVTLLTYKTARYGGTLHEVPAPNTSRRCSACGFITPGSREDQATFVCKNPDCGWEGNADHNAARNILHLNRMGHALIPAAGRAVARRTRGVKPTTAR

SEQ ID NO: 32750 - protein, 414 aa, unknown
  TnpB Polypeptide
MPNYVKAPQHVVRTWGRFNIISNKEGRIIRMNTNKNNIKLGTLEITVRLKETNPKTHNTLIRYYRAYIALCNLISEAAHTHNTVDLNQILPRIRNDAEPYAKKYPGLLFRAFNTVTREYANHVAGTHRLPVPRKYTLNNIPLTLDDDYTVILYDNNQYGLELLLAHRTNIFSKGEQFYAEWLNLPVGYSHTAVAPTGTLSYDETNGWLFKYDLPIIQNKVVGVDMGTRFFAVTYDGDSTKFIHGAKTPLQHEMTTYSNLHQKLKKKGTRSARKRLKAISDSWREQLNVRIKKTVKDILNDAEPDTVFILERLTVPHNLDERLVTADIGNMSAAIFALFNQELREEAKKRGHMVLYTSASGTSARCPSCGIFKKRNRKHDTHSYQCPCGFWSNDDRVAAMNIRERGITYLVERFV

SEQ ID NO: 32751 - protein, 375 aa, unknown
  TnpB Polypeptide
MVESLKGKRSKLGDLRCKFVNNTSEFVKNNPWLANVPADIRDQARRDIANAVMSNKAKQKKNPKHRYELQFRSRKDKQQTLILLKKHWTRKRGQYTDCGLSYASYHVAGSRSTEPLPKQLACDSHLIRDRLGKFYLCLSELAAQNDEDEGERKTPPAKFVAIDPGVRTFLTGYDPSGQIIEFGAKDMGGLFRLGLHLDRLQGKIAANQKKTSRNRMKKAAERLRQRIHNLVDEVHKKAALYLTTNYTQILLPAFGVSGMVQHHGRKIHCKTVRQMLTWSHYRFRQRLLHKAKLASHCQVHVVTEEYTSKTCGKCGHVRPSFASKTFVCPECTFRADRDYNAGRNILLLELTKHGLSAPSIKKRNKRLRALSLGSS

SEQ ID NO: 32752 - protein, 375 aa, unknown; identical to SEQ ID NO: 32751
  TnpB Polypeptide

SEQ ID NO: 32753 - protein, 389 aa, Thaumarchaeota sp.
LQAVKAVRQNYRPTEEILSLLEDFRCMVNDCVRIGLRENLTSMKSLSIRAYHQLSAYDVPTCYRLTAISRAAGILRNYRRELKKMGQSARVPYVTRLSLTDCYGFRVTHRLVRLPIRRRGEYTFIVLNDHTLRTIGGRTPRSLTLTADSLSISLSKEIAEIEPVGAIGIDRNLDYVTTADSDGSILRHDLVRATKIKARCRETKSRFRRNDARIRGRVYGKYGRIQRNRVGSILHNVSASIVRRAKEKRFRIVMEEIRGIRKLYRKGNGQSNDYRARLNSWSFYELQRQIEYKARWEGIPVAYVAARGTSVNCSICGSRTYPNGLRTLHCLKCDISIDRDVNAARNILAKGRGVRFTPDGPPEARKEAVKGNETMTPILRADGGKVTQG

SEQ ID NO: 32754 - protein, 364 aa, Microcoleaceae sp.
MFAVKRALKLNKTEATVMAKHAGFRRVVFNFGLSLRTQMYSEGKFTDSKVIGEVKKVLTNYVKKKPEFAWMNQLSSRVYQNALIALKDAFNRYRSGKAGHPRLARHRDSQSFTVDSSNGKVLLVAGSTIKIPRLETFRLFEPLECGFISQTFTVSKEGSRWFVSFCVDAERLPVQQSGGSVGIDIGIKSFATLSTQQTFDAPKPLKASAKTKLATLQRKASKQVKGSQNQRKTYDKIRLLHARIARIRLDFLHKLTTYLAKTFKLIKIENLNVQGMMANHKLAGAISALGFDEFPRQLDYKSKMYGANLVLVDQWFPSTKTCSNCGTKKELPLSVRTFDCPACGRSLERDFNASLNILNWEPSA

SEQ ID NO: 32755 - protein, 427 aa, Helicobacter sp.
MLQLTHKIELTPNNKAQTHFKKAFGCARLAYNWGLAKWRENYKNGIKSNHFALKKEFNALKKTHYPFVYEVSKYATAQPFTHLNLAFQKFFKDLKLGKLSYPRFKRKREHQGSFYIGGDQIKIIQGDTKDYLKIPNLPKIKMTERLRFKGKINGATITQKGAKFFVSIQINTTQEEFNCTHKPIKSNSTLGVDTGIKAFASLSNGLQIQAPKPLNRLTRRLKRFSRQVSKKQHPKTKGDKTRKSANYLKATLRLNRLHARIANTRNNFLHKLSTALIRHAKVLCMESLKVKNMLKNSKLAKALSDVSISAFNTLLDYKAKYYDREIKRADAFYPSSKTCSGCGNVKKDLTLSDRVYHCGACGMAVDRDFNASVNLVKHLVGGVPTEFTPADMTALLSCFAKNGLVTSMVETGIQQKPLKFFSIDRIL

SEQ ID NO: 32756 - protein, 377 aa, unknown
  TnpB Polypeptide
MSRKANNLYNQCVYFAKHSENLLEDLKNLDKVMKSFPDDHDSYRSFGHAKSAQQVLRLFQQNLRSYFAAIDDYKKNPSKYTGRPRFPKFRKSGERFQVIFTNQSAKVKGQTIMIATKTFENKLSIKLRTRSAKKLCQVVFAPRNGYFLAYVVYEVDDPIISQCSNKAAAIDIGLSNLATVTFSSENEPILYRSDLTKINHDFNRITSNYVSILKKTQNKDTSKRRKRYSEKYSGLVEDRLHKISRAIINDLSHRGVSTIIVGKNTGQKINCKLKNFVQVPLFRLITMIKYKAELAGIKIIQVNESYTSGTSFLDNELPTKECYDKSRRKYRGLFLSNNSKQINADVNASFQIMKKIYAEFAYNDSIKYANPIVKTIC

SEQ ID NO: 32757 - protein, 439 aa, Thermococcus sp.
MPSETIKLTAKFKLKNPPEELNDLFSTYREIVNYLISYAFENNVTSFYRLKKETYKGLRREYPELPSHYHYTATQMATMIYKSYRKRKKKGKAKGKPVFKKDVIMLDDHLFKLDLEAGVIKLSTLSGRVRLEFYPAKYHKKFKNWKIGQAWLVRTPKGVFINVVFSREVEVREPETFVGVDLNENNVTLSLPDGEFVQIITHEREIRTGYFLKRRKIQKKLRAGKRRKELLEKYGQRERNRLDDLYHKLANKIVELAEKYGGIALEDLTEIRDSIRYSSGMNGRLHRWSFRKLQSIIEYKAKLKGIKVVFVNPAYTSSLCPVCGGKLSPNGHRLLKCSKCGFEADRDVVGSWNISLRALKMWGVSVPPESPTMKMGVGRLSATIVPYVSKVADNQNGDSTTENSSLCGEVRLSFNGEKAENKIGRMHLMPLKGCCSMSS

SEQ ID NO: 32758 - protein, 337 aa, unknown
  TnpB Polypeptide
MSSSKFRVWLNHEYLPQHPEYLWIKEAYSKAVTQAVNHGQTAFKKFFNHESAFPKFKKKGRSDVKMYFVKNNPKDCRCERHRVNIPSLGWVRIKEKGYIPTTKEGYIIKSGHVSMKAGRYYVSALIEIPDNKTADLSNEGIGIDLGLKDFAIVSNGKTYKNINKSARLKKLEKRLVREQRCLSRKYENLKKGESTQRANIQKQKLKVQKLHHKIDNIRTDYINKTIAEIVKTKPSYITIEDLNVSGMMKNKHLSRAVASQKFYEFRIKLKAKSKENGIELRVADRWYPSSKICHCCGTIKKDLKLSDRTFRCHCGYVEDRDFNAALNLRGVKTYKIA

SEQ ID NO: 32759 - protein, 375 aa, unknown
  TnpB Polypeptide
VKRTVSIKLDVTQEQAAILKILQKEFARACNLLAPLSAGARCTNRVRLHHLGYYLVRKEIPAIGSQMACNAVAAVAQAYRSLLSNNPECRKGEALPAIAFRDTSSVHFDKRTYTIKGDALSLFTTAGRVFVPMRLGDFQRRYLVDGLSREAVLVRRRGRFFFNLVLDLPDSGAKPPTGKIMGVDLGENTIAAVSTGKLFGGGKLRHDRDKHLALRRRLQRNGSQSARQLLAKVSGREARHVRQINQEVSKTIVTEAGRNGCDTIALENLTNIRKRIRTGKRLRSRLHRWAWAQLQAFVAYKAEAAGIRVQLVNPAYTSRICSVCGSLGVRVKHRFSCTCGNLAHSDLNASRNLARFGVTAVAPTGAVNRPHVETA

SEQ ID NO: 32760 - protein, 399 aa, unknown
  TnpB Polypeptide
MSRYRLYPTPAQEAVLREHCAHARYVWNLAVEQHGHWRPGRAAGPGYLEQCRQLTQARKEHPWLAAGSQTVQQQALRDLAQAMAAFFNPANPARPPRWRKAGRDEGFRITGRRGRQWEERRVSRHTGQVRVPKVGWVPFRWSRAVPPGVKSYRVTRDRAGRWHVAFAAVPDPLPAPGNGQVVGIDRGVAVAAALSTGELLHVPGLTAYERRHMRHLERKLARARRGSNRRARVGRAIARLRARETGRRKDWAEKASTDIVRRFDVTRVEDLRVGAMTRSAKGTRDSPGRGVRAKAGLNRGILASGWGLLVRRLEEKAPGRVEKVSAAFTSQRCSACGRVDGKSRESQAVFRCTACGFACNADVNAARNIAAGHAVTARGGYREAGPVNREPQLLASFQT

SEQ ID NO: 32761 - protein, 415 aa, Oscillatoriales sp.
MKLRYRYRIYPTNQQKTLMSQLFGCCRVVFNDALAHCNQEYQNGNKKPSSSELSKRLTELKKTEEKQWLTEVSSIPLQQSLRDLEQAYSNFFKSCKGQRKGKKVKPPRFKKRKSKQSAKFTDNGFKIYPNSNYIYLAKIGDIKVIWSRELPAVPSSATLIKDSADRYFVSFVVEFNPQQLPKNGQSVGIDLGITDFATLSNGEKVKSPKPLKKQLKRLRRLQRNLSRKQKGGKRREVARKKLAQLHAKISDTRNDFLHKLSTKIIRENQTIVLEDLNVSGMIKNRKLSRAISDLGWRSFRTMLEAKSVMYGRDFRVIDRWTPTSQTCSYCGFKGGKKELNVREWICLNCGISHDRDINAAVNILACTELSRSVAGGLSETLNGRGEKVRLSKESASRRSVNPPEFRQLSIFDLLK

SEQ ID NO: 32762 - protein, 472 aa, Virgibacillus sp.
MSTKAYFSNRIYKNTLSNSVVEAIRDSLSRFNRAKQLVLNTLVKEKRSGQNRREKSIHLHVKEKYQLDDYYANSAVQAANAQLKSLDELKKIYIENKSAQIRSIKRKLKQERSRLTTLRKIKTSIIKDKPKFPKHAREQKQGNYFVISYKKKTDIYYHAYQFEHTYLDPAIQQHKTRIGFLTSRLNRKEEELKQLRANIPSVVFGSKKRFKSQHTKDFYIDNHDAWLEEWQQSRNQKMILSGRKDAANGNFVFNYDTENKQLHFKTPSGVFINMEQVHFPYGQEKVASAIQTQQNCKNKKKYGKPIAWSLEDHGDYYIVKCMMDVETNSQTNYSKSDGVIGVDCNVDHFAIANINAKGQLLSSCTLPFKLEGKTSGQITKIIEAEAIGVVDIALKANKPIALERINTTTSKVSNPYGNKKANRNMAMFAYKKMITAIKSRAEKMGVAVYENNPAYTSQIGKMKYMKRFGISI

SEQ ID NO: 32763 - protein, 389 aa, unknown
  TnpB Polypeptide
MLPSPAQMAALRDHCGHARFVWNLAVEQHRHWRPGRKSAPGYLEQRRQLTIARAEHDWLRAGSQMVQQQALRDFAQAMANYFAGTHDRPSWRKVGRDEGFRVVAVKSGDVRRLSRHVGEVRVPKVGWVRFRWSRALPPEAKSYRVTCDSAGRWHVAFAAIPEPVVGPGNGQVVGVDRGIAVSAALSTGELLTAPGLSLARKKRLVRLQRRMARARRGSGRRAKLKLAVARLQARAADARKDWAEKTSTDMARRFDVIRVEDLRIASMTRSARGTVGRPGRNVRAKAGLNRQILRSGWGLLVRRLEEKAPGRVEKICPAFTSQRCSACGHVDAKSRESQARFVCTACGFASNADVNAARNIAAGHAVTARGGDGVTRPVNREPQLLASLT

SEQ ID NO: 32764 - protein, 392 aa, Tolypothrix sp.
MGNKAYKFRLYPNKEQSAFLAKCFGCSRFVYNYFLRLTTDVYAESKKSLRYKEWAKLLTDLKSEFEWLKKVNSQSLQQTLKDLESAFVRFFKKLGGFPNFKKKSNRQSFRVPQHFSIDHGGFLRLPKMTLIKMVIHREILGTPKNITISKTPSGKYYASIVTEQDIPHAPLNGDKIGLDLGLKEFAITSIGEKFENPRCFQRSLRRLKIRQRRLSKKQKGSNNRNKARITVAKIHAKMQNQRQDYQHKISRKLTYENQRISAESLNIKGMVKNRKLAKQISDVAWGKFLTMLEYKGDIYGCEIHYVDRFFPSSKRCSNCGHIKQDLTLAIREWECPECKYFWDRDINAALNLMLFSESKIPLEEGKSTPDQLVERLGMNRDTGSRQEAPSEA

SEQ ID NO: 32765 - protein, 411 aa, unknown
  TnpB Polypeptide
VNKAEQIKNALQETKERRKTQRPVVFQLKLQNLSRAKEELLERVFLEAKWLYNWLVSDLERLKAPANKVDTVEVKVGESFEKRELRVLGSQVKQEIADRLKDNLRALSKLKQNGHKVGRLKPKRFVHSIPLKQYGVTYSLDFARNRVRIQKLGSYRVLGLHQIPRDAEIANAVLVSKPSGYYLHVTCHLSKENSYRKSIGGEVGIDFGVDSKLTLSNGIKIDYELHKTPRIKRLQKKLAKSEKGSKNRRKTRHFLRREYEKIGNRRKDAQNKILAFLKLYEKVVFQEDLVKGWAALFGKQVYSSGIGGLKARLRNSLVAPIPVDRFVPTSQECYACGKRHKLSLSDRVIQCDCGWICDRDVNAAMVILRKGLGLSPDQALGLDRPEVTPLEKEAAARILGSNPSIRVSFLQ

SEQ ID NO: 32766 - protein, 217 aa, unknown
  TnpB Polypeptide
MGVKRFATLSNGDFVEPLNPFKQEQEKLAKLQRKLARQKKGSRNSRKTKRKIARLHRYIADSRRDFLHKISTKIAKNHSIIYVEDLKVSNMSASASGTKESPGKNVRQKSGLNRSILDQGWYGFFQMLSYKLEQRGGKLIKVDSRNTSRTCPRCGLVSAENRKSQATFACIGCGYRSNADEVGAINILRAGRARLACGMSGAVRPLSAGTQRDRLQH

SEQ ID NO: 32767 - protein, 471 aa, unknown
  TnpB Polypeptide
MAAKLRDEADNEANALLNDVGGSGEVARTVVVRSALLPRRTFKVFVELEGMYRNMVEQLVLYAVNSGITKFTRLKAERYREARSLYPQLPSHYAYTACQDAAERAHSFLRMRKIGKARKPYPEVRSVSIWLDDHLWRAKGLTSISMATHRGRVNVSIELNKHLLRYVNRGWRLATEAKVKLNHRERRLILYLTFRKEISEYRPKGYITVDVNEDAEAVLIDGIVYLFETDLSRITLGYYYRRKSIQKRYDKVYGPGSRPERKIFRRLGGNERALKREIRWKLAALIAREAAKRQAAIVLERLGREPANNMIGHIKDPQLRHRVYQAAFKGMQRAIEEKAREYGVPVIYVNPSNTSKTCPIHGDEIVYGKDRRGTCSRGGETWHRDMVACYNLLLRALGGDGGAAPSRLRALAPVDGGPVPLGPTAAHEPTPIAREAWARWRSLRPIMSEQMIEVRAQEQTASSGTPLTSAP

SEQ ID NO: 32768 - protein, 450 aa, unknown
  TnpB Polypeptide
MSNVFTITTELKLNKEYNQLSGKYISDYIEIFNKIQRLTFHRIKNYYIKNGKITQEDRNIIHAQLKEEFNLTSRAIDAILSNMLGRFESIKSLKEFERQSLERKIFSLEKELTKLKDERTLQRINLNNNLKDFNFVKYKNLKNKIYWKQNRLNTKKQKLKNLEKEIETSKYKVCFGTKNLLKKDYSKFVKKRDSEIYYLGRAGDTTCNNNFQVEYNSKINQFYFRIRKEIDLDNDKFVYGQFNFNNKNYTNLLKKLLRTKESALTYRIKTKDNRVFLQIIYNFEYNKDLCVTRNSYGVVGVDFNKGFVSVSETDKYGNLINTFNIDYQYSKGNQTTNDFQYIATRLKDYCLNVGKDLVIEKLNFTKKKDNLISKRGKKYNEMLSTLAYSKFDSIVTSKCAKNRIFLHKVNPAWTSWIAKQKYCPKMKLNIHSGASYVIARRGMSLKDKIK

SEQ ID NO: 32769 - protein, 420 aa, unknown
  TnpB Polypeptide
MLKATKIRLYPTPAQCEALSRQYGCVRWVWNKSLAMKSAAWNDRQENLSCYTIKGMLPQWKEEFPWLKEAHSQVLQQVLLNMDVAFKNFFAKRAAYPQFKQKHAAHQSIQYPQGVKVKDENHLYLPKIGLVKARIHRELAGKIKTVTISTSSTGKYFASILLDDDVATQAPIQHIMTVEAIDAGLKDLVVTSKGWKSGNPKHLANAQSNLRRKQKALSRKIEAAKARYKAAQKTRSADESALRLRDFFGSNIKKNRKLVALCHERVANARSDWQHKLSNRMVDENQAIIVEDLAVRNMVKNRRLARSISDAGWSSMTAKLKYKLKRKGGYLVKVDRFFPSSKTCSCCNEKNSDLKLSDRFWTCSSCGVTHDRDENAALNIRAAGIVKLKAAGLSVSAHGGRVNPVHTEQVAAVEAGSLRL

SEQ ID NO: 32770 - protein, 410 aa, Trinickia sp.
MRRFQAFKFELKPTGEQQRDMRCFAGSCRYVYNKALALQQENYEAGGKFIGFFAMAKYLTEWRNGPATPWLKDSPIHPLQHALKDADWAYKKFFAKRAGFPRFKKKGLRDSFRYPAAKQVKLDQSNSRIFLPKLGWVRYRRSRDVVGDLKYATVSQRAGKWFVSILTEREVESPLPQATSAVGIDVGIARFATFSDGDYLEPLNSFRRHEARLRRAQRAMSRKKRLSHNWHKAKRRVQNIHAHIANARRDYLHKATTRISQNHAMVCIEDLRVQYMSKSAAGTVKAPGRNVRAKSGLNKSILDQGWYEFRRQLEYKQAWSGGWLIAVPPQNTSCTCPTCGHVFADNRPTQARFACVRCGYADHADVVGAINVLRRGLALFSSEGQDHARIACGEPAQSGHSVKQEPAEAA

SEQ ID NO: 32771 - protein, 369 aa, unknown
  TnpB Polypeptide
VEKAYKFRIYPTTAQATLIAQTFGCKRWVYNHFLAERIAIYESEKRTAGRFEQDKRLTQIKKETEWLRTPDKCALQNALADLDAAYQNFFRRVKSGDKPGFPKFKSKRDKHQSYRTSSNIKMFEKHIRLPKLGLVRCQVSKQIEGRIISATVSQNPSGKYFVSVLCTDIEIQPVDKTGAMVGVDLGLKELAITSDNHRFTNPKYFAKSQKKLAKLQRRLSRKSSGSNNREKARIKVARLHERIANQRLDNAHKMTTSLVRDYDLIAIETLVPKNMVKNRRLAKAISDASWGEIVRQLEYKCNWYGKELVKVDRFYPSSQTCNSCRCKNSDTKNLAVREWDCPKCGVHHDRDVNAAKNILDEGLRILNVA

SEQ ID NO: 32772 - protein, 367 aa, unknown
  TnpB Polypeptide
VLFNKAYKFRIHPNEEQRVMLSKTFGCVRAIYNMMLSDKIKHYNEFGTTLNNTPAQYKSEFEWLKEVDSLALCNAQINLQRAYQNFFRDKSIGFPKFKSKKSGRNSYTTNNQGNNIRIADGKIKLPKIGWVKVVQHRQIPDGHKIKSCTISLSPSGKYHVSILTEYEWEQPTPILDKSKALGLDYSSPHFYVDSQGNEAGYPRFYRQGEERLAREQRKLSRMKPGSSNYNKQKVKVARIHEYISSRRKDWMHKKSKSLADEWDYVCVEDINLRGMAGALKLGKSTNDNGFGMFREFLAYKLADRGKVFSKIGKWFPSSKTCNECGHVNKELTLSDREWTCECGAHHSRDINAAINIRDVGLQLATAQ

SEQ ID NO: 32773 - protein, 369 aa, unknown
  TnpB Polypeptide
VEKAYKFRIYPTTAQAELIAQTFGCKRWVYNHFLAERIAIYESENRTVGRFEQSSKLTRLKKESDWLRLPDKCALQNALADLDAAYQNFFRRVKSSEKPGFPKFKSKRDRHQSYRTSSNIKVHEKHIQLPKLGLVQCRVSKQIEGRIISATVSRNPSGKYFVSVLCTDVDVQPMDRTGAMVGVDLGLKELAITSDSQHFANPKHFAKSQKKLAKLQRRLSRKSKGSNNREKARVKVARLHEHIANQRLDNAHKMTTSLVRDYDLIAIETLMPKNMVKNHRLAKAISDVAWGEIVRQLEYKCNWYGKELVKVDRFYPSSQTCNSCGFKNSDTKNLAVREWDCPKCGAHHDRDVNAARNILDEGLRILSVA

SEQ ID NO: 32774 - protein, 398 aa, Nonomuraea sp.
VQLRYSFRLYPTPSQHQALARAFGCARVVFNDGLRARAEAHDAGLPYISDGDLSKQVITAAKQTPERAWLGEISAVVLQQALADLNTAYRNFFNSVSGKRKGPKVAPPRYRSKKDNRQAIRFTKNARFAVTAGGKLRLPKIGDVPVRWSRDLPAEPSSVTVVKDAAGRHFASFVVEVPERPFPPVESEIGIDLGLGHFAVLSNGRKIDAPRFLRRAEEKLKRLQRALSRKAKGSNNRAKARHAVARQHAKVADARREFHHQESTRIIRDNQTVIVEDLAVNGLARTRLAKSVHDAGWSAFVGMLKYKAKLHGRTFHRIDRWFPSSKLCSACGARAASMPLDVREWSCACGAVHDRDVNAAINILAAGRAERLNACGGLIRPPLAVAQPGEAGSRRGAA

SEQ ID NO: 32775 - protein, 417 aa, unknown
  TnpB Polypeptide
MASRTVKRTYVASITNQRQVRTDLDSLGFAASKLWNIARWTAGRIWSEIGQIPGHAELSSYLKRHERYADLNAQSSQRVIQALAEAFKSWYGHRRNGNQIANPPGYRKRGDQYPRSTVTFKEDGFTHDVENRRVRLSKGRNLKESRSDFILCKYEADPDVDIESVQQVRAVYDRGEWRLHFVCRVEIDPEPTGDEVAGIDLGIANIAAISFGGEGILYPGGALKEDEYWFQKQRAKCDDSASNEAQRLDRKRTERRTHFLHSLSNDIVAECVERGVGRIVIGDLAGIRADTDWGSRGNLGLHGWAFDRFTSMLEYKAEEQGIDVERVDERGTSKTCSVCGTEDKTQRVTRGLYDCECGLVANADINGAENIRNKVLPSLLPDGGDRDNGWMAQPAVRLFDRSEGRFAPREQVVDSKP

SEQ ID NO: 32776 - protein, 526 aa, unknown
  TnpB Polypeptide
VRVTGNRYPAIRTLIIPTTYADEEDINILIGMTKRYNILVKMAHKEIWQRNANRQKLYFQACIPVQVKEYKAGYCTMRNQVSRKLFEELKKQYPDDTTLKGLNYYRSKLVKKGSEYLIPSKTAEAGAEAAYQNFKSYWAVKKSRSNFKYLAGDTKTTREHLKEFPIVFKKPGIKLLHKNFNGDYLIPDVDHPANTIRLSLGVALNKVLKQRYIFIPVKSTILKYPIKVIAITGLSERYTKLPSKKGRPNNKNSHKQMNNYNKMCQEKLSEIKTYTTPDIHISYEILVPEIDPELANIKNLPKKSLEVLFNENRYKVMGIDPGGVNLMALADNTGNRGIVFKLGTLKGLLNGPTTGRTPSRSSCYNLNQALLGIASEVVYIAVKRGIDIVVFGHNKGIKNKKIDSTGKVLYNPNALFRFIPHISLMNKVRNSCEKAGIVFIETEESYTSHTDHLILESMTTTKEDWQTRKKRRVNRGLFKTESNLIPSGYINSDWNGALGIARKIFGDSFIITLPKKHLGGIEVITK

SEQ ID NO: 32777 - protein, 415 aa, Nostoc sp.
MYRSLKVRIYPTDEQESYLAQCFGNTRWLWNYMLNATTTAYKETGKGLSKAAMDKLLPGLKKEYEWLGLAYSQVLQRVTFNLSSAFVNFFEGRTKFPNFKSKHGKQSIQYPQRVKLMPQDSVIKLPGNLGLMKAVFHKELPDAKVQTVTISRNADGKYYASILFHQTDNPVVAIRESIGVDLGLKNFAITSVGSKYDLPKKQLAKLEKNRKRKQKKLARKTDKTSNKRRKAKRLVAKVSSKIARVREDFLHKLSRKIASENQVICVEDLAVKNMVINPNLAKAISDQGWGMFQTMLKYKAEKFGHTYLEIGRFFPSSQLCSETLLPIPMLQNGYDSLGVRFVDCPHCQKQHDRDINAAINIRNEGLRLLALGTSASALGGDVRPKSSGRKKSMNSEAIPNELGSPHPICTQMGVG

SEQ ID NO: 32778 - protein, 396 aa, Lactobacillus sp.
  misc_feature (315)..(318): Xaa can be any naturally occurring amino acid
MRLYPDTDQAEQFLAMSQEYQRLANVVSQWIFDHAFQLSWLKINHQLYKRFRQESPLNSQMIQSVFRTVVARYKTVREQMKQHPYRYKNEENKWIQLPKDLTWLVSPIQFHRPQADLVRQSNYSFVDKMRQISITTLGKRTKLGFTNKGFEEYFAANWKFGTAKLIHNRGKWFLHIGITKEVSDFDTKNQPQIVGIDRGLRFLATAFDSEGKTLFFDGQKILRKRKKFLESRRQLQSKGTKSAKKKLKQLARRENRWMTDVNHRLAKTLVTAYGSHTLFVLEDLTNVTFNTSDFPKSLRNSHRSWSFFQLESFLXXXXAIQSAVVKVNPAFTSQRCPKCGLVEKTNRHHDTHEYWCAQCQYRCNDDRLGAMNILILGQGWLNGVKHPKIKKLTTAG

SEQ ID NO: 32779 - protein, 504 aa, Chloroflexi sp.
MNFIVTSIRLEIDNISSEQDLLIHERLMRPQQSAMRIAYNRLQNKWTEREIWGDLRDKFPFLTGRNVNDAITQAKGILASQFELLPVDTEKTKRALGKSKNAQITNKSRPLHKRVKSLYLKVNQLQEHQANGTVPPVIFGGQHAWKDVVRRLSSARAQWRHRRSNQFISRGAKNNRGNAHCRLVITQDSELELHIRVPDKIKKKKSKQTTSAIWLQFPISYSKQFDTQLRDLATLGAIGQVSYTVRVIRISHQTYRAFITCDEFVEHREFSTFEAMPNWVTTACGIDLNLDHIAICITDRNGQFRRWNTITYPNLGELPRPKSKWMIGNIARDAVDWVKSHNAEAIVLEDLSIRRSSQSSRTNRRTVPFAYRQLAQAITRRALRDGLAVKTINPAYTSWIGRVKFAPMYGISVHVAAAYVIGRRGFGLDERLPQKLINRFPKIIEIIDYLAYSPDIDTEKLQEWRNRLMDWKKHTPNAGRPWLLWATLHGIKRISSEARSIILG

SEQ ID NO: 32780 - protein, 389 aa, unknown
  TnpB Polypeptide
VRHTFRLYPSTRQKRALGKTFGCVRYVYNRELRLRKDSYAKDKTKVSYGQTSAALTRWKQEPGRKWLKEPSCVPLQQSLRHLQTAYRNFFENRAAHPRFKSKHGEQGAEFTRSAFRWDGKQLNLTLAKVGYLRIRWSRQFASAPSTVTITKDCAGRYFASLCLDETVEALPRTGASVGIDLGINRLATLSNGERLANPRHLGERLDKLARLQRILSRRTKGSGRWRRQRLRVARLHARIADGRRDHLAKLTTDLVRRFDTICIEDLDVRGMMGRRRLARSISDVGFSEFRRMLAYKCSWYGRELRLADRFFPSSKSCSNCGHVVGDLPLSTLTWTCPQCAACHDRDENEAKNILAAGHAVTARGGRARPQATKVTRGGAWRNVNQPALP

SEQ ID NO: 32781 - protein, 523 aa, Oscillatoriales sp.
MKGRLNQSKMEQGNAFTTLTHTKKMEASAQSSATAESVVPNKKTILLDKSNSCDSDTPTRKSSKTSALDSISKEKDCKPYWSDLCAQISSRLLLPVETDCVDSDLNYSSSWQNKTVEKSWFSQILFTRANPNLQPIFLPSFTCLVAECTVLEATARKSKKIRLFLSPEQKAMLKQWFGVSRFVYNATIKYLQQPGTKANWMSIKTEILNGLPDWAKPVPFQIKSIAIKDACGAVKKAKADFKKTGKICSCKFRSRKDTKQSVYIPKSAIGTKGIYPTKLGQSKLKEALPKGFSDGRLTLAYGEYYIVVSEEVQPRQTDNQGRVVALDPGVRTFMTFFSESSYGWVGNDSNLLIQKLCFRLDKLISRMSKTNSPQRKRFKKAADRLKSKIQHLVKELHHKTAKFLVDNFDVILIPSFESSQMVSKSRRKIRSKTVRQMLTLSHYQFKKHLEWKAWEQGKVALTSINEAYTSKTVSWTGEVKKIGGSRMIKDSDGNQMNRDLNGARGIFLRALVDTPWLKSCLAI

SEQ ID NO: 32782 - protein, 188 aa, unknown
  TnpB Polypeptide
MPHYYRLLEAKLSKENRKLSHMKLYSNNWYKQYKRINKIHEKIANQRKDFLHKLSNKLINTYDYIVLEDINLKTISRSLNLGKSTDDNGFGMFRNYLSYKAKLNGTSIIKVDKFYPSSKLCHICGYKKIDLSLKDRSWICPICNTTHNRDTNAAINILKEGLRLLDSKTDCVKEDTFLYNPGAQGDAR

SEQ ID NO: 32783 - protein, 434 aa, unknown
  TnpB Polypeptide
MIMTTMVINMPTVTLKFRLKENQKVKTLMDACAEIQRQAVDFAIDKNKTSTFTIIKALYPSLKAKHPNLHSLWLQSACRSGAAVVHSFKNRKRKRQQDNRQQDNRIKDKRQVKADLEKPKIKRPFVYVSKQILKVDFDGKKLTLTFPVSPYDKEPITLVFRPHHRYCRLLDDWKAGRAVMGEPTLTFNSIFIPLKFPEVKPYKPKRVIAIDSNELNLTVYEATSGEVREIDTGYAARVSREHERRVRKGTEGKQNPKSKRKVARKHGRIRVEKVKNFWHQIALMLIGWAVQMGAAIVLEDLKGMKGRIGWQHRSRRMRQRLLNFWSIMTFHKILAQKAGFYGVPLIFVPPENTSRTCPVCGRINERLRGHVFKCPCGLEMNRHEVAAINIARRGMETLGGLMLLGQGLVGDPCCPSSDFGLRAQSHDRNTQPTA

SEQ ID NO: 32784 - protein, 283 aa, Sulfolobus sp.
MKVREIRTKSKKNKKKVMTLQLSNLGIFNVVVHRDFQLEKVERVVVKLAPSGRLYITFVVDQEYPQLPKTNKVVAVDVGVEKLLTTSDGEYVPNMRPYEKALNKMKRLHKALSRKKFLSHNWFKAKIKLARAYEYLKNLRMDMYMKLGKYFAEHYDVLVMEDIHVKQIVGKSLRRLRMRLHDVAFHEFRSIMEYQVGKYGKEIRFVNPAFTSMICARCGYVKKDLTLADRVFVCPSCGWTVDRDYNASLNILSRSGSERPLVPVELRPLPLASLGCEAGSHVR

SEQ ID NO: 32785 - protein, 246 aa, Sulfolobus sp.
MARRVKAIRASVSMKIALSEPLLVLVNNYVKALRFTLFWLKENVPNPDEKGVLGKVHEELYEKLREEYNLPSKVAEDCYRDALSVYKGWYNNPRRGRFPRVYKPTVWLTPKASYNVDFEAMTVRIASVGELQILGYPRNLKEYMSWRMKEARLVVKDGKAFLKVVFEKPLENVEPKESVAVDINMSEIVVGKDDINYVRISTRLHEVHHWKSLAESLQKKYPRRWGRIRGSCIGFVFSIKGLGGFC

SEQ ID NO: 32786 - protein, 401 aa, Sulfolobus sp.
MSDVGLRFRAYADEQTLRALKAQLRLACEVYNTLRWADIYFHERDGKGLTKTELRQLALDLRKQDKQYQHLYSQTLQHIADRFYDARQRFFEGLAHFPKEKKAHKWYSLVYPQSGWKVMKVREIRTKSKKNKKKVMTLQLSNLGIFNVVVHRDFQLEKVERVVVKLAPSGRLYITFVVDQEYPQLPKTNKVVAVDVGVEKLLTTSDGEYVPNMRPYEKALNKMKRLHKALSRKKFLSHNWFKAKVKLARAYEHLKNLRMDMYMKLGKYFAEHYDVLVMEDIRVKQIVGKSLRRLRMRLHDVAFHEFRSIMEYQVGKYGKEIRFVNPAFTSMICARCGYVKKDLALADRVFVCPSCGWTVDRDYNASLNILSRSGSERPLVPVELRPLPLASLGCEAGSHVR

SEQ ID NO: 32787 - protein, 431 aa, Sulfolobus sp.
VSKNLRIKSFKPEEEYIYLTYSIKNNKREETKILLENYRVLLQKALDWLWERTKVERKEVKKGKKVLTKVKVKLPKKKEVNKVLRDELEKINVLASHYVDKAINDAYSILRGWKRRAEKGQASLRKPRLKKVYVRVKSTLRKVNGGSVRITVRPYEYVTFSWSHKWFSKRVKGLELGEPIIKEDKVYLPFRYRLPWFTPLDFLAIDSNLYTLDAYDGEKFVTFSLKELYSLKYGVELKRGRIQRFASKHGRKGKELLRKYSHRERNRVLDYIHKFVNSLLEMYPLTMFAVEKLNRQEMFKDANDSLSKKISRTVWRTIHRVLKYRAPLYGSFLKEVNPYHTSKSCPRCGWVSRKVGRTFRCVRCGFTLDRQLNASLNIYLKMCGFPHIRDTPRVWVGVIPLKGRRGMNGAMPRDSVEAQRLRIGYKFMKIQ

SEQ ID NO: 32788 - protein, 397 aa, Nanoarchaeota sp.
MLTHKFRLYPNKEQEEKLLWTLDKCRQTYNLLLSELQQQKIIDKAQIQGILPDLKICEPELKQVYSKTLQYECYRLFSNLRALSQSKKNKRKVGKLRFKGKNWFKTFTYNQLGFKLVKTEKRCQNLHLSKIGDIKIRVHRKVEGKIKQITIKKEPSEKWYAFVNEENKEIINKQPTERIVGIDLGLTDIVYDSEGNKICNPRQFKKYEERLVKLHRKLSKKERGSKNRNKARIRIAKWYEKLANSRNDFLHKVSKYYINNYDVIAMEDMDITHMVNNNHFSKSILDASWGKLRQFIAYKAERAGKLYLSVNHKGTTQRCSNCGEKVIKNLSERIHKCPFCKFTAPRDYNSALEIKKLCLQKIGQELSEFKPVEIAMAAELNKLRSTSYQSMNQETSF

SEQ ID NO: 32789 - protein, 419 aa, Nitrincola sp.
MRNQKIGEYRELLADGKGSEIAQGYSHIKKLQGLEFLREVPVQLLRNAASAAFSDAEAARAGLRKFPKMKGRHKKRSVLLTRELFIIEPLGEHGSLLTIFDNATKKRQKLFSVKLPYIPEQLAKQFRISRQGAKFYLSGSYDDGVVNTSNEALLRSYAHLSDEELLCHVTGIDRGVVRPIQTSDGLTITYSPEEAESLRRQVKKKAHYQRILARKKRLNGNKNRHKCETAKQRKLAAKIAKTDAKMADVRKGFAHRASKQVVIAAKPIIGLEDLNLKGMTKRAKPKQEGRRFVKNNAHAKSGLNRSLLNVALGRLGDFIKYKAVDYGKATVEVWAAHSSMTHHVCGSRDTARPDQATLMCHHCGVVENADENAAKVVAQRTVTYIKESAFADQAKSRKTITRRKKKVADPPLVCELASV

SEQ ID NO: 32790 - protein, 384 aa, unknown
  TnpB Polypeptide
MKRIHFRKFEETFSFEDKKATSGIIYKAEADTVTVCGTVFKLKPVRKNDTWLQEAMKYKVKYCRIIREPFGIHYRFFLQLVMEGTPPQKHVIGVGTMAIDPGVSTMTSYNGSKLSFKELAPDVNKYQEKVIKEQNRLSKLTRINNPECYDDKGVHIKGMRIQYSKSMKRAKMRLRTAYRKQRVYVEQSNNNLANEWLEASGSIVKIETMSYKGLQKKSSKTERQDKESIVIDKAGKKRSIRKFKRRKRFGGSILKHAPSGFLSTIKRKVTATCGIVIDVSASKLKASQYDHASDTYEKVSLSDREKIIDGHIVQRDCYSSFVVFYATDENEPDREGCLNGFGKFLVCQDKLIEEMIHDNFSNPNFGTKLINIKKQQLCEEPAAA

SEQ ID NO: 32791 - protein, 411 aa, unknown
  TnpB Polypeptide
MYYAYKYRLKPSDAHREKLDRHRDICRQLYNHALYRFDQILEDAGTLNQRVRSIRDEIPSLKDWWDGLSDVYSTVLQTAVMRIEQNVKSLGGLKKNGYGVGQLKWKPPREFRSFTYSQSGFKLDKKGGQTVLSLSKLADIPIRLHRPIPDDATLKQVTAKKEPTGEWFATFGVEMDREPPEPPKKPEQCVGIDVGILKYAHDTDGTAVGSLDLSGERERLEREQRKLSRKQHGSNNYETQRWRVAECHADLRRKRRDFLHKLSNYYAREYDLVAVEDLNVAGMMQFNSNSRNRASAAWGTFLRMLEYKCEREGTHFISVDPRNTTKECAACGVKSDKPFWVREHSCPSCGFTADRDWNAAWNILRRGIKQLGVGRSESTPVETALPTGTTSVPAKRVIEAGSPITRTSGSG

SEQ ID NO: 32792 - protein, 469 aa, unknown
  TnpB Polypeptide
LSVASGTISRVPRDAAVEKPSLVLVSHTGVPLSRSTTFRFTLDPNREQHQTLLAHAGAARLAYNHHLGRVKANLGQRAAERSYGVLESDLTPPLSWSRMSFINHMNAWKDGRAPDADVSLDEDGNEVRGLVWRAEVSTDVFECASVNAAAALANWSKSRKGERAGKAAGFPRFKSRHKSAPAFRLRSKSKPGQASPVRATGPRGIRFPKLGQLRAREHTGKLATMLRSGRFHVYAASFRFERGRWVVAITGVAAALHHQGRSPKNRHEARVGVDLGVKTLAVVADEHGRVLHTWAGVKALQQAQARLKLANQSYSRTKRDSGGRKKAAARLGKMHARVAHLRNNLLHNITTALARGYTFITIEDLNVAGMLQLRALARHVSDAAFGEFRRQLEYKGPWYGTEVVVADRWFPSSKTCSRCGTINANLTLCDRVYDCGACGLVIDRDVNAAVNLARYTPPPPKASPLPAAA

SEQ ID NO: 32793 - protein, 386 aa, unknown
  TnpB Polypeptide
MRMRSWKFRIYPSRQQENILDDHLATCKNLWNALLEYSKNYYEGTGKFPTRQQLNALTKGTPLFAQVAQNVADRLVKSMRGMVAKRRAGMNAGFPRFKSIERVKSFTYPQSGFKLDRPLELSGIGSIQIKKHREIAGKIKTLTVKKMPSEKWFAIFTSQTEETRAPKKDILPVGIDLGIEHFAYLSDGTAMENPGHLKSSEEKLGDAQRRFSRKKKGSKNGGTARLKIARVYEKLANRRRDFLHKTSRKLVEKYSFIAMEDLNAVGMAKGFLAKSILDCGWAEFSGMLRYKAEEAGCEVVLVEPALTSQMCSNCGLVRKKSLVERWHECACGASMHRDLNAAINILRRATAGHAGSNASGEETSTHYKHNGASIFCEGGSSAIYGG

SEQ ID NO: 32794 - protein, 417 aa, Kitasatospora sp.
VHLRYTFRLYPTPAQRSVLARTFGCARVVYNDALAARKEARRAGLPYPKTAELQKLVITGAKKTAERSWLASVGVDPLIQSLRDLDAAYRNFFDSLSGKRAGRPVGLPRFKSRKDSRQSLRFSRNGFRVRGNGKLYLAKVGDVRVRWSRALPAVPSSVTVVLDAAGRYHAGFVVDVDPGPLPEAVGEVGIDLGLASYAVLSDGAVVDNPRFLRKAEKRLKAAQRELARKAKGSRNRDKARTKVARAHAKVADTRRDWLHKLTTGIVRENQAVYLEDLNVCGLARGRLAKSVHDAGWGTFRRLIEEKAARYGRHVGIVHRSFPSSQLCSQCGHRDGPKPLNVREWACTACGVLHDRDLNAARNILAAGQADRLNAPGGPVRPGVATPRRARPVERGTRLGDLRGTGIRATAAGGIPVP

SEQ ID NO: 32795 - protein, 401 aa, unknown
  TnpB Polypeptide
  misc_feature (291)..(291): Xaa can be any naturally occurring amino acid
VFALKLVRQNYAPSEEVLGLLVTFRKRVNVCLGIGLSTGVTSLKRLSMLSYRELKPFDCPSYYKLCAISKATGILAARRKSLKRGNATKSPYAVRSHLVAYYGFKIQNGSLRIPIGRRRYFDIPLVEHTLSVLSEALVRVRSFTLTAETVGLCISKEVKQIECDATAGVDRNLRALTYGNERKVVHYDLSKTVVTAQTTRSILASFKRNDARIRQKIAFKYGRRMRNRKAQPLHKATKQIVEQAFENKEALVLEDIRGIRRLYRRGNWQGRRYRATMNTWSFSEVQRQLEXKARWIGLPVIRLSRRETMGTSSTCPKCGERLQSDKNHGRELWCRICKSWMDRDMVAVVNLSRRGRLRFDRSKGGTVEAVMRNPTPTVIPGVDALEVSLSSDKLTEPQECF

SEQ ID NO: 32796 - protein, 236 aa, unknown
  TnpB Polypeptide
MLHVPVKEIVQDSSTAKERIAEGRNVCGIHFTNGDAFAVASVMNCEGKELAVRYFKGGKEYTHRCSKVLEKIEKSRKSRGENAGGRVNQKYWMHLKHLGEQYAHQVSLDIVRFCKEQDISLIAFPKYDEEYRRYVLKGAGNFGTLHLSTRIREYLTYKAWKEGILVLDVNAKEMHRICAICGSEITQQNKESKRFICKEGHQGDAYLNVARNAAKRCLEQFRKKAGKGKNVSAKKS

SEQ ID NO: 32797 - protein, 378 aa, unknown
  TnpB Polypeptide
MYRTLKIKLDRSNELIQTSKLWNAACQYVIDYRFAVHDYNKTRLNGAAYKDLRNKYPTLPSALHQTAKDQASDMLKRLRFEKKPFKCPLGAVRFDIRTMKVFLESGYCKLITAFGRLRYDFRLADYYQKYATWKVMNAQLKFTRNACYLNVQEKQPDPEPMIKDTRISVDLGINNIAVCSDNTFWQSGPVKAVRGKYQYLRSKLQSTGTRSAKRKLRELSGRERRFRTDVNHNIANWIVSKPYDQIALEDLTNIKNDKKNKKLGKWSFAELRNAIEYKATAIGKKVIAINPRYTSRTCSRCGFQKKENRNGRTFKCKSCGFQVDADINASRNIATFSRSDRSRLQCQTSQKQHNIIVVASRVLKGGVVDFRREKLDGP

SEQ ID NO: 32798 - protein, 378 aa, unknown; identical to SEQ ID NO: 32797
  TnpB Polypeptide

SEQ ID NO: 32799 - protein, 411 aa, Aquificaceae sp.
MLKAYKYCIYPNKAQRLLLAKTFGCIRFYWNKTLEIKLKALENKEKIPQVLPAALKKEHDFLKEIDSLALANAQLQLERAVSDWFRKKAGKPKFKRKRDKQSYTTSNVNGNIAVDFEKGHVKLPKVGYVKTELHRTFTGTIKSATIRRTKSGIYFVSVLVEGEPKRVGKSERICAIDLGVKDFATICYSDGNIEKIENPKYLSKAEKRLAREQRRLSKKQKGSKNSERQRHRVAKCHEKIANKREDFLHKLSKRIVDDNQVIILEDLNVKGLLKNQNLSKSISDVSWSTFVRYLQYKALWYDKQVMFADRFYASSKLCNVCGYKNDFLTLKDRHWACPVCGTEHDRDVNASVNLLNYGLVHLKDSRAGTARTYACGDSSDSGMAAMSVYESSIDEAGSSMLYNAWHTYSME

SEQ ID NO: 32800 - protein, 327 aa, Oscillatoriales sp.
MLHKAVKIRLYPTQEQQILLSQHFGCTRWWWNYALNKNLTTAYKNFFAGRARFPRYKSKHRKQSIQYPQNVKVLEGIVQFPGKVGKVKAKLHRNIEGTIKTVTISRDPSGKYFASILTESEGENPALSTEGKVIGIDLGLTHFAIASNGCKISKYDNPRHLARHEKNLKRKQQKLAKKQKGSNSRRKARKIVAKVYERVANSRQDFLHKLSRKLVNENQVVVVENLNVKGMVRNHNLAKAISDVSWGTFTNLLGYKLEKKGGKLVEIDRWFPSSKLCSNCYYQIDKLPLNMRQWTCPHCGTRHDRDGNAATNIRAVSTEAHAIIASI

SEQ ID NO: 32801 - protein, 351 aa, Escherichia sp.
  misc_feature (120)..(120): Xaa can be any naturally occurring amino acid
GGQQECEMRRFAGACRFVFNRALARQNENHEAGNKYIPYGKMASWLVEWKNATETQWLKDSPSQPLQQSLKDLERAYKNFFQNRAAFPRFKKRGQNDAFRYPQGVKLDQENSRIFLPKLXPVHPSAPMVGLDAGVAKLATLSDGTVFEPVNSFQKNQKKLARLQRQLSRKVKFSNNWQKQKRKIQRLHSCIANIRRDYLHKVTTTVSKNHAMIVIEDLKVSNMSKSAAGTVSQPGRNVRAKSGLNRSILDQGWYEMRRQLEYKQLWRGGQVLAVPPAYTSQRCACCGHTAKENRLSQSKFRCQVCGYTANADVNGARNILAAGHAVLACGEMVQSGRPLKQEPTEMIQATA

SEQ ID NO: 32802 - protein, 387 aa, unknown
  TnpB Polypeptide
MEEVLTFTFNHATILHMKRTISIKLIMTHEQSDQLKALRTEFNAACNSIIPVVKEQRCWNKVDLHHLVYYPLRLQTKLGSQMTCNVIRAVCDAYKALKLKKSDDVPAINFKPTSSIHYDKRTYSIKENTLSLYTLNNRIQVSMQLGEFQENYLKQGTPKEAEVICRKGTWYFNLSLDYPEPTPFTNAKIIAVDLGENNLAVISTGKIFKGGKIWHEREKYLGHRSRLQSNGSQSAKQRLKKVSGKESRRMKHTDHVISKQVVEEAASAGAGIIVLENLTNIRKRIRARKRERSRHNKWSFNQLQQFVEYKAQARGIRVIYVNPAYSSKLCSVCGNLGKRLKHRFRCLCGSQQHADLNASHNLCRFALSADSAMYAVNHTYVASLSRP

SEQ ID NO: 32803 - protein, 397 aa, Bifidobacterium sp.
MSEKTKTHIAVRFRAYPTVEQARQIDRTIGCVRFVYNLMLETRIAHYQTTWQSCRPTPALYKDTYPFLREVDSMALCNAQLALEKAYRRFFDNGRKGFPKYKSKRRGKASYTTNRIGGNIRLDDNARRLKLPKLGWLAVRQHKHIPNNWKLKSVTVEHRPSGRYMATILFERETQTPEQVKPVNIVGLDYASHGLYVSSDGKRAEYPGYYRKTQDRLALEQRRLSHMTEGSANWRRQKRRIARLHEKTADQRRDWQHKKANALAKTYDAVAVETLNLKGMTARPKPKPDMEHPGRFLRNGRKAKSGLAKSTLDNGYGMFCDLLKYKLARQGKQLVRVDRWYPSSQLCHDCGYRNPQTKDLSIREWTCPSCGVIHDRDVNAALNIRDEARRTVEQYDS

SEQ ID NO: 32804 - protein, 379 aa, unknown
  TnpB Polypeptide
MMTYTYKLYRSKRTAKLDAMLREACFVWNHALALQRRYYSLYGKYIGTVRMQKHFAKRIRRRLLHSQTTQEILQRLDASYERFFKRRCRRPPKFKKARDFSSIVYKQGGFRLSGNVLVVNSIRQHFQFSYSRPYKGRVRQIRIKRSRLGEYYLYIVTDAVAESRTHGKSHEGASVGMDFGLKTYLALSDGTRIDNPLFLKSGLNELRRKSRALSRCAKGSNHRRGRRKDLERCHERIRNRREDWQWKVCHELCQKYGTICMEDLDLTGMTKLWGRKVNDLAFGSFVQKLEHVASRYGTEVVKVDRFYPSSKTCSACQHVNELLTLRDRKWVCPQCGTVHDRDLNASINILRQGIASSGSTRKTVHARQGASATGESPAF

SEQ ID NO: 32805 - protein, 410 aa, unknown
  TnpB Polypeptide
VKKTFKFRIYPSEKQKLRMDKQLSQAKEIYNHLLEKANEKYKSERKMLTKFDMNKYITELKKLHPEYQDIHSQVLQNVSDRLSKAFSNFFKRVKRKRNGENVRAGFPRFKKHVKSMTYPQSGFELLEEQKLQLSKIGRVPIVLHQPLSGKIRTLTINRTQSGKWFAIFSCESNVDASAASFSSSKRIGIDLGIENFATLSNGKTIQNPKFLIESEKKLKELQRRVSKKKKGSKNRAKAVIRLARLHETIADQRNDFLHKLSRSLANEYGFIAVEDLQISRMLHKNNRSLSKYISDASWNRFIQMLSYKAESAGGRVVCVNPKGTTQECSSCGEIVKKSLTVRIHFCPHCKLNILRDHNSAINILKRAETTAGLAGIHACRDPANTLSSEDGASKVEEAGTICDINLSTEV

SEQ ID NO: 32806 - protein, 268 aa, Isachenkonia sp.
VLRHKAYKFRIYPNREQEILIAKTMGCSRFVYNHFLSLWNEAYTKTGKGLTYHACSAMIPQMKKDEQTIWLQEVDSISLQSSVKNLSDAFSRFFKKQNKRPQFKSKKNPVQSYTTKNVNNSIRIVHHSIKLPKIGLVKFAKSQDPKGRVLNATIRKNASGKYFVSLLLEEDIQPLPKTNSAIGVDLGITDFAILSDGQKIDNHKFTSNMEKRLQREQRKLSRRGLQAKKNGINLLEAKNYQKQKRTVARLPGCPVARKSNESTERLSE

SEQ ID NO: 32807 - protein, 361 aa, unknown
  TnpB Polypeptide
VLVNKAYRYELEPNKTQLILLKKHAGCARFAWNWGLAERKRLWEEERKTTNAIELHRKLNRLKKTDFPWMYEVSKCAPQEALRDLDKAFKNFFEGRANFPKFKEKGVHDSFRLTGTIKVFPKHVQLPRLGKIRVKEKTTKCKGRILSATVSREADRWYVSLTVIVEIPDPVPVVGEPVGIDVGLKHFAVLSTGEKIEAPKSLEKNLKRLRRLSRQHSRKQKGSNNRRKSAIKLARLHRRIRNQRRDFLHKLSTRLAKTKPVIVIEDLAVKNMIKNRRLSRHIADAGWREFSRMLEYKTKWYGSKLVVAPKFYPSSRMCSGCGYVLPDIKLSTRYWVCPECGIYHDRDINAAQNLVNYLETA

SEQ ID NO: 32808 - protein, 275 aa, Dolichospermum sp.
MDGWLDMLRSTYNWSLADRIAQYNQQFIQGDYCDIRTKAEACPLTCFVSKNGASGEPWKDAKTNKDGKLKNPRRSAGDIQITALPYLKKARRTLKIRQRRINCKVKGSKNRKKAANKVGRFHKKITDKRTAYQWSVANTIVSRKVDAIALEDLNVSGMLRRCQVKTDEKTGRFLKNGQSRKKGLNRSISDASWSDLILKIEYLAVKQGKVVIKINPKYSSQECRNCGHTDKSNRDGEKFICTECGYHEHADIGAAKTIRDRGFKIVRGDSAKLAV

SEQ ID NO: 32809 - protein, 450 aa, Paraburkholderia sp.
MLRRWTGCQRTIYNGKVSEDRLFAAQRRLELASGKTDVRTPLDQQYAQFKDRELTPWLYEVPSQILRNGAVRWMTARQRQLKGLGRAPRRRTRRDFNTVVITQELFRFIDTGHGVVIELGTKAKPLGQLPFKAHRPYGLPNTIVVRESAGQWFVSFCYEHTSPFILREPHELAYELNRLDDEAIGQVTLGLDRNVRDNCIASSDGRQFRPDAIALERMRRKDVGAKRYQRRIARARKGSANRRKLVARLVRKKAYAPCARNDFAHKVSHALASSDARFFVLEDLKIQGMTRAPKARLEQATGKWLRNGARAKAGLNRSILQSCWGSIHRYLAYKAARRNKLVGLVPAANTSRECSRCGHIHPDNRKDARFVCQRCGFEAHADDNASCNIRTRGIGRLRHGEYEAVKTRKRVAPVRRKESNTTGGRPAHACEGESPRPEHRIERTQDLVAA

SEQ ID NO: 32810 - protein, 335 aa, Paraburkholderia sp.
VVWATGTHGLSRDLRGVDGAQKDRRARLAERSEFGSGAAGASAPANRVRQLFARRAKYPTFRRKDGPQSAEYTTSAFRWDGAALRLAKMDAPLAIRWSRTIPRGAKVTTVTVSKDTAGRYHVSMLCDEVVSARPVAAGKIGVDLGLTHFAILSTGEKIAAPNVFRKNEEKLAKLQRRLAKKQKGSANRRKAKLKVARMHARTADARRDFLHKLSTRLINENQVIAIESPSVRNMQKNRCLSKSISDASWSEFTRQLEYKARWYGRTLIGIDRWYPSSKRCSDCGHTVARMPLNMREWTCPECGAVHDRDVNAARNVLAAGLAVSAHGESVSPMSL

SEQ ID NO: 32811 - protein, 353 aa, unknown
  TnpB Polypeptide
MFLLHPELKKELWGGHLWNPSYCAVTVSDRSREQVLAYLEGRRKNPVKTRRKKRMKIISSYGVELRKQNIPIRQTLEIYRSAVRYLVEVYESVWEELAQIEESKKRFNAAEHLVHTTKRNPARFDFDFCFPQMPSYFRRAAVQHALGSVSSYQTRLEQWKAEGQKTGKPYLKSEQYAMPVFYHDVMYRENTEEKDAAFLKLYDGHDWKWFAVRLKHTDMEYLRKHWSGKKASAPMLEKKHDKYFLRFTYAEEVALNRTPVKEQTICSVDLGINTDAVCTIMRPDGTILGRKFINFPSDKDRMYRVLGRIRRFQREHGSRQVQGRWAYAKRLNTELGKKIAREIVFYASENRQM

SEQ ID NO: 32812 - protein, 400 aa, unknown
  TnpB Polypeptide
MKRTNVIQLKPNKIQNKILKEIMLLSSCIYNSANYIIRQQFLNHEKISSFFDLRQLLQNTKDYQTLGRSYALPRIQVYSETISTRFKLIKSKTQKKVGLPKYLKNRKTNTTIPSYLVFDGERHSIKNKYVIIPLSKYMRKKYKIKHFRIKYNGVLKWKGDQKRGEIHFKDGNFYLYQSVEIKDKIKVKSNIKAGLDLGIKRLLAVYINNGQDKVIGSNRFYKQWKHYTKLISEEQSKLAKINMKTSKNLQKLFRIRTKWQNNLYNNLVAKLFRVLRKNNVSQLVVGDIKYIRNSGSKGKKVNQMINNYWSFDILLRKIENKSEEFGIELLKETEEYTSRTCPICGDDSKTNCKDRIFICSFCNYIDYRDVIGARNILKKSMCGSLQSTHWNETVPLKVVT

SEQ ID NO: 32813 - protein, 410 aa, Thaumarchaeota sp.
MPAVGFRFRAYAGQRTLGALKAQLRLACEVYNTLRRADIDFRRENGRGLSLTELRQLALDLRKRNEDYRQLYSQVAQEIADRFYNAKRRFLEGSARRFPREKKPHRYYSLTYPQKGWRILSVREIRAGSRNRKKLITLRLSHLGTFRVIAHRDFPMDDVRRVAVKLAGSGRLYVSFFVEDYEFPRLPGTGRAVAIDVGVEKLLVTSDGEYLPNPRPYEKALKKLRRLQRELSRKRFLSHNWLRTKVRLARAHEHLANLRRDTYMKLGRYLAERYDVVAMEDIDVKRLIGESSRALRRGLQDAALGMMRSIVKYQVEKYGKAFLLVDPRDSSRACARCGFVKHDLRLGDRAFECPACGWRVDRDYNASLNALRRAGREPPAAPVELRPLPAAEGRGQGGAVKQEASPFRAG

SEQ ID NO: 32814 - protein, 391 aa, unknown
  TnpB Polypeptide
VIRTYRYRLYPTKAQARTLDFLLWQGRTLYNAALEQRITVYKERGKGVSYYQQWAYFRDLRNANPDTLGQLNATSVQQMLRRLDKAFVAFFRRVKAGETPGFPRFKGRDRLRSLEYRHGDGCKLRMGERVMLYIQNVGEVKVKYHRPLPDDAAIKHVVIKRRAHRWYACLMLDLPDPVVPEHRGPVVGVDMGLSHLLALSDGTLVENPRWLRRSLAQLRVAQRRLSRRQKGSARRRKAAAQVARLHERLANQRRDFWHKLTRQLADTYSLIALEDLTLAFMTANHHLALSAHDAGLAEFQHLLAYKAEEAGTQVVTVKPAYTSQACSACGVVVKKDLSVRVHVCPDCGLTLDRDVNAARNILMLAVNSARTGPPERNVAGYGERALGSSPL

SEQ ID NO: 32815 - protein, 423 aa, unknown
  TnpB Polypeptide
MQLVERHLIKPSHELYKTLDDLTFKAKNLYNHGLYLYRQSYFEHKKNPEAQTLSWGDIDKTLREQGHDDIRALPSKVAGAVLKNLGENIASFWKLVRLKNKGEQAWEPKLPHYLHKTEGRYPLSFNYQTFGTKRGSNNELFLCPKGLNIPIPTRVANPKQVRIVPDHNNFIIEVIYDAQESVPKSTSKYAGIDLGVDNFATITFSTENNPLIIKGLELKSINQGYNRLIGKAQSLLPDSLKTSKPIHRLWSRRSWILKTKIHQMTAFLATLFDEMQIEKVFIGKNTGWKQGLPFGKKVKQRFAYLPHETFIEQLQYKCQLRGITVVTQEESYTSKASFLDDDDIPVYGEAENPKFSGHRIKRGLYKSGDGRLINADVNGSYNIMRKGLMNNNQSFNTDNPPIHPLAVKGIGEESNDKLVQLYM

SEQ ID NO: 32816 - protein, 391 aa, Azospirillum sp.
MLNRGYKFRLYATPEQEVLFGQFAGVCRLVYNLALEQRRDWWRQFKANTGRSISYPSQARELTQLRAEFDWVAAVAQCCQQQALRDLDRAFAGFFSGRSGYPTARKRGKDDRFRFIGRECPWRKINAKWAVVRLPKIGEVKLRLTRDIPGTIKNVTVTSDALGWHVVFSTEVEHDAPQNFGPSVGIDRGVVHTLALSDGRFVDMPKERLNVLDRRARKQARKLSKCKRGSNRRAAARKALARTKAKMARVRLHWNHERTTEIARTYGVVVLEALKTRDMTASATGTAENPGRNVRQKAGLNRAILGNAWHQFETLLSYKIAERGGELRRVNPAYTSQCCAECGTIDKASRESQATFRCGHCGHTANADTNAARNILRAGTQPAPRYSFGGR

SEQ ID NO: 32817 - protein, 359 aa, Ktedonobacter sp.
MKQTMLLKLAPTTPQHQALLETMHAFNEAANYVASIAFAEKTADKFRLQKLVYGVLRTAHKLPAQLAIRCISKASEAYKRDKSIQPHFRPEGAVVYDPRVMAFKGINTVSLLTLLGRVLVPFLIGGYQQTRMGAIQGQADLLYRRGIFYLAVTLDVPEPALDEAKGTLGIDLGIVNLATDSEGESFSGQAVEHNRKRHHALRQRLQKRGTKSALRHLKNLSGKEARFKRNTNHVMSKQIVQKAKANGQAIAIEDLRHIRKRTDSTVRRSQRAKHSSWAFGQLRSFLSYKAALAGVPLHLVDPRNTSRTCHVCGHCAKANRKSQASFVCQQCGLSMNADFNAAINISVAAVMQPIAAGRA

SEQ ID NO: 32818 - protein, 419 aa, unknown
  TnpB Polypeptide
MQLCAKIRLEVSETDSATLEFMQAKCRGLYNWWIMKLRNGEKWSFKRCKKTLAESRVHDPELDDVYGKLLAEVYYRLDAAMGAFFRRYQAGETPGFPRVRPRHTFFTLCYPAMYLKVEGKMLVLPTAGGGRHGKKRFPNMVACLTEEPPVEFGEVAISRDARGNYYASFTYQEQEKTPERVEGQADYLAFDLGIKTLATGVNEQGRVYTVGGFKGHQWYNKQLDKLRSKRDKCKKKSRRYIHLSNVYKRVSEKKRNKRKDSLHKASHLIAHTLVERTVIVGDLSQRQMVTQQHVERNKHLNRAVYNEWGLYTFTQMLQYKCDLYGKELVFLDERYTSKDCSVCGNRQDMPLWKRTYCCTNCSLAMDRDENSAHNILARFLAGQPPYTLHAECDVLQDGSADVASTGLAHIQEVQQLELW

SEQ ID NO: 32819 - protein, 373 aa, unknown
  TnpB Polypeptide
VLNRTFGCVRVVWNRTLAARQTRWHMAGTGTSYAESDRALTAMKKDPELAFLAEVSCVPLQQALRHQHQAFTAFFARRARYPRFKSRRSHQSAHYTRSAFSLRGGELRLARISTALPYVWSWPDVDVAALDPAMVIVSREPDGRWYVTFTIDTEDPQPLEETGHAIGIDLGVTDFAVTSDGKRIVNLRYLERKAKNLARYQRRLARCQNGSANRRKAAVKVARAHRKVRHARRDFQHRASTRLVREYDVIVIEDLNVSGMVRNRHLARAISDCGWGEFRRQLEYKCQRYGRRMVVIDRWYPSSKACSACGHLLADLSLSTRHWRCPCCGARHDRDVNAAKNILAAGLAVAWGDPGDACGAGVRHPGPLGCNRR

SEQ ID NO: 32820 - protein, 333 aa, Trichocoleus sp.
MWGKHLNCAKLQAHIAKLRKRKEFWQLVGSQAVQDICQRIEKAYQLFFKHNKKGVRPPGFKKVRRYKSFTLKQAGYKFLGGNRIKIGSKVYQYWNSRVIEGRVKTLTIKRTPLGEMFMVVVVDSSSEPEIKFETSRIAGFDFGLKTFLTCSDGSTIESPQFFKQSLSDVKIASRRHSKKVKGSNNRECARKHLVRKYENVSNRRSGWFWKQAHDLTDKFDVLCFETLNLKGMQRLWGRKISDLAFGEFLKILDWVAKKKGKLIVYIDRWYPSSKTCSPCGHVLELDLSVRVWRCPSCGCINGRDENAALNIQAVGASTVRLGDVRQSKAAIAV

SEQ ID NO: 32821 - protein, 436 aa, unknown
  TnpB Polypeptide
MKFLTIKYHYKANEKEKRLLKFLCHLSKNLYNTTLYKLRQDYFANNKIDTYFSYNNILSSNDNFHLLNTYQSMCTIRSAYYMMSNFIRFQRKENVKLPRYLNKYGYYPLYTDQIRVVLHNNKKCIKLPLSNLLRTNKFYKIKYDDILLNTFIKELHNMKISAFYLPIPKVIENNKIHQVRIVPLYNATYFSIEFSYEVEDKEEIELNANAYAGIDIGINNLATVCINNGNSFIIDGKRLKSINQLHNKNKKRLQSKLAKNLKNSKRLIRMDIHYKNLINDYINKAVKQTVDKIINEKVSHVVIGYNKGLKKNGITNEMLKGKDKKKVNQSFCMIPLARYINKLKFKLNEVNIDVKIINESYTSKSSFIDNEEIEKKDNYLGKRIYRGLYQASNGRVINADLNAACNILRKSKPNDEIISNLRDRGLTIPYRVQVRL

SEQ ID NO: 32822 - protein, 256 aa, Dolichospermum sp.
MLGYGYGFYVATQAIATLWLTPRSANVNVPHPNLQIKTFFDLLVHFSDRYQIDNPKFSTNKKARRTLKIRQRRVNRKVKGSKNRKKAANKVGRFHKKITDKRTAYQWSVANTIVSRKVDAIALEDLNISGMLRRCKVKTDEKTGRFLKNGQSRKKGLNRSISDASWSDLILKIEYLAVKQGKVVIKINPKYSSQECRNCGHTDKSNRDGEKFICTECGYHEHADIGAAKTIRDRGFKTCIERSRNIVRGDSAKLAL

SEQ ID NO: 32823 - protein, 451 aa, Dolichospermum sp.
LKSQFSLHQKLVGKNKKAMGVQQVLLSPNNETKAVLEYLCEQSGKLYNSGVYFARQTFFKTGKLLTGKFDLIYEPSVSKTMVAQSMPSIPAQQTLLSVTESFKSFKKLRSLFLKEQLHFKPKAPGYLTSSKLFKVAYPNSGGQKPSLVNGQLRFSLGLTVKRWFGISEFFLPMPSNIDIAKVKEFTILPKNGVFYLEMSYEVEKQNHVLDINQALSIDLGTADNLAACVDTFGNSLLIDARAMKAMNQLWNKKVSTRKDGKSEAYWDNWLDRVTRKRNHQMRDGINKAAKLIVDHCLKYGIGTLVIGWNEGFKSNANMGRINNQKFVQMPLGKLKTRLIQLCDLHGIRFQETEEAYTSKASFLNGDSLPKFGEKPDGWKASGKRVKRGLYQSGNGSMINADLNGAANILRKVASNLSLDLGLLGRRCLTTVARIKLWALPKFTLSAESQRL

SEQ ID NO: 32824 - protein, 397 aa, Actinomadura sp.
MLTGRRYLLALTPEQEQFAGLIGDACRTVWNVGLEQRRAYRRRGASVGYVEQARQMAEAKRDFPWLAEAPSHTLQQTLRDLERACGTHGTFRVRWRSKSKTAPSFRFPDPKHIAVERLCRRWGRVRLPKLGWVRFRWTRPLGGELRNATVLKDGGRWYVSFCVQDGMAEACPNGGPAVGVDRGVKAAVATSDGHLRDRAFITPGEAARLKRLQHKLARQRKGSNRRAATRARIAALNARVRARRTDFLAWTANRLTRDHELVAVEDLKVRSMTASARGTLEAPGVHVRQKAGLNRAILAKGWGALLTALEHKARYNGSRIVRVPAAYTSQRCSVCGLVDAKSRESQAVFACTSCAYTGNADVNAAKNILAAGLAVTGRGDLAAGRSAKRQPPERDAA

SEQ ID NO: 32825 - protein, 424 aa, Actinomadura sp.
LPSGSVINRYGAGVQLRYNYRVYPTPGQRIALARAFGCARVVFNDGLRARLDAREQGLPHLSDAELSKRVITQAKATSERAWLDEVSAVVLQQALADLNAAYRNFFASIRGDRTGRKVGLPRFRSRKDNRQAIRFTRNARFRVLDNGRLRLPKIGEVRVHWSRPLPSAPSSVTVIRDAAGRYFASFVVETGQEEMLPTLDCEVGIDLGLTHFAVLPDGTKVTAPRFLRRAVRRLKRLQRALSRKQKGSANRKKAAIKVARAHGRVADSRRDWQHKLSTAIIRDNQAVYVEDLCVAGLARTRLAKSVHDAGWAAFTAMLEYKAQRYGRRFARVDRFLPSTRMCSDCGRINQKMALDVRAWHCPCGSTHDRDLNAAINVLAAGRAESLNDRGAHVRPAPAPAARKEAVTHLDAALTALSVEGISAL

SEQ ID NO: 32826 - protein, 339 aa, Actinomadura sp.
MAGCFGVRRALRHLQTAFTNFFAKRAAYPRFKSRKRSRCSAEYTRSAFTWRDGRLTLAKMAESLDVRWSRPLPEGSEPSTVTVSCDGAGRWFVSILCQDTIPAAAFTDAAVGTDAGISSLVTLSTGEKIANPRHERRDRARLAKAQRSLSRKAPGSVNRDKARRKVARVPARIADRRRDFLHKLSTRLVRENQTVVIEDLTVGDMLKNHTLARAISDAAWRELRRMLEYKCAWYGRDLVVVDRWFPSTKLCGTCGTTHAKLPLDVREWTCECGSVHDRDVNAARNILAAGLAVSACGDGVRPQRGSSRTGRSSAKQETQWATTGTLRLQAEEEVKPCTE

SEQ ID NO: 32827 - protein, 406 aa, Actinomadura sp.
MARQVRRAFKYRFYPTEKQAAELSRTFGCVRLVYNRALEERTRAWRRERRRISYTQSSAALTRWKQTPELAFLAEVSCVPLQQALRHLQAAFSNFLAKRAAYPRFKSRKRSRCSAEYTRSAFTWRDGRLTLAKMAEPLDVRWSRRLPEGAEPSTVTVSRDSAGRWFVSLLCQDTIAAAPATNAVVGLDAGITSLVVLSTGEKVANPRHERRDRARLARAQRELSRKAPGSANRDKTRRRAARVHARIADRRRDFLHKLSTRLVRENQTVVIEDLTVGHMLKNRKLARAISDAAWRELRSMLEYKCAWYGRDLVVVDRWFPSSKLCGTCGAVRERLPLDVREWTCGCGAVHDRDVNAARNILAAGLAVTACGDGVRPQRDTSRTGRSSAKQEPQRATAGILCLQAEE

SEQ ID NO: 32828 - protein, 419 aa, Actinomadura sp.
VDAATFGMSRWHDGVVQLRYNYRVYPTPGQQLQLAKAFGCARVVFNDGLRVRQGAREAGLPYISDGELSKQVVTNAKKTGERAWLGEVSAVVLQQALADLNTAYRNFLASLGGQRRGPKVAAPRFRSRKDRRQAVRFTRNARFSITVAGRLRLPKIGDVRVRWSRELPAEPSSVTMIKDASGRYFASFVVQVAAEPLPTTPGDLGIDLGLTHFAVLSDGRKITNPRFLRRAEGRLRKAQQTLSRKEKGSANRKKALVKVARAHARVADARRDFAHKLSTSIIRDNQAVYVENLSVKGLTRTNLAKSIHDAGWSAFTRMLEYKAARYGRTLVKIDRWFPSSKLCSACGAVADSMPLGVRSWTCACGAEHDRDVNAAINILAAGRADRSNACGDLVRRPLAVARVSETGSHRGAASTRGTD

SEQ ID NO: 32829 - protein, 394 aa, Actinomadura sp.
MRRSFKFLLRPTARQAGSLAACLEDHRQLYNAALEHRRTAYRMAGVSVRYGDQSADLKHIRADDADGQGRWSFCSQQATLRRLDKAFAAFFRRVKAGRQAGFPRFKGRGWFDTIEWPRDRDGCRWDSQPDHPSATFVRLQGIGHVRVHQHRPVAGTVKTISVKREGPRWYVILSCDNVPTAPLPQTGAAAGIDLGVASLATTSDGAHFANPRHLRSAAERLAAAQRDLARCKRGSNRRCKAARRVAALHGKIRRRRLDTAHKAALSLVRDYDVIVYEDLRIGNMTRSATGSVEEPGRNVAAKTGLNRSILDAGWGVFLRVLAHKAESAGRELIAVDPRNTSRTCGACGHCAAGNRITQAGFRCQACGHTAHADVNAAINVLRAGLALRDSAEAV

SEQ ID NO: 32830 - protein, 408 aa, Actinomadura sp.
MYSSRVQLRYNFRLYPTPGQQQSLARAFGCARVVFNDALRARQEAHAAGLQYPSDGELSKQVITRAKKTSERAWLGEVSAVVLQQALADLNTAYRNFFASLSGTRKGRGAALPKFRSRKDRRQAIRFTRNARFKVTPGGKLRLPKIGDVRVRWSRDLPSEPSSVAVIKDAAGRYFASFVVEVPGDPLPQVAVEVGIDLGLTHFAVLSDGRKITSPKFLRRAERRLRKAQQALSRKQKGSKNRRKAAARVARMHARVADARRDHHHKLSTQLIRENQAVYVENLAVNGLVRTRLAKSVHDAGWGRFLVMLEYKAQRYGRSFARVDRWFPSSKLCGACGAVADSMPLNTREWTCACGTVHDRDVNAAKNILAAGRADRLNAWGGTVRPPVQGGRTQRNRKPQKCRTRGTG

SEQ ID NO: 32831 - protein, 210 aa, Actinomadura sp.
VLSDGTKVTAPEFLRRAARKLKRLQQALARKQRGSQNRKKAVVKVARAHARVADTRRDWQHKLSTQIIRENQAVYVEDLCVTGLCRTRLAKSVHDAGWAAFTGMLEYKTARYGRTFCRADRFFPSTRMCSACGRVNEKMALNVRTWDCPCGSHHDRDINAARNIRAAGQADLNARGAHVRPGLVPAARNEAGTRPDAARSTRSVEGISVR

SEQ ID NO: 32832 - protein, 246 aa, Actinomadura sp.
VEETGSCGAGRGSRSVSASAGLPRIEARLPGRCILRPAPAGAAPSPDRVHQLLHQARRLQAEGSANRDKACRKVARVHARIADRRRDLLHKLSSRLVRENRTVVIEDLTVSNLLKNRGLARAISDAAWRELRSMLEYRCAWYGRDLVVVDRWFPSTKLCGACGTVGAKLPLDVRAWTCECGAVHDRDVNAARNILAAGLAVTACGDGVRPQRDTSRTGPSSAKQEAQRATAGIPRLQAGEEVNVLP

SEQ ID NO: 32833 - protein, 388 aa, Actinomadura sp.
MYNSKVQLRYSFRLYPTSGQQEAVARAFGCARVVFNDALRARREAHAAGLPYPSDGDLSKQVITEAKKTSERVWLGEVSSVVLQQALADLNTAYRNFFASVSGKRRGRKVAPSRFRSRKDSRQAVRFTRNARWSITAGGRLRLPKVGDVRVRWSRDLPCDPSSVTVIKDAAGRYFASFVVETTQEPLPEVAAEVGIDLGLTHLAVLSDGRKVTSPKFLRRAERRLGKAQQALSRKQKGSANRRKAVARVARMHARVSDARRDHHHRLSTQLIRDNQAVYVEDLAVNALARTRLAKSVHDAGWSRFVGMLEYKAARYGRTLGKVDRWFPSSKLCSACGTAAEAMPLNVRTWTCPCGAVHDRDVNAANNILAAGRADRLNACGGTARPAA

SEQ ID NO: 32834 - protein, 511 aa, unknown
  TnpB Polypeptide
VNKEQRTYHCRIPTGANADSALSAYAAIYGKAERSLFARLRSGGNLTDLKREFLPKYGITARQFNSLAAEIKGKIASIKERRVGLIAEAEHRIARAEDVLRTISDPAKRHQKKRRLATLEVRLAALKADKDAGIIRLCFGSKKLFRAQFALKENGYDSRKEWRDDWRSSRNSQFFVVGSKDETAGCQSCISSVQDGGSLDLKLRLPNAMAGSGKYLDLRGLTFKHGHNAISAAIGRNLSDNKTEWQPISYRFRKDAQGWRVFVTVAVPEIPLASISHIGVIGIDINAGHLAVTETDRYGNPVKHFPVACVTYGKTKDQRSAVIGDAVKRVIAYAVSKQKPLVIEKLDFAKKKAELEKESRKHARMLSSLAYSGIQAILRARAFDAGVTVHDTNPAYTSVIGKHKFSARYGLSGHAAAALVIGRRFSGLRETLPVQLHGTLPLSARNRGRHVWSKWASVSRMAKAAHEAHGRSGTSRSSPSPVSVRAKARPVTYPFVAGGIPAGESSPALFG

SEQ ID NO: 32835 - protein, 415 aa, unknown
  TnpB Polypeptide
MHLVEQHVIRKTDPRFATTDRAAFASKNLYNAANFLVRQAFIHEGVYLNYAAIFHRLKDHEAYCALPRKVSNDVLRQLDKNWRSFFAARAAWAEDPAKFVGRPRLPGYKDKQAGRNLLIYDLQAISATGLQRGEIIPSQLGISIPTKHTNVKQVRIVPRKGYYVVEVVYEREPILAAVNPSLCAGIDIGLNNLAAITSNKAGFVPRIVNGRPVKSINQFYNKRKAELQHKLGTAGGTTGTTAQLERLTAHRTRQIDHYLHTASRRIIDLLVAEGIGTLVIGKNPLWKQETRMGKRNNQNFVSVPHARFIAMLTYKAVLVGIQVKITEESYTSQASFLDADPLPVYDPQHKEKPPTFTGRRVKRGLYRAANGQRFNADVNGAYNIMRKVLPDAFGKGIAGAAVHPVRLAVQTKRVA

SEQ ID NO: 32836 - protein, 435 aa, Streptomyces sp.
MSRFRMYPTPAQAEQMLTHCAHARYVWNLAVEQHSHWRRWRKSAPGFAEQCRQLTEARRENEWLGSGNADVQQQALKDFAKAKNARFTSGFGEPTWRKKFRHEGFRVIGTDRVPECNADGSPKLNAKTGKQVMGRSVVVHRLNRRWAQVKVPGCGWVRFRLSAKGKGKGVKLPDAKTFRVTFRNGQWHIAFAVIPEPTPAPGTGEAIGIDRGVTITAALSDGRKLNCPQLTVKERARIRKHQRRAARAKKGSPEKAAEYAKAARLKAREVNRRKDWCEKSSTMLARSYDLVRFEKLNIKNMTRSAKGTVEQPGRNVAQKAGLNRSILAQGWGLLRQRTEHKAPGRVEDVPAPYTSLRCSACGWIEKKSRKSQADFACVSCGFTCNADTNAATNVAAGQGGIPRPRRTAGAGGVTTATGSSSAREPQPDQVGIPLF

SEQ ID NO: 32837 - protein, 353 aa, unknown
  TnpB Polypeptide
MILTYKVRHHQDFSLQLRQAKQVAKFAIANRDKLSSKHVAHFGLKSAISNQILREYGRNKKCKTVSNIKLIVPSQAVKFSAGTVEVVCLGLKFPFDKTCEKINQIEVDREWLYVSVSVTDEPQYKVEGWVGIDRNTTGNCAVVACTKTNKVMFLGKKAQHVHNKYKNIRKKLQRLKKLKKLKTIKRRESNITKDLNHKISRKVVNYAKKHRCGIKLEKLEGIRQRTKQAKSFRYSLNSWAYYQLQQFVEYKAQIAGVPVVYIEPAYTSQTCHKCGQLGNRSGKAFKCTSCGYASHADGNASWNIAYSEKFLGEPKAEHCCTSASLQNSVYTQRLQQAGDCCKGTTDSPQLALA

SEQ ID NO: 32838 - protein, 424 aa, Cyanobacteria sp.
VKLTHIYKIKPFTEQVAIMDTWLEMLRRHYNYALGQRFDWLRRTRSSIDQCSLVSEPIGDIPDKFPGYNFQAGELKVTKELFPAYQEIHAEVQQQNLKRLDKSWDRWMKPDKSGKRAGRPRFKKKGQLRSFTFPRINCPKAGVNRIKDGILTLSKIGSMPVIMHRPLPDGFELKTATLVKKADGWYIAISLEDSSVPAPLPIDEIKSAVGIDLGLKSFLVTSTGEFVAVQQHYRKTQRHLARQQKKLARKQSGSTNSEKQKQKISRIHQRIGRKREHFHYNVAHQLVRNYDLIAVEDLNIKGLARTKLAKSIYDVAWGKFLTILEAVAVKCGVHFVKVNPHSTTVDCSQCSAKVPKTLSVRLHQCPKCGLELDRDENAAINILYKGLTTVGLTVAACGRLSGYTPDEAGMPNSDVRMLTLYSQN

SEQ ID NO: 32839 - protein, 307 aa, unknown
  TnpB Polypeptide
LPSRYELTFYKQERDLDKIDQGIISLKLYDGKTWDWHSFKISKADAKYISRMQKSRTMLSPVVEKVRGRYQIQFSFKENKELVSDSNPLSYRILAVDLGINAPASWSVMEADGTVHAKSVIHLRCDEDRLRHLMNRKRMYQQAGKKSHCIYRMLTDANQLLSINTTRKIMEIAVLYNVDCIVFEHLDRTGHVKGKSYRERIHLWRVNDVQKRVDLQAHRHGMRISRVCSWGTSRLAFDGSGPVIRDKKNYSVCTFQTGKRYNCDLSASLNIGARYYLREYAKQKDCIELPKTPQRTYAMLIPLRKSA

SEQ ID NO: 32840 - protein, 480 aa, unknown
  TnpB Polypeptide
LGFLDEPVGRLPTIFASPGTLSFSTPKQKNGNVRTVRLRLLPNGSQERKLRRIADTAAKLWNGLNYARLIQFRASGKINFKDTGHEFYHRYKDKLGVNAGQVINLNNNAWKSYFKLLKLYRQGKLPRFNGKPSPPGFWRDKVLGRRLLRILVRNDRYYLEPISNGEGYLVLKDWNLRIKYAGRIKWSGKQGMLVIKLEGNRWFAYVPIEVGSKPVKTNPKGYVKGIYDRVQIENPKGSNKAFIDIGLNNLFAVVFNHTDTAILIKGSSIKAEYYWWKMEIKTYQAVRDWLRNRGFNAWRRYHMFYLHAEYKQHERLRHYYRTAVRFLARTLHEMGANEVFVGYPYMLSQNNSNEYNANIWWFNKVIRWLGEVLQEYGIKLHVVNEYGTSRQCSICNANHENGRVKRGLYVCETTGIKINADLNAARNIAKRVGYETPIPTKILSHIVTTNGVKPLTPKEGVTVETPTVKPSPPKGEKGVI

SEQ ID NO: 32841 - protein, 198 aa, Peribacillus sp.
MDSMTLKRNNQVNDYMKKSVRIIINHFLENQIGTIIVGYNEDFTRNINIGKRRNQQFAQIPFGTLREQLSNLCEQYGVIYKEQEETYTSNASFFDNEDLPKWNPADKTEHVFSGKRIKRGLYRASTGYEFNADMNGALNILRKKNLLDCKTLQARGRLARPPRIGGHLIKLLVQNPTEIPQDMRLAALAVGEVKRLQG

SEQ ID NO: 32842 - protein, 410 aa, Streptomyces sp.
MVVQLRYSFRLYPDTSQQEALARAFGCARVVFNDAVRAREEARKAEQSFPTGAELSKRLITEAKRTVERSWLGEVSAVVLQQSLRDVERAYRNFFASLKGDRKGPRIGRPRFKSRKDKRQSIRFTANARWNITDNGRLSLPKIGAVKVKWSRTLPTTPSSVTVIKDAAGRYFASFVIDTDPAVDATRMPETDRTIGIDLGLTHFAVLSDGTKIDSPRFLRRAEKKLKKTQRELSRKQKGSKNRDRARLKVARAHATVADARREFHHQLSTQLISENQGIAVEDLSVAGLAGTRLAKSVHDAGWASFISMLEYKADRYGRTLVTIGRFTPTSQTCSTCGVKDGPKPLNVREWTCAACGTVHDRDHNAAINVKTAAGLAVSACGAPVRPGAIPAQREETGSHGFPTQARAAA

SEQ ID NO: 32843 - protein, 303 aa, Mahella sp.
LQAIIDFNDPVIAYGLSCPIKFVRLVKKTIKGKTRLYVQLICEGIPYQKEKNYIAEGKIGIDVGPSTVAIVSDTKSSLNLFCHELKDIHGKIRVIQRKMERQRRANNPDNYNSNGTIKRGKLHWHNSKRYLASKAQFTELNRRQAAYRKSLHGQLVNDILRCGNTIYLEDISYKAFQKNFGKSVNYRAPSMFVNMIKTKLLRVQGKFEEFPTVSTALSQMCQCGRRQKKELRVRWHRCECGINMQRDLYSAFLARHVKQNSGGKYYLDLQSATNEWAQIKPVLDEAINNVKMTYNHIPKSFGI

SEQ ID NO: 32844 - protein, 465 aa, Mahella sp.
MPEHAYIMLIIILYGRLNGGETVRLKKNDPNARQRIIQFELNSNRKQCIILSALTYASSKLWNVANYERYEWQKESGLPYPDWYEQKAKLKENFWYKNLPSQTAQEVFKQLDEAWSSFYKLKKTGGIENPRPPKYKHSNFNIRYLNKGFVISDGVIRLTVPKQQKLYMKQKYALDTDFLYIQIPDRYKNFAGKAKVIEIIPIPKSSRYKVNIIVDLPAAQYKQDNGIYMAIDLGINNLMTCYISTGKTYIISGRQLLSINRYFDKEISHYQSIAYAQQSKAGVKHNSTKRIQKLYQKRSRQVEHLLHAATKNVIDIAISEHVSAIVIGDLSHIRDNKDMGHVNNQKFHKWPFKKVLDLISYKAQDNEIVIEPPQDESYTSQCSPYAKEVSEATAQGNNRKYRGLYIAEVEAYNADCVGAYNILKKYLCRIGKANPAVVALDTPEMYRWNRYRFIGNPKLANLLAM

SEQ ID NO: 32845 - protein, 391 aa, unknown
  TnpB Polypeptide
MFKSYKYKLKPNEEQIVLLNKHFGSVRFVYNYFLNERKKEYETNKQTLTYLDNAKSLTQLKKIEDYSWLNEINAQSLQHSLKNLEGAYNGFFKKRSLFPKFKSKHNKNSFCVPQSVKLIKNKLFFPKFSDGINVILHQKFNGEIKQCSMSKTPTNEYFVSILVESTHDILPKTGKVIGIDLGLKDFVITSEGYKYKNNRYTKTYAKKLRRNQQHLSRKIKGSNCYDNQKLKVAKTHKKITNSRVDNLHKVSIDLIRKYDTIVLEDLNIKGLIKNHRLSKHISDASWGTFITMLTYKALWNEKQIIKVNRFFPSSKICSCCGYINQNLKLNIREWTCSSCGSKLDRDINAAKNILKEGYKIISLGTDDYRSGDETRPVLIGTIDETSKILNI

SEQ ID NO: 32846 - protein, 402 aa, Escherichia sp.
MQRLQAYRFELKPSGEQQRLMRRFAGSCRFVYNKALAMQQERHKAGEKKLGYASLCKSLTEWKTQTEMLWLSETPSQALQQALKNLERAYKNFFEKRADFPRFKKKGQSDSFRYPQGIKLDQGNCRVFLPKLGWIRYRNSRDVLGEVKNVTVSQSCGKWYVSIQTEREVEQPLPQGGAVGIDMGIARFATLSDGTFYAPLNSFKKHQQQLARHQRRMSRKVKFSNNWKKAKARIQRIHSRIANARKDFLHKTTTTISQNHAMVCIEDLQVRNMSKSAKGVSERHGKQVRQKSGLNRSILDQGWGEFRRQLEYKAAWRGGFVIAVPPAYTSQTCPCCGHVSADNRQTQARFACVECGFEENADVVGAINILARGHRVLACGEPVQSGRSAKQEPAEATLAIAA

SEQ ID NO: 32847 - protein, 398 aa, Pseudospirillum sp.
MEKTGIIYSMIKATKVRIYPTPEQADFLNRQFGAVRFAYNKALHIISSQYKRHGLKLKAKQDLKPLLAVAKKSRKYHWLKDFDSIALQQACINLDKAFQNFFDPKRPARYPKFKRKHGKQSSYHCTSVSMGENWIKVPKMEPIKARIHRKVEGKLKSITLSRTVTGKYYASLLIDNGLDTPAPMQTLDSVLGLDMGLTHLVIDSDGNKIENPRFLKKASANLRRKQKALSRCQKGSKGRAQARLQLAKAYERLKNARADFQHKLSRTIVDENQAVIVETLKVKNLLKNRTLAKYIADAGWFSLVQKLEYKAKEQGKHLVKIDQWFASSKTCACCGHKVDTLPLSVRYWTCPACTVALDRDINAAINIRQQGIIKLRAEGLSVPANGGLRQSGHAPVAA

SEQ ID NO: 32848 - protein, 371 aa, unknown
  TnpB Polypeptide
MIRAHKIRLYPNNKQVTYFSKACGVARFAYNWALSEWIRQYEAGEKVNEGILRKQLNAIKKEQFPWMLEVSKCAPQLAIKNNLNNAFKNFFRGLKQQANTGYPKFHKKGINDSFSLSNDQFKIDKQFIRIPKLGGVRLSEMLRFDGKIIGATISRKANIWYVSIQVELPEEILPTSESQAVGVDLGIKCLATLSNGTSIVGSKSSRKYEKKLRRLNQSLSRKIGSKKGEEKSRNFMKTKLSLSKIYLKISNLRSDETHKLTTMLTEQFNVIGIEDLNVKGMMSNHKLARSVADMSFFEFRRQLEYKSAGRGSKIVVADRWYPSSKLCNVCGEKVEELPLNVRDWECKHCGTHHDRDVNAAINLRNYAVQHV

SEQ ID NO: 32849 - protein, 342 aa, Bacillus sp.
VSNLKVDSIRGTVQTLKNLKKKMVLAKKVRLIPTKEQETQLWKSVGTARWAYNWALSKQDENYKSGGKFISDAMLRKELTTLKKNEEFSWLYEVSNNITKQAIKDLCNAYKNFFKGLADKPRFKSKRKSKPSFYNDNVKLKVKGNIILVEKVGWIKTSENIPDEKFYNPRISHDGKYGYLSVGIEESKPIVELTDVSLGIDVGIKELAVCSDGTKKKNINKTSTVRRAEKRLRRLQRRVSHKYEMNKEGNRFVKTSNIIKIEKKVQHLHRRLTNIRLNHLHQSTSEIVRTKPYRIVMETLNIKKMMKNKHLSKAIAKQCLCKFKRQIQYKCEKYGIEFVEAD

SEQ ID NO: 32850 - protein, 455 aa, Hydrogenibacillus sp.
LNICTNFGILALKEVKSMAWSSASRPDRLLLTRQFPIGPDRLPEFEPIMQAANRIWNSCVWHSREIREKENRWPNEGELKAKFKFFKVWKELHSQSAQAVVEEYFEAVSGYRKHRENGHEEMRPPDFKPKKHLRTVTWKKQGFDVRPDGLGLKRSRGKDPVSVPLPAGWNVIVLPDGRSVTGTPVEVKVKAIVRRRKVENLILHVTFDFGVVPVRPEAGPVAAYDYNAAMLARATSAGVLDLFVGRELLAQIQDRNKGLAEFQAKLSRLREGSRRWRRLQAAKGRILEKLDRRIRPMEHALTKALAELDLKEGIATAVLGDLTGLRRSAGTGMKGKKASQKIHQMAYDRLGSQQGYKNLMRGIRTIFLPEKYTSSTCYACGRRDPSSRRHRGHWKCRRCGFSLQADLNGAGNLLKFRLAENVVGVPGPVSFHTIRHWRWDKRYNRYVRVSSRAGA

SEQ ID NO: 32851 - protein, 400 aa, Nonomuraea sp.
LVVQLRYQYRLYPTPGQQIALARAFGCARTVFNDGLRLRQEAHKAGLPYVADGDLSERIITQAKKTPQRAWLGEVSAVVLQQALADLNTAYRNFFASLTGKRKGPKIEQPRFKSRKDRRQSIRFTRNARFAVTAGGGLRLPKIGDVPVRWSRDLPSDPSSVTVVKDAAGRYFASFVVETSDEPLPESASEVGIDLGLTHFAVLSDGRKIGNPRFLRRAERRLKKAQRALSRKTKGSNNRRKAVVKVARAHARVADARRDFTHKLSTQIVHENQTVVVEDLSVKGLARTRLAKSVHDAGWSLFAAMLAYKAARHGRTLVKAGRWFPSSKLCSACGAVAESMPLSVRSWTCPCGAAHDRDVNAAINILAAGRAERPNACGAQVRPGSTSAQRSEAGSLRGAA

SEQ ID NO: 32852 - protein, 405 aa, Gammaproteobacteria sp.
MKKQDVSSHRRSAPAEAPVKRNEPNAGLFTRTLRLKVRPESYAWLNMAALEVNSVWNFANERASTALGNLGKWLSGFDLNNQTSGATEYMKYIGADTIQRVNGEYAAKRNAARKQKLRWRVSRGAHRSLGWVPFKAASLKRKGNALRFAGKTFRMFESERLDSVKWRQGCFAQDALGDWWLCLPVIAEAAQSVAPREAVGIDLGLKAVATTSDGDALEAARFYRGAEQKIAQAQRRGHKRQAKRLHRKAARRRVDALHKFSRKIVDQYQKIVVGDVSAPKLARTWMAKSVLDSGWGMLKAQLLYKGEHAGRTVEVVDERYTTRACSACGSLSGPQGPDMLVVRRWTCADCGASHDRDVNAARNILRRAEVSASVSGNESCDSLVPPRGKRIRRREAGTKTARHAA

SEQ ID NO: 32853 - protein, 385 aa, Asanoa sp.
MGRVVKRAFRYRFYPSDAQAAELARTFGCVRKVYNLALAARTEAWTVRQERVSYNATSAWLTGWKKNDELAYLNEVSSVPLQQALRHLQAAFVSFWSKRARYPTFKSKRTSRRSAEYTPSAFRYRNGQLTLAKMFEPLAIVWSRPLPVGASPSTVTVSQDAAGRWFVSLRCEDVIPETTVTGAVGIDAGLDSLLVLSTGEKVTNPRHERHDREALVRAQRNLSRKAKGSNNRAKARLKVARVHVRIADRRRDQLHKLTTRLVRENQTLVIEDLTVRNLVKNRRLARAISDAAWRQFRTMLEYKSNWHDRNLIIVDRFPSSKLCSACGALVEKMPPHVREWICRCGTHHDRDLNAARSILAEGLSVAACGAGVRPHGRTPARGSRC

SEQ ID NO: 32854 - protein, 414 aa, Methanosarcinales sp.
MMVKRTEQIRLESSILLSFLCHISKNLWNEADYIIRQEFFETGKWTRYNSLAGVLKTSENFRSLPAQTAQQVLKILDRSWKSFFRSIKEYSKNPEKFLGRPKLPGYKDKDGEFMLVFTNQQVKIVNGYLSFPKKLGIKIKTRLGDDTNIREVRIIPKGTGYVCEIVYEKDVESLNLNPDNVVGIDLGSANIIAMVNNIGEQPIIIKDDGRGIKSINQFYHKRKAEIQSIYDLQGIKDGDKLRRLKTKRAKKVHDYCHKVSRFIVDWCIKHNVGTIVFGYNEGWKQRINLGRRTNQTFTQIPFMNIIHKTTYKAEEVGINVVEQEESHTSKCSFLDDESVEHHGEYVGKRFKRGLFRSAKGIIINSDVNGGYNIAKKAIPKAFGKLDARRIGGCGLHPLRCIIGCITRRGLEHVF

SEQ ID NO: 32855 - protein, 240 aa, unknown
  TnpB Polypeptide
VIFLGRQYRLWLSRPLGGRILCGGFAEDARGRWYLNLQVEVPENRDHGAGEIGIDLGLKSLVTLSTGEKIEAPRIYRKHERALGVAQRAGRKPRVRAIHAKIANCRKHFLRELSTRLVRENRRICVGNVNSCELARTSLAKSVLDAGWSQLRSQLHYKAIRHGAEYIEVDERFSTQVCSACGVCGGPQGREGLVVREWSCGGCGARHDRDINSAINLLVSGRNVGLRQTEIPSLLGRGRR

SEQ ID NO: 32856 - protein, 400 aa, Flavobacteriaceae sp.
MNKKQAFKFKLKTNKHQNDIFYKWSRQCHFLWNTMLAKNLYILNNNRKVWKLRGNKWLRVWENNPMNYYEMNWYKNHILKKTEQCQFLHEPPAQSLQICLKKMHLSFSTFFKKCFEGSGKPKFKNRRSKLSFSFPYTNKQAKLNNDSISIPKVGRICFKRHREIIGNIKNITISKECNHWYISIQTEIEQEQPVIQEEKSIGIDLGIKKTIQCSDGKEYSGDKTKYQKIENKRIFLQQIQSLKRKFSNNWYKVLDKIKKLYKKSSDIKKDFLHQVSTEIVRKYNRIHIEDLKIKNMSKSAKGTIDNPGKQVAQKSGLNKSILEQGWGMFREFLQYKLDWIGGRLIKVNPKNTSIKCSKCGYTDKENRPTQELFKCLSCKYECNADLNAAINIHAVGLLVC

SEQ ID NO: 32857 - protein, 356 aa, unknown
  TnpB Polypeptide
VAATACSPCARAAARPTSPSSSDAESPLVRPQNLLLPNERRFTKTSGGMARPSGRRGIRCLRRTEMDSLSYGVAPEVFRSYVRYWQSENGVPVPGLPGRAAAGAAAPHVRLRPGGVEPGPGRPPGPLAPGGHGHLLRGVRPGSDRYEEGPGIGVPDRGVLRATAAGAAAPAPGVHRVLRPAKLKVARAHRKVRHARADFLHRASTRLVRQNDVIAIEDLAVKNMVRNRHLARAISDCAWGELRRQLEYKCQRYGRRLVVIDRWYPSSKTCSGCGHRLAELSLSARHWTCPSCGARHDRDLNAAQNILAAGRAVARGSPGDACGAGVRHSGSSRVRPAVKQEPRPVTAGISALQGGE

SEQ ID NO: 32858 - protein, 403 aa, unknown
  TnpB Polypeptide
MKVQRSGEKMIRTYKVMLLPKNKQKTKLFQCAGVARWAYNFALAQQQENYKQGGKFLKDGEIRKKLTKLKQTKEYHWLNLFSNNITKQAIKDACIAYKNFFEGRAKFPKFKTKKRTRPSFYQDTAKIKVTDTHVKLEKLTPSKKKNKQKFNWIRLAERGRIPYGKQVKYVNPRIVFDGLHWFLTIGVEEVEQKHDAYTEGIGVDVGIKSLATVSNGMTFPNMNHTLKVKKLEKQIKRLQRKLPRKYEMNKIQTEGGEFRYRKTENIKKLEFLLLKRRRRLKHIQLNYTHHITTTLVKTKPAYVVMEDLNTSGMLKNKKLSKAIQQQTFHEFKRQMTYKCAWHGIRLIVADRFYPSSKRCSACGHVKEKLSLSERTYCCEACGIEIDRDLNASMNLKQYAESIV

SEQ ID NO: 32859 - protein, 452 aa, Lachnospiraceae sp.
LRKEAASVTIYSSYDVRIPTHEFNKTLTDTTKKYREAVAFFISVRLQDNALFTELKNQHEQLRKMELLTNRTKSNPDPKYDFGLNFYKFPSYLRRAAIAEALGKVASYESNLSLWAKNRHGKKPGKPVAGYVYPALYRDNTYIRMDEYHAQVKVWVRNTWDWITVPLRKTDVFYIRKHCLGRKECVPTLRKRHNYWVLSFSFEEKVKLTDIPLEEQIILSVDLGINSACACSAMRSDGTILGRKFLNLPKEEDSLTHALNKIKKAQQHGAMRAPRLWAKAKGINDQISVRTAQFIVDTAILYSAFTIVFEHLDTKGKKKGSKSKRQRIQHWRAQYVQSVVADKAHRLGIRISRVNAWNTSRLAFDGSGEVIRGKEAGFKTNAMCKFRNGKTYNCDLNASYNIGARYFIREILKSLPATSRLRIEANDPQCRKRSTSTYSTLINLCAELHAAA

SEQ ID NO: 32860 - protein, 446 aa, unknown
  TnpB Polypeptide
MKITSTYSVKIKDYNRILEPTVRLYRSAVDFFIHVIGTEWPVFKDCRTSKEAVNLAEQFCVRTSRNLYPQYDFSGKFYKFPSYLRRAAIAEAYGKVCSYKSNLKNWQAADPRTRGAKPSAPVAGFVYPAMYRDNCYVRVDDYTARIKVFIRNTWDWLTIHLRKSDVDYISRHCFGRKECAPTLQKRGRQWYLDFAFTADRELSGTDIFHQTIVAVDLGINSACACSVMRSDGTVIGRRFLRLPKEYDSLERRISRIKYAQRHGSHRTPVLWKLADGVNDDIAVKTAQFIIDTAVLYNADVIVMEHLDLNGRKRGSKKQRLHLWKVRRVQSIVTDRAHFLGMRVSHICAWGTSRLAFDGSGRALRGRESEKTNSNYSLCEFPTGKVYNCDLNASYNIGARYFVREIIKSLPVTEGQRITAKVPGCAKRSTCTLSTLISLNGELYAAA

SEQ ID NO: 32861 - protein, 384 aa, Glycomyces sp.
VQLRYRYRIYPTAPQRRELARVFGCVRTVWNDAVAARTHAHAEGLPYPRTADLDKALITAAKRTTERSWLAEVSTVPLQQVLRDCHAAYMNFFNSLSGKRAGPRIGPPRFKRRAGTQSARYTRRGFALRPGGRLYVAKVGEVKVAWSRELPAEPSSVTVIKTPTGKYYASFVIELDGDAERLEPLADPEVESGIDLGLTDFAVLRGGKRIENPKFFARLERKLKKAQRTLSRKTKGSANRAKARLKVARVHEKIKHKRADWIDQQVATIVAENQGIYVEDLNIAGLSRGRAAKSWQDVGAGMFLSRLEAKAKRAGRSFAKVDRYFPSTQLCSACGALTGPKGLEGLKVREWECPCGAVHDRDVNAEINIRSEGKRLVAEGSPDT

SEQ ID NO: 32862 - protein, 400 aa, Burkholderia sp.
MQRFQAFKFELMPSGQQRREMCRFAGSCRFVFNKALALQRENYEAGGRFIGYVAMAKRLTAWRNGSETPWLKDAPVHPLQHSLKDLERAYKNFFAKRAAFPKFKKRGQCDSFRYPDPKQIKLDQINDRIFLPKLGWIRYRNSRNVLGEVRNVTVSVKAEKWFVSIQTKRQLEQPVPQTGSALGIDMGVVRFATMSDGSFLDPLNSFRRHEAKLRRAQQAMSRKSKFSNNWKKAKVRIQRIHACIGNARRDYLHKATTTISKSHAMVCIEDLRVRNMSKSATGSADVPGRNVRAKSGLNKSILDQGWFEFRRQLDYKVAWRGGWLVVVSPQNTSRTCPTCSHVAEGNRRTQAQFVCMACGFEENADVVGAINILARGHRVAACGELAQSGRSMKQEPAEAI

SEQ ID NO: 32863 - protein, 394 aa, unknown
  TnpB Polypeptide
MHTVRIYRLTHLSPTLFGRLKAAQVEGAQVWNRCCELHKQARITHSTWPGQTDLQQATKGRFALHSQSVQMIAQAFLANIEATRQLRATHPKMRMKYPWKTKRFYPVHWPAQAVSKERGRVVLPMGRGRASLVLPLDLPEHSGACTLVWNRGFELHVCIEVPQATQAPGTNRATVDLGEIHLAAVTTNTGAALVVSGRGIRSLKRQRNMRHRQLAKKQARCQKYSKRWKKLQRAKNKMAGRIERRVRDLRHKATRQVIEFCKREQVGTLFIGNPHGVRQENKGRHHNQRMAQWEYGRDIDYLTHKSKQTCIESFTGSERGTSSQCPVCRHTHKPKGRVWKCRNCGFVGHRDIVGSVNMHRLAYNKAVTFPRAVTYLRPGPARRSRRAGTPRASS

SEQ ID NO: 32864 - protein, 1168 aa, Streptomyces sp.
VCHGEQRPCHLGEFALGVVSEERLGAEQHRVRAADDRCLSRRVRGPARAVVQRAPVPGEEGVAGRVPLLGPDARAEVGEPERCVYEAVVGGSGGDAAARIHHPNHPVRVPVALDRLHGQQCGRRVERGTGGTPADKAVSAEESAEGGAGGGVQVVMLQARRHEQHVRRRPVEPGVEHVRRDRRDLEVHLPQREQLTRGDGGGDPGALERDRAGEPRRVEGNVVPAGGLPGLPPCRARHDRAAVGGPARLDALTQQGVERGDLVRVVEPQPEVAARGDVRDGGRRPDRAQDTAVRHARQDLHRRAPQPAEAPAGDVVHRGDLVADVPPVREERVREPALGLAHVDDVRALGVRPSAEPEGVARAGDPHVVGEEVVDEPGGGRGRAPGAGRDDVGAGEGGRVDVLGADAGDARDGLRRHRHLRGARGSPPEDLDLVGDERGVPRPHEVEGGPQGGPGDVDVDRGPAAQLGDGQGVVRAVVHRQRDLHRVRRDRAVEGRVLRGEDRRPVVPALLLVPERDLRGLHAVPGGRVTEAVDGGLHAEGVGVGVLQEQVVLVVLAVRGSGGLDEGAVDIAVQVEHDGRLLGDHDLPHRPHLGLRGGDEVPVHVEAVGVRAGARDTAVRVGRDVEVQAAAGEQVARRGVLGRGEPLDEPEGGIGALPLVAVDVVVEEDRGLVSPFDLGRLGGQGGRLLDELAHPRLGAGLAGGLGGGHGDEIEPVPAGRAPRDLDAHAVAEGLERVQLRRDGVVRGEAQLEGLVDRVLGVGGEDLPTGVAAAVVTERCLRLRCGPSAGEGSLGRTQGRPRRLLVERGFPVDRGPGFRRGGVRTEEQGARRGDGEGDEWNGSRRNGSRDAHAYLLETSKDRYGEVYLFDSTATRGSWCHGCPGWPMRGPPGGHAAWQARSDGSGWGPDAEDAWCPNATCEVPEAEPNTEPVDFLGADLGIVNIATTSDGEIMAGRELNRIRARERNLRTKLQKKNTPSTKRRLKKRRREEARRAKDINHKIAKHVVAEAERTRSRNRPGRPDGHPRAGTASKAPTGHPLQLVLCPAGSVHRVQSPESRGTGGARRSGVHLPHLCRMRPRRQGKPGQSGLDRMPELRRRCARGPERLPLSAAPAPSPEHTRRSGAGRKRSIIASDARCASPELERPVVDQRPQGRTLPAMTRPIEFGHA

SEQ ID NO: 32865 - protein, 442 aa, Lachnospira sp.
MKIYSTYSVKIKHYNHIFKDTVSVYRKAVDFLINVCLDEWDNIFEIKGNLLQQQYVERCVHTTKDNPTPIYDFDTKFYKMPSYMRRGAINEAIGKVLSYKSNLANWKENPIGNRPSTPKAGYVFPSMYRTVMYNQIEDYVAQVKVYIHNTWDWITIDLRKSDMNYIYRRCKNRKQCAPTLQKRGKEWFLDFPFEENIKLTDTSIYEQTILAVDLGINTAATISVMRPDGTILGRHFCKLPKEIDSLTHSINRIKKAQQHGNYKTPRLWARTKGINHDISVKTANYIMDIAVLYNADIIVFEYLDKNCKVRGSKKQKLKMWRSQEVQSMVTKKAHRLGMRISRVCAWGTSKLAYDGSGRVLRGKDGDFNTYELCKFQNGKIYNCDLSASYNIGARYFIRETLKSLNESSRLRIEAKVPQCSKRSTCTFSTLVNLNAELMSLAG

SEQ ID NO: 32866 - protein, 445 aa, unknown
  TnpB Polypeptide
MSARCRLKCPVTGVYYRHGPTPQSSPPSECSLLYWTAGEGLTLKRAYKLRAFPTRPQEGRAARLLADHCELYNAALAERREAWRMCHLSISYGDQSAQLKEIRAADPDGQGRHSFTAQQQTLRRLNVVFTAYFRRVRGADKGRRHARRGRNPQRLTVGYPRFKPHQRFDQVLFIAGDGAKWEPVDNDRWAHATFQAVGRVKLKQHRLVVGRVKTLQLKREGRRWYVIVVTETETTPLPPTGRSVGVDMGVARFLTTSDGEVVANARFLNAAQDRIVDLQRRKQRARPGSGNRRRLRRALGKEWRKVRNRRRDFHHKTARRLVDSYEMLALEDLQVADMTATASGTVEHPGRNIGAKSGLNRSILDAGWTQFTSILIAKAESAGRRVILVNPASTSIDCHACGSKCSRPRQETVICPVHGASDADLNGARNIATRAGLGSGQASAA

SEQ ID NO: 32867 - protein, 442 aa, Bacterium sp.
MKPPKITVRCRLEPTPDAEARLRRQAEVWQAMVARALEVAVARNITGRKRLHEAVYGELRGRWPEAPSHYAYTAITKARAIWKSFRRRRRQGRTRKARPELDARRLRLYLDDAHLWTLEERDGAYFLRVAVEGARGRDRLEVRLAGTGWLRRRLGEGFRVKACELVWRDGGLWAHIVLEKPVCAVEVRGLLSVDVNARTVDAADWARGLYMVLVVGAWLAVRNRYLRTIAVIQRRVGGRKARRRLRAKYYGAMNARLRQLLHTCAAWIVRYAAAGGLAMALENLRYVKEANRIDVVTRGIFNRLQAYIAYKAALEGIPVVWVNPRGTSSRCPVCEQAKLKRDGASGAVSCGACGLRAHRQRVGAVGVGRRALQAKAGASPRAGSEPCPASGIGPMAGRLLHGEKAVLRLTEKGWVVEADPGGVVASQGLPTRPKSKPSTVRE

SEQ ID NO: 32868 - protein, 431 aa, Moorea sp.
MNYNYRIYPSLAQQELMLSWLETCRRLYNRCLRDLKDWMNSRKCLVDRCSIYQEYIMSTDIPFPGYMEQKRQLTQWKKTEPELKAVHSQVTQDVVKRLHNSWETFKHRGQGFPRFKKYGRYQSFLFPQFQKSPIVGNQIKLPMIGLVNINLHREIPTGFRVKGVRVVSRCRGTKWFVVITISADVSVPDTPAYGRAIGVDVGLNYFLATSDGLKITRPKFFVDLQSELKLLQRRASRKCKGSKNWEKAQVKVARLHHKIDNTRKDWQLKVAHSLCDQADSIFVEDIDYRVMAKGFLGKHSLDASFGQFRALLKWVCWKRGKFFATVDHRGTSKQCPDCGAEWDNNLSIRWHTCKECGYSSNRDVASAEVIRNRGIEKYPRTIGEWKPPADKSVSAEASSAVHIGRSVLSGILNLDKCYAGMPNCEVGKPAP

SEQ ID NO: 32869 - protein, 406 aa, Moorea sp.
MFVLEFKVNPKPTQISAIEEAIRTTQFVRNKALRYWMDHRGVGKKELFRYNTLLRKEFKFVEDLNSHACQVGIERVVRAINRFFENCKKSKPGKKGYPRFKKRSRSVEYKISGWKLSENRKHIEFTDKKRIGRLKLIGSRDLNYFQPEQIKRVSILRRADGYYVQFIIGLDPRDIVPAIEPSQKALGLDLGIKYFLAQSNGQTEPNPQFYRKSERQLNRANRKKSKKFRKGKPQTQNYIKARQRYARKHLRVSRQREEFAKRVALRLIQSNVWRAYVRAACRRQDLNVKGLVKNRRLSKSISDAGWSNFRRWLEYFGYKYSNVTVAVPPHNTSQNCSNCGKKVHKSLSTRTHICPDCGLIQYRYINAALNILQLGLSTVCPTGTYTLGERFPLAALDRSCSVTEPQ

SEQ ID NO: 32870 - protein, 464 aa, Moorea sp.
VKTPNKIIRTDKWRLNPTPVQKELLGKTVEVYRHACQFLVGIIYTHWSELGELTADQLTPAVEKLMHQTAKRPSIKYPQFKKAFYKFPSYLRRAAIAFSAGQVSSFVTRYREWQSGGRKRKDAKPPKLNADTGCYPSLYKGQCYKLHGYDQVEIKVFNGYDWVWATVEITGLRERHLVATNKMMSPSLVLNERSCHLSVPFTCKPEKRKPEANVTAIDLGINTTATISVVTHSGTVIHREFIHPGRDIDRRDKRLKSVSVRASKTMGKGGKLHKGFCSKTYQKCRRINTQIGHIVSKRIVEIAEKFNSVRVAWPTALAIVFENLLGWKPKGGRKRSNLRQRFHGWLKAKIRDFTEMKWAELGGKIVEVVAAYSSKLAYDGSGKVKRSSKNYALATFSSGKQFNAVRVAWPTANLNGAYNIGARGVIKLTHRNGGEGRFSKNSGRPPRSWVCLCDLWAKVSPRLA

SEQ ID NO: 32871 - protein, 406 aa, Moorea sp.
MIASYQYRLRLTKSQKAEVEKWLELLRYQYNYLLADRFNWYEQNRCSINSCPLICYLPDLRNNPDYFSQKKTLPQLKKDRPWYKVLQSQVLQDCVKRVDLAFKGFLKGDSNGKKSGKPRFKGKNRYKSFTFPSLSKNPINGNILTLPKLGKVKMVYHRPIPKGFKIKTATITRKADGYYVTLSIKDDSVPGTIPVDNVSNPVGIDMGLKSLLVKSDGTEVQIPQYYRKAQKRLKKIQKAVTRSKKGSKNRKKAVTKLGKAHKKVADTRKDFHFKTAKNLLDDHDLVAHEKLNIKGLAKTKLAKSVLDAGWGQFLSILSNKAENAGLVTVAVNPRNTSQNCSNCGKKVPKKLKDRIHSCPHCGYVADRDLNAAINILNLAVGRPVRSKASRVTEPLGGVGKKPALSR

SEQ ID NO: 32872 - protein, 478 aa, Moorea sp.
MDSLKPIEGFDAPIIGKFIKYLHNIIAHVSYNMAMLTMTYEYKLEPTAEQIESIEQTLDICRSVWNFALRQRKDWCASRKSPINACSIQSEYIISADEPFPNYHKQAKQLTQAKKLYPHLKTVHSQVLQQTLRTLDRAWDDMKARGFGLPRFKNKYRMRSFVFPQLGKDPIRDDGIKFPKLGWVKWRQSRPIPFGFQVKQARIVRKASGYFVMLSLQLNVNVSSPMPHGHPRGLDLGFDKFVATSDAEEIKRPRFEITLQRKLKLLQRRLKNKQKGSNNRHKLNQKIARLHQRISDTRKDWHFKLAHHLCDGAGMIFVEDINFVSWQRGMLSKQSADAGFGQFVNILEWVCFRRDVYFAKVNKDGTSQTCPNCGAHTGKKTLDIRFHHCDECGYRTTRDVAASQVLRNRGLNAVGQTVVENVCGLEATGSIGHDTLVGTGRSRKPNSRELGIPSLKVTEHSEVARGRGGCQELMVPID

SEQ ID NO: 32873 - protein, 404 aa, Moorea sp.
MPVVFEFKAKGKAAQYTAIDEAIRTGQFIRNKCLRLWMDVKATSRNDLYKHCKVLAHQFPFAKKLNSTARQAMSERTWASISRFYENCKKKVPGKKGYPQFKHNSRSVEYKQSGWKLSPNRKQITFTDKIGIGKLKLKGTWDLHFYQIKQIKRVRLIKRADGYYVQFLIDTELTQKVEATGHNVGLDVGLKEFYTDSDGNTEPNPRFYRKSEKRLKFYQRRVSRKKKGSANRKKAINKLGRVHLKISRQREEHAKRVARCVVLSNDVVAYEDLRIKNLVKNHCLAKSINDAGWYQFRKWLEYFGSKFGKATVAVNPAYTSQNCSNCETTVKKSLSTRTHVCKCGCELDSPKATLRERDHNAAINILSLAIGTVGHTGTLLIERNASGDSTSTEVDASQSQQVGS

SEQ ID NO: 32874 - protein, 297 aa, Moorea sp.
MIIMEFKAYGKKTQYLAIDEAIRTARFIRNSCLRYWMDNKGVNKYDLSKYSKVLAHQFPFANELNSTARQASSERAWSSISRFFDNCKKKVPEKKGFPKFQKRGRSVEYKQSGWKLSPDKKSFAKRRLCRIVFRDKKGIGKLKLKGNWDLWCFDKKQIKRVRIVRRADGYYVQFCVSVDITEELEPTGTAIGLDVGLKDFYTDSVGKTEPNPRFYRIGEKRLKFYQRRVSRKKKGSSNRKKAVNKLGRTHLRISRQRVGVACAKRIEHAKRLARCVIQSNDLVAYVRVACRKARSKG

SEQ ID NO: 32875 - protein, 206 aa, Moorea sp.
LPRVIPGIDRNKKGSANRKKAINRLGRTHLRISRQREEHAKRLARCVIRSNDLVAYEDLRIRNLVKNYCLAKSINDAGWYQFRKWLEHFGTKFGRVTVAINPAYTSQNCSNCGEVVKKSLSTRTHTCKCGCQLDSPKATLRERDHNAAINILQRALGTVGHTGTRILDLNACGDPTSTLPDSGLEEPRWIAVRVAWPTAKQESPRL

SEQ ID NO: 32876 - protein, 422 aa, Moorea sp.
VRHQAVKVRIYPTQEQVQILAQHFGCARWWWNYALNQCIETYKETGKGLSRAALNSMLPKLKKDKETEWLKDCYSQVLQSVSLNLSRAYQNFFEGRAKYPRFKSYHHRQSIQYPQRVKQAGDCIKFPGKLGIVKAKIHRKLDGEIKTVTVSKTPSGKYYASVLMEYDSDDIQPSTEVRPVMARDCSPSRKAHLGKIVGIDLGIKDFAITYDGEKASKFGNPRHLAKYEKKLANKQRIAARKKKGSNRRKKARKIVAKVYERIGNVRQDYLHKLSRKIVDQNQVVVVENLNVKGMVRNHKLAKAISDLSWGTFVNFLSYKCEKEGKVLVEIDRWFPSSKTCFNCHYQIKELPLDVRSWTCPSCGIHHDRDGNAAKNIRAEGIRMLSSSGTGEVNASGEQVRPRRGRPSKLRHSSVKLEASTWP

SEQ ID NO: 32877 - protein, 403 aa, Moorea sp.
MIILEFKAKGKKSQYQAIDEAIRTVRFIRNSCIRLWMDNKGTGKYDLSKYCKILAKQFPFANELNSTARQAAAERAWSSIGRFYDNCKKKVPGKKGFPKFQKRGRSVEYKQSGWKLSPDKKSITFTDKKGIGKLKLKGTWDLWRETAKQIKRVRIVRRADGYYVQFCVSVDIAEELEPTGSAIGLDVGLKDFYTDSVGNAEPNPRFYRTGEKRLKFYQRRVSRKKKGSANRKKAINKLGRTHLKISRQREEHAKRLARCVIRSNDLVAYEDLRVKNLVKNHCLAKSINDAGWYQFRKWMEQFGIKFGKVTVAVNPAYTSQNCSRCGEVVKKSLSTRTHVCKCGCRLDRDYNAAINILKRALSTVGHTGTWILDPNALGDLASTLPGSGLVEQVESVNKESPRL

SEQ ID NO: 32878 - protein, 391 aa, Moorea sp.
MLVYEFKLKGKQYQYNLLDEAIRTGQFIQNSCLRLWMDAKPEDKINRFALNKYCKVLADNNNFPWVKKLNSMARQAHAERTWSSISRFYDNCKKQIPGKKGFPKFKKNSRSVEYKTTGYQVSIDRKTIKFTDGFKAGTFKLVGSRDLHFYPLKSIKRVRVVKRVDGYYAQFCIDQERLENTNSTGKAIGLDVGIKEFYTDSNGGTCHNPKYLRKSENKLKRLQRKLSKCKKGSKNRKKFQKKLAKQHLKVSRQRKDFVVKTARALCQSNDLVAVEDLQVKNMIKNHKLAKSISDASWSMFRSWLEYFGKVFGRKVIAVKPHFTSQNCSSCGKIVKKSLSIRTHVCSCGCVLDRDENAAINILNRAGHAQINASGQINLCQLGENLTGKLAG

SEQ ID NO: 32879 - protein, 428 aa, Moorea sp.
MIIIEAKLKGTTSQYAKLEEAIRTSQFVRNKCLRFWMDNKGVTRNDLQKLCSQLAKNSETPWVQRLNSQARQSAADRAWQAISRFYTNCKQNKSGKKGFPKYKKFSRSVEYKKTGWKLSADRKEIEFTDGFKAGKFALWTSRDLLFYSEQQIQRVRIVRRADGYYCQFLIQWERKEEHEFNGNVVGIDLGLKEFYTDSNGNTVENPRYLRKSEKRLKKLQRRVSKRYQRGKKQSKRYHKARKALAKQHLKISRQRKDRAIKDALALVKSNDLIVYEDLKIKNMVKNHNLAKSISDASWYQFVQWLQYFAKIHGSICIPVAPHYTTINCSGCGEKVEKTLSTRTHQCPKCKLVLDRDWNAARNILAKGLQVLAEYLNSSEGHSRTGVKNPNARGENDHWFVDRDIDNLSRLVEPRTVVSQESPTITRSV

SEQ ID NO: 32880 - protein, 414 aa, Moorea sp.
MLKLTYQFKLIPSPEQVAIIEDILAVTRKVWNYALRERKDWINSRKCSVNCCSLQQEYIIPADVPYPNYNRQAANLTKAKKTNPELKRVNAQVLQQVLKTLERAFNNMKNMGYGFPRFKNKYRMRSFVFPQFKSNPISNEYIKLPQIGLVQMRLSRPIPEGFKLKQVRVVRRASGYFAMLSLQSPVSIPDTPASGHPLGIDVGLDKFLATSDGELIERPKFLTKLHGELRLLQRRLKLKVKGSANRHKLNQKIARVHQKISDTRKDFHFKLAHHLCDQAGMIFVEDLDFRTWAKGMLGKHTLDAGFGQFFNILAWVCWKRGVYFGKVDYRYTSQICPNCGAHTGKKDLSLRLHKCLECGYEAHRDVAAAKVICTRGVTGVCAVGQIVDQIDCGDGLTGASNGLVKNLRNSKPKS

SEQ ID NO: 32881 - protein, 410 aa, Moorea sp.
MRTAYQYRLKLSKSQEVEIERWLDMLRCQYNYLLADRFNWYEQNRCSINSCPLICYLPVLRDNPDYFYQKKTLPQLKKDRHWYKAIHANVLQDCVKRVDLAFKRYLKGDSNGKKSGRPRFKSKNSYKSLTFSAFSKEPIQGNRLNLPKFGWVKMVYHRPIPDGFKIKTATVTRKADGYYVTLSLQDNTVPKVIPLEQVSKPIGIDMGLKSFLLKSDGSEVPIPQYYRKAQKRLKKIQKAVSRSKKGSNNRRKVVSKLGKAHKKVADTRKDFHFKTAKELLDNHDLVAHEKLNIKGLAKTKMAKSILDAGWGQFLSILSTKAENAGLVTVAVNPRNTSQNCSNCGTKVPKKLKDRIHFCPHCGYTENRDVNAAINILKLAVGHPVGNKASRVSEPIGGVGKKPTLNLQRSV

SEQ ID NO: 32882 - protein, 267 aa, Moorea sp.
VYKTVPVRANFSDEEKAFWEFQCQQANNLFNSAVYYSRQKHYDWLKQQPEAYTTYWRDDLLRQGWKAYKCSVKYSELCRELKESPNYKAMAAQSAQQTLKTVAESITGYNQLVGLYYKGQVDKPRLLRYRKKGGLSAVTFPRQALTYKKGLFYPSVSKESKPEMLTEINLEVPGFIDPDWVKEVTIRPCYGQLWIDWVIDDGRQPLKENKNLDYSQAWSFDHGVTNWLTGVSTQGKSLIIDGRKLKSMNQGYARLVAKYKSGKPDFY

SEQ ID NO: 32883 - protein, 477 aa, Moorea sp.
MPRKVGAAKRISTQIVPVVGMTKSVELELLSTMKKLGIVRSESYNKLGSISHWSLDWKKAIPEVKSFRTPDTLGLPAKLMDWTVNDVAKAITASQAACTDAVIKKIYKRFPGKDNQKTRKELCKQLKTLAFQRLPLLHRLVRKEFQRGHSWVKNQIVYQQVGYNCKRLSRNTYQLELAGLRRGKRNRVIVRSNRKIKGQIRLVYNQLLQGFEVHFLVDYGTVEIPPSRRSIGVDKGYTEALYDSDGQAHGKGLGKAATKKSDRICNKNRNRGKLWALHKKLKKLDPAKSARILENNLSRKTENKRYRQNQSELTAIIGAASKSLFNGESLKVFAVREAWPTALDLTQPIKNKRQSKAVSRKLNSWMKGEIRDSLQKWANWTGSVVTEVQPSYTSQVDSVTGTLLGKRSGDNFTRFDGVVLQADHNAAKNVLDRGTDKEISRYMNKTEVQAVLLRRTARFLKGMGLSLADAVELGWIG

SEQ ID NO: 32884 - protein, 403 aa, Moorea sp.
MIIIEFKAYGKKHQYQAIDEAIRTVRFIRNSCIRLWMDNKGTGKYDLSKYCKVLAKQFSFANELNSTARQAAAERAWSSIARFYDNCQKKVPGKKGFPKFQKHCRSVEYKQSGWKLSPDNKSIIFSDKKGIGKLKLKGKWHVWRFDKKQIKRVRIVRRADGYYVQFCVSVEINEKLKPTGNTVGLDVGLKNFYTDSDGNVEPNPRFYRTGEKRLKFYQRRFFRKKKGSSNRSKAINKLGRAHLKISRQREEHAKRLARCVIQSNDLVAYEDLRVKNLVKNHCLAKSINDAGWYQFRKWLEHFGTKFGRSTVAVNPAYTSQNCSQCSEVVKKSLSTRTHTCKCGCQLDRDHNAAINILERALSTAGHVGTWIIDPNACGDLASTVLGSDQVEQAGSMKQESPRL

SEQ ID NO: 32885 - protein, 467 aa, Moorea sp.
MYKTIPVKATLTDEEIAFWLFQCENANSLWNCATYYSKQKHYSWLEQQPEAFTTYWKNDELRYGWKTYKCSIKYAELCKELKDNSHYKAMAAQSAQQTLKSVAESITSYNQLVGLYYKGQVDRPRLLRYRKKGGLAAVTFPKQALTYKKGLFYPSISKESKPELLTEIVLEPPDFIDPDWVKEVTIRPYLGELWIDWVIDDGKQPVEHNPNLDYSQAWSFDHGGTNWLTGVSTQGKSLIIDGRKLKSMNQGYSRLVAKYKQGKPEFYWDANLDRVQIKRNNQMRDAINKTARFIINRCLSDSAKPTLRERIGNLIIGWNERQKDSSNMGFRGNQNFVVIPTKRLIERLKQLAFEYGIKLTVTEESYTSKASYLDEDSLPKHGEKPKGWTPSGKRVRRGLYKTSLGWLINADCNGAANIARKVATQLGLDLTKVGRGSLTVPHRYDVFNSLKKLYRKKSYEARVHPAS

SEQ ID NO: 32886 - protein, 414 aa, Moorea sp.
MYLTQKNQIRGLSKKQYLALKTLCRLSKNLYNVGLYSVRQFFFTERGYLRYESNYHGVKSNDNYRLLNTDVAQQTLKVVDRSFKSFFKLIEKAKLGAYQFNQISLPKYLPKEGYFPLIMPRVKIKNGFFRVPMSREFKAEHGEIWIPFPDRLQGKKLKEVRLKPKHHARWFEVEFIIEQPNEPQELETGQGISIDLGLNNLATCTMTTGASFVVDGKRLKSINQWYNKINSKLQSTKDKLGIKALTNRQSRLLKTRNNQVRDYLNKAARLIINQCIANKIGVLIVGVNPGWKQEINIGKRNNQNFVQIPHYNLRQKLQALCQRYGIQYREQEESYTSKASSLDGDQIPVYNADNPAKHTFSGKRVKRGLYRSKDGHLINADCNGAWNIGRKSKHDGFTGVSRGCLAQPAKLYVL

SEQ ID NO: 32887 - protein, 174 aa, Moorea sp.
LLAYPGVRTFLTFFSETSVGKIGHGDFSQIQRLCQHLDNLLAKISKAKCGQKRRMRKAARRMIIRIQNLINELHHKAARFFVDNFDVILLPTFETSQMSKKGNRKIRSKTVRNMLNFAHYRFKEFLKHKAKETGKTVVDVCEAYTSKTVSWTGEMVNIGGSRVIKSEVDGQLMD

SEQ ID NO: 32888 - protein, 310 aa, Moorea sp.
MIILEFKAYGNKAQYQSIDEAIRTVKFVRNSCLRLWMDNKGLSKYDLNKYCKTLAKNFPFANELNSTARQAAAERAWSSIGRRPRFANARFFENCKNKIPGKKGFPKFQKHCRSVEYKQSGWKLSPDNKSITFSDKKEIGKLKLKGTWDLWRFDKKLIKRVRIVKRADGYYIQFCISVDVKEQLKPADATVGLDVGLKEFYTDSRGKTEPNPRFYRAGEKRLKFYQRRVSRKKKGSSNRNKAINRLGRQHLKISRQRVGEACAKRIEHAKRLARCVIRSNDLVAYVRAACRKARFKSQKSSKKSLSRQIY

SEQ ID NO: 32889 - protein, 425 aa, Moorea sp.
MILTYCYRIKPSPEQIVTMERWLELLRRHWNYALGQRLDWLNRTRSPIDRCSLISEPIGKIPEEVNYYTQQAALKETKQLFPEYKKIYAETQQVNLQRLNKAWDRWRKPDASGKRGGRPRFKKPGDLRSFVFPRINNSKAGAHLVDSVLKLSRIGSMPVVMHRPLPKGFILQQCTIVKKADGWYCCISMKDDTVPELLPVDSVKSAVGIDVGLEKFLTTSDGEAIPIPQFYRKAQDKLAQAQKVMSRRVKGSNNWKKAKHKVALLHLHLTRCRKEFHYQVAHWLCSKYELITYENLNIKGLARTKLAKSIYDAAWGCFLEILQAVAVRRGLLVQEVNPRGTSIECFNCGSRVEKSLSDSAKPTLRERVHCCSSCEIKIDRDWNSGINILNRGLLAVGLPLNGCGKSIQDIEEQQVSFVSKSAPTS

SEQ ID NO: 32890 - protein, 408 aa, Moorea sp.
MRIAYQYKLKPTKNQSIKIDQWLSMLCAQYNYLLADRFNWYEQNRCSINACPLVCHLPELRENPDYYSQKKTLPSLKNTHPWYKDIHSQVLQDIVKRVKLAFDRFIKGDSNGKRSGRPRFKKRHRYRTFTYPQMKEGCLEGNLINLPKIGKVKVILHRPIPDIFKIKTASITKKCDGYYLVLYLEDKTVPEVKPDLNPESIVGIDVGLKEFLTTSEGETIKIPQYYRKSQKRLKVIQKRVSRRKKGSNNRIKAIKQLGRQHKKVADQRKYFHFKTANYLLSKYDVLAHEKLNVKGLAKSRFAKSVLDAGWSSFLTILTSKALNAGLLAIPVSAQNTSQNCSNCGRKVPKKLHVRWHDCPDCGCSLDRDHNAAINIKNRAEGQSVLKAQRLLRDTRIGWEAYTEPNGSV

SEQ ID NO: 32891 - protein, 397 aa, Moorea sp.
MIVLEFKVKGNKTQYAAIDDAIRTGQFVRNKCLRYWMDNKGVGQKDLYRHNTWLRSEFPFVKDLNSHACQASVERAYNSISRFYSNCKKQVPGKKGYPKFKKFSRSVEYKTSGWKLSPDTKSISFIDKKGIGKLKLKGTWDLWRYDQKLIKRVRLVRRADGYYVQFCVKVDVKESLEPSHTNIGLDVGLKEFYTDSKGDTEPNPRFYRKGEKRLKFYQRRVSRKKKGSSNRKKARNRLGKTHLKISRQREEHAKRLARCVIHSNDVVAYEDLRIKNLVKNHCLAKSTNDAGWYQFRKWLEHFGQKFNRQTVAVNPAYTSQNCSDCGEVVKKSLSTRTHVCECGCELDRDHNAAINILKRALGTVGHTGTWIIDPNAYGELASTLPDSGLVEQVSSLK

SEQ ID NO: 32892 - protein, 450 aa, Moorea sp.
MQLGYSYKLKPSQRQQAVMNRWLDMLRAQYNYLLRDRNDSYDQAKAPRLGNYCDFKSGGEACPLTCSVSKNHSVGYPWKKSQKNPRRNAYEAQSSNLPILKKERPWYKSIHSTVLQQTLRQLDVAFAKFFKGETGYPKPKRRSRFRSFKYAPGQVKLNGNKIYLPGIGWIGFHNSRPIPDGFALKSVTVRRKARGWFASLQIEDKSVPPAPVKNNTEIDPLKVCGCDLGINKLVSLSNGKTIANPAKQKAFRRRERRLKLRQKTASRKRKGSSNRKKSYSKVASLHERITNNRSAYHWDVANQLVDGADALVFEDLNIKGMKSRCKPKPNEKGGYDRNGQSAKRGLNRSISNAAWGELVKKVEVVAAKSGIPVVKINPKYTSQKCPKCHHISKSNRKKEKFVCTECGYHDDADVNGAVNIKLRGLKKLGIDPTQLPPVRGKVTPTEITVS

SEQ ID NO: 32893 - protein, 403 aa, Moorea sp.
MIILEFKAYGKKTQYSAIDEAIRTVKFIRNSCIRLWLDNKGTGKYDLSKYCKVLAKQFPFANELNSSARQAASERAWSSIARFYDNCKKKVPGKKGFPKFQKRGRSVEYKQSGWKLSPDKKSITFTDKKEIGKLKLKGTWDLWRFEKKQIKRVRIVCRADGYYVQFCVSVDVNEELESTGKTIGLDVGLKDFYTDSDGNTEPNPRFYRTGEKRLKFYQRRVSRRKKGSANRKKAIDRLGRQHLRISRQREEHAKRLARCVIWSNDLVAYEDLRVRNLVKNHCLAKSINDAGWYQFRKWLEHFGTKFGRITVAVNPAYTSQNCSQCGEVVTKSLSTRTHTCKCGCQLDRDHNAAINILKRALSTVGHTGTRIHDLNALGDLSSTLPDSGLVEQDGSLSKESPSF

SEQ ID NO: 32894 - protein, 458 aa, Moorea sp.
MQYGYVYKLIPSSQQMTVMNRWLDMLLAQYNYLLRDRNDSYEQVKSPKMGNYCDLRTRGEACPLTCSVNKSTSVGYPWKKSQKNPRRSVYELQSSTLPTLKKERPWYKKIHSTVLQQMLRQLDTAFSKFFKGEAGYPKPKRRSRYRSFKYSPGQVKLDGNRIYLPGIGWMRFYNSSPIPTGFTMKSVTVRRKSRGWFVSIQIEDKSVPLPPVKTTDEINPNCVKGCDLGIKKLVSTSDGETIANPSNTKKYKRQKRRLKLRQRAASRKQKGSNNRKESFSKVASLHEQLANKRSAYHWEVAKKLTDGTDALVFEDLNIKGMKSRCKPKPNQDGGYDSAKPTLRERNGQSAKRALNRLISEAAWGELVKKVEVVAGKSGITIIKVNPKHTSVECPKCHHISADNRHGEKFLCTECGYHDDADVNGGVNIRNRGLKQLGIDPIQLPSVRGKVTPMEITAT

SEQ ID NO: 32895 - protein, 242 aa, Moorea sp.
MIVREAKLLNGSKAQYQALDEAIRTAQFIRNKAVRLWRDEPNFNKARLSLLCKELASEFPFAKKLNSMARQASAERAWNSISSFYRRCREGAKKKGYPQFKKHSRSVEYKTTGWKLSEDCLTINFTDGFKAGQFSIFCNHETRENLFRLKIYRVRVVKRADSYYAQFCFDANRFEVGNYTGNVVGIDLGLKYLYKDQNDNAVIYPKYLRRAQKRTRETTAAAIKKVCKRQEASIKQLPQSQD

SEQ ID NO: 32896 - protein, 386 aa, Fusobacterium sp.
MYKALKIELKLTVSQKIKVCQTIGTERFIYNEYIKYNQEQYKLGNKFVSANDFSKYLNNIYLPNNPDKRWIKDVSSKSVKQAMIYGEKAFKRFFKGLSAFPVFKKKGKNELGAYFVKNNKKDFEFYRHKIKIPTLKFVRVKEYGYIPKNTNIKSGTISKIADRYFLSLVIEIENTTKITNTSTKGLGIDLGIKDIAICSDGKVFKNINKIKKVKKLKKKLKREQRKMSRSIEYSKSKKIKLQELKNFNKKKLKVQKIFYRLNCIRDDYNNKIVDEITRAKLKYITIEDLKVSNMIKNKYLSKAIQEQNFYAIRTKLINKCKERNIELRLVDTFYPSSKTCSCCGSIKKDLKLNDRIYKCCNCGIEMDRDYNASINLEKAKVYKIIA

SEQ ID NO: 32897 - protein, 395 aa, unknown
  TnpB Polypeptide
MVEVVLAIPFGYEKNEIVQRLLEDFRDMVNFCIEKAIKNGITSYAKLRKLVYEEWKRRWNYSTHFCHSACKVATSMLKSWRRLVRRGKADPNNPPRARKLFIRFDPQLVKFEGERLRISVKPRQFIYVQLRYGEYQKKFIEEWRKGNLKIGEISMNGEKVIIPFRKEVDLTNPKDWMAIDINESNVTAVSTNPHVIRIEHRMRTIHTTYYEIRRRIQRLSKYKPITSERLMKKYSGREKRKIHDLCHKVAKMIVDFAKKHNLGIIMENLKGIRNRIKHGRNLNRRLHSWNFRKMQFFIEYKAKLNGIPVVYINPKGTSSLCPRCGEKLAPNGQRVLKCKKCGYENDRDVIACLNMLRMRGVPVPPECLSMKLNRERNSSRWMNITICSCLFLNPP

SEQ ID NO: 32898 - protein, 277 aa, Thioclava sp.
VAGPGTSASAHDTQSGSGPGDAPSGIPTHYITLCRKAWLPWPRVKLSATAGLDWGVSTFVTLAHEDGAFEALPNPRHWALEAEDLKAEQRRLSVAARARKISRRALRAHRRALARRHAKIAARRKDFLHKASARIAGRHRLIATEALAVRNMTASARGTAEAPGRNVAQKAGLNGSILDTAPAGFLNMLRYKAEEAGAEFLEPKTRELKPSQRCLDCGAVRKKTLAERHHDCDCGCRLGRDEAAARVLLNWGLEESRKRRDTETINPAGTVGDQAAA

SEQ ID NO: 32899 - protein, 401 aa, Gloeocapsopsis sp.
MKYTVSMTQQVLTVSCKLGVEAGLALIIDATLQGFADCCNWINSTVDPKVTGRLAIHKETYHYCKQTFELPANLVCQAISRVSSNRKSAKLKNSPVKKFKPTSAGYDARIFSFNEHNWTVKLTLKDGRYSFPLLIGNYQRHLLSGKTPTSAILVKRQSGEYYIQIQVKPKPPKTNDSNECLGVDLGRKSIAYTSSGDNWDADDINKLRDHYANLRKNLQYKASKGTRSSRRRCRELLKRLSGKERRFQTWLNHTISASIVKSAANNKKIIAIEDLTGIRDDLNQEPRNREERRRTNSWAFYQLRVFLTYKCLKQGVKLISVPPAYTSKSCASCLRIGSRNGKAYECQCGWKCDSDHNASIVISKLGVSVNTPEGSSLFCSLDRDDSGLLKAHTVPLAVSAG

SEQ ID NO: 32900 - protein, 453 aa, unknown
  TnpB Polypeptide
MKKEVQITVVGKVWKANAGKILALNECLEEYFGAVKFFLSFASTSKTYLHRNGYEEAKRLFDLNTALIQTARDKAVEVLKSFEKNKKDDSVLRLKRVSIRFDKRCYRFSKTTNVLTPYWLTLSLNRRKRVSLPLIFGERQEQRIEEALRGEWEFTTVEMVKRNGEWYAHFVLKKVVEVPDEPETVIAIDRGEHNLAVAVAISKDDPDKPVRGRFWRGEEIKRIRGLYGHIRRKLQKKNRVGMVKKLGGKEKRKVNQQLHIIANQIIAYAKQFPKPVIVMENLNGIRSNFKKSKELNRRFHSLPFRKLQAIVEYKALLAGIEVKYLTKKETKNTSRKCHRCGHVARSVRGREFRCPKCGMIYNRDLNAAINIAHALTRRMGWGRREAPELADVGIAGSYPRTPEAPGFSRESLTFDASALVVYPAVRRVGGGCGDAEGVCSFGGGASGFRCRAA

SEQ ID NO: 32901 - protein, 587 aa, unknown
  TnpB Polypeptide
LIKSYKLQHKANPTKLNALFELYSVYTKEYKKIIFNQWFLFTHNQIPFFQNKINFSHIGSTKHIKTELSARFTQALFSQVCASLNSYLSQIELKFNEIITKSSIKDKDLLHQLRTINSSHAWLFNNIILENKIYYYPNKIITDDYGNLITSHLKEQKLISHEALKLSRKIFKQIIKHRVKFPDIKKPRLILDNRFYEMEESHSQSFDYWLKINTLVPRKKVLVPIKSNDFFEHANGQLGSTIELDFKYFNYEIKQHKYNSLSNKKLNKKIKHTKFNKDNHNSKNIVKNNKVNKFQKVNKTLIFIFNKQTKIQPEFIDNSLLTQTISFDLGLCNFLATSNGELYGQYWLEKLKAYDEKITTLLADRQYIFRKSQNKKNKIRSKKYDQLITQVRGFIKTEINRILNHYFEINKNIQTVVIENLSFDKPELSRKLNRIIKNFGLKLFKNKLKELSLIKGFKIEELNPAYSSQECSECGYVDKNNRKTQSKFKCLCCGVEINADINGSRTLLKRFQFKQSSTNKTKYKGIVLDQLKVNFISGMKSLLDNGKVSRRKLRNIMIKNPYFKEFVKTTEASMIKPMTADNNLNFN

SEQ ID NO: 32902 - protein, 510 aa, Arthrobacter sp.
MITAHRHRLAANTGKEQALAALFPAFRDTLANLSSMTLRELQEGAPLAKWRILTDLPFGTRLSARQVKSAQNQMHAAHAAWLALLEAAIRQNLTASTLQGHRLATLYRINSRRAWWATDLTLPWQETSSGELVHVSHAYAEKHPEACVWVPVAPDDLKLARHLAKHVSLRQARHPDLSRVRTLILDGIIAKPERATTANEYAWWVTVATLTRGKPERIPLETNTYFEKLLAAPGAELAGAIQLHLDTDNHGQPSGASVSLLLNTPDGHKRTTGTVLGLDFGMANALFATSDGRLLGQAMLHTLRKWDERLNIIAAATQSRGLRLRDNSEYRRLNQRIRDYVTNEVGRLLNILARDGGDERVMELVVEKLDFRGGGMSRRMNRLITRTGRACVKTRLAALTAKHGIAVTEIGSAYTSQECSGCWYTSQTNRKAKHFGCRFCGLKLHADINAARVIRGRRSFPLQDHGSKPGRNTTLRKLDQRHRQRWGLRPASGADPGLAGDPGGHAVQPA

SEQ ID NO: 32903 - protein, 306 aa, unknown
  TnpB Polypeptide
LFYNLRGLSQSKKHRRKVGGLRFKQSHRFRTIHYNQSGFKIIDTGKRFDTLHLSKIGNLSMRMHRPIQGTVKQVVVKHYPSGDWYACIVTEQQQTNVTCQIRSAVGIDMGLKYFCTDSNGLQVENPLFLNKSLKKLKHRQRCFSRSVKGSRNRCKQRIFVAKKHTQIQNQRSDFLQKLSHYYINRYDLIVIEDLNIKKMIRNHHLARHIADASWTQFAQLLSRKAESAGKIIIRVDPCGTSQEYSHGQDIDRDYNASLNILKRGKQVGQGLPELTPVDIRPLQRLCRVSASQVVETGSSFLDYRKG

SEQ ID NO: 32904 - protein, 414 aa, unknown
  TnpB Polypeptide
MSKSRNVKRAYKYRFYPTPEQERLLRRTLGCTRLVYNKALAERSEAWTKEHRSVSYKDTSAMLSQWKKSSELVFLKEVSSVPLQQALRHLQQAYANFFNQTGDYPTFKRKAHGGSATFMKTAFTWDENKRELTLAKMRGPLDIRWSRTLPKGRMPSSVTVSLDTAGRWHASILVEDTVKPLRRSKDSVGVDLGLESFAILSTGEKIDNPRFSRRQAKRLRRAQKALSRKAKGSNNRRKARLKVARIQARIADQRRDFLHKLSTRLIRENQTVIVEDLNVRGMSRRAKAKPDPNRPGHYLPNRQKAKNGMNRSIRDASWSMFRSMLEYKADWYSRRLIVIDRWYPSSQICSTCGKRTGRKTLNIRSWMCPYCGTHQDRDINAVKNIQAAGLAVLACGDGRTVERRNMRSTDPIRP

SEQ ID NO: 32905 - protein, 441 aa, unknown
  TnpB Polypeptide
MVQENIKFTRKIKFFPSTDLKIYLEKCFGASRFFYNKTVEYINSEYEKNKKKYDKDVKKGCAYKNKKGNQCCKKISKNSNYFCNNHIKQKPKLCPSLNFIELRNKLVTKNTELKENEKWQEEIPFDLRQNIIKDAITAFKVCISNKKAGNIDKFKVGFRDKKNLTQIFHIPQEFINFEKKMLFPSKKLKFHMTKKEQKEFKKIEMKKRLRITVLRKYPNKYYFCIPLEKKQEKIKPKFNVISCDPNVRNFMSIYSSDGIYGKLGENITDRTDKIQKRLDYLEMLKNFVNKKKRYRIKRRCSLLRNKIKNIIEDFQWKCANFLCVNFETIIMPIANIKSKIEKNGKRVINKKVVRRLTTLRHYSFINKLEHKAKMLKRNLIKCSEEFTTQTCGNCGELNKKIGGKEVFICEKCKYKEDRDINASRNILIRCLTKLIRVDQPK

SEQ ID NO: 32906 - protein, 399 aa, unknown
  TnpB Polypeptide
MLKAYEYRIYPTSQQEELFNKTLGLCRLYFNTVVFNKNQNHSMLIQGYKPTFEKFKPEALEWIKEIDSVPLTQTWSDVCASYNNFFKSLKGERKGKFSKPPRFKSKKNPKDSFRYSTKPKFVNGKLYLTKKLGYIDIRASCRFCEGKFKNVTFRRTATGKWFVKICVEKKDESKIHNGKAIGIDWNCDDKDFMTFSDGTKIKCPRFLRKKEKQLSRWQRVKSKRFAEGQEIQSSGYEKAKMKVAKLHEKVAWQRKDWLHKVSRDLANKYEYVIVEDINLQSMSQMRHGKVVGDGGFGMFRQMLAYKTTLVKVNPKNTSKTCHNCGFVNPKVKIGVKQWICLVCGVSHDRDINAAQNILIKGVTSLGVVGRGRAEITNACGEPMCSAKQEVPNTIESFGS

SEQ ID NO: 32907 - protein, 450 aa, unknown
  TnpB Polypeptide
VAQGNSIHDYCGSYAGLAKLLYNAALFRIRQIFTSYDKDSRTDHEEEVFDEVKLLQQTYPAIKVKRVISYSHLEKLMRVTHNPDFFAGLPMQTAQAVVKQAVTDFSNWLKALKDYKNSPSKYLGRPQMPHYRKQDIITFSITNQDAVLYFTDRGTLLKLPGIRERLYLPNVEKGSVLKEVKVKPYYGRYILSLTIECKDPAVSSQDMPNICAVDFGVDNFAAVVCNDGSSVLYKGKAVLSDCQWFHKKRAHATGLITKGHKHMHAESKYLGRLSRHHADFVKDQCHKISRSIVDYCIRHQAGTLVLGENKLWKQNSGIGTQNNQNFVSMPIALLKQLIIYKASGAGIRVIMQEESYTSKADITVMDYIPAYGIDDDKAVFSGTRISRGLYRCGNGLVINADCNGAANIMRKAIPDAWNDTDDFSFLASPEVCGFHELNPKGIPVKGIVAA

SEQ ID NO: 32908 - protein, 368 aa, Holdemania sp.
MRNIISVGIITQGGDIIYLTSRILLKTDENTSQILTIMAKAYQNEVNNLLQLYIQNKHPVYVSYGDFCTFIPFWSRAMVVQDAKDIFKHVQKFNNPKLKLKAPQCCWHQPNFRITNNELEIQVGGRFGIGDTLKLPIMAEPYQQRYLKMELGKLTIHPYKQWWAAEFNVKVPEKPRSLSTKRMGIDLGIKVPAVAYTDDGKIRFFGNGREARFRRNAFYAKLTELQKKEDYRRIKELNHGLYRWEITQCHILSSQLIQFALEQNVGVLCVEQLHGIGKREVKHSRDKRDLNQWSYYRLIDNLRYKARREGLRVVFVNPRNTSKRCPQCGRLNTPDKRFYHCVCGFRCHRDLVGAMNIVHAPESGPVAG

SEQ ID NO: 32909 - protein, 430 aa, Hydrocoleum sp.
VIDLYGCQQNLIKPDQDLKSILEFICSQSHKLTNCGIYYGRQLFFKTQKIIGKYDLEKEYKSNKHYQVLYSQAAQQILRSVAESFKSFKELNKKYKNGNLDFQPRVPSYRKKDGLAMVTYPKQALRLVEKHIRIPLGTTVKRWFKLDSFLLPMPSNLQFSELKELRILPRNRCFYVEFVYQKEIVVQDELNPQNVLAIDPGINNWLSCISNVGNSFIIDGRKVKSLNQWYNKRVSTLKESKPQGYWDEQLVQITEKRNRQMRDAVNKAARLVVNHCIEHQIGTVVFGWNQGQRQESKLGKTTQSFVQIPTAKLKERVKQLCLEYGIKFVETEESYTSKASFLDGDVLPTFGEKPEGWKPSGKRLKRGMYHTGKGLLVNADLNGAANILRKVETQLGLSLVKVCRRVLTLATRFPIWETKTKKATRCGFSP

SEQ ID NO: 32910 - protein, 298 aa, Klebsiella sp.
VAKRHAITAVAAVAQRSGARLQEFLPEACSIPSFQETRPKRCPQGVKLDQTNNRISLPKLGWIRYRNSREVIGEVKNVTVIQSCGKWYVSIQTEYEVPEQVHKAASMVGLDAGVTKLATLSDGTVYQPVNSFKASQRKLAMLQRQLSRKVKFSASWQKQKKKIQRLHSHIANIRRDYLHKVTSEISKNHAMIVIEDLKVSNMSKSAKGTAERPGRNIRAKSGLNRSILDQAGTKCADSLSTSSSGVVVRYWRYLRHTQASVVPAVVIRRKKTVKRKVNSCVRYAAIPRTPISTEHVTF

SEQ ID NO: 32911 - protein, 556 aa, Lachnospiraceae sp.
MDDTQYHSASHCKYLIQYHIIWCPKFRFSVLHDNVDVTLKKILQEICDKYKYHIKALEVMPDHIHIFVDVPQTVAPCDVARTLKSISAIELFKAYPQLKRFYAKCGVLWSRGYFISTVGHISEDTVIRHILVAETDMSYPDVQKVVNLSDRIRKAGNELVGVMKKNYEQLMRTKKYRKLLQLYGSTEDKNKRKTYAGQLNEMQEQYNLTKESCRTLMIPIGKKYGIDAIFAFTKSEDVWRGVEKCLYGNGRMLHFSRYGDLPCIRAKQINRGIPMSVKNNELQFKLGKTVFRIQVKDRFQADEVNAVLDYLAQPEVIDNKAIQTLHDEACCISTYRPCYATLVPKLIRGRYRVYLHLVIEGKAKPKYDSSGNPRHKYGRGIVGADIGTQTVAYTSDTEAGLKNLAERGNSIQKSERLERLYYRAMDRSRRAMNPQNYNADGTIKKGKKTWTYSRHYKRLKAKHAELCRINAINRQLAINEDANHLRSLGDTFVTEPKNAARLMKRAKETTVNNKGKFNRKKRFGKSVKNRCPGGFQAAVENKFKTSGGTYIEVPSN

SEQ ID NO: 32912 - protein, 419 aa, Microcoleus sp.
MISLVAKEVNQVLHRAVKARLYPTPEQEVLLAQHFGCARWWWNFGLNKSIESYRNTGKGLGRSALNALLPKLKKDKETEWLGECYSQVLQAITLNLTTAYKNFFEGRARFPRFKSKHGRQSIQYPQNVKVIGSCLKLPGHVGAVKAKIHRPIEGTIKTVTVSIDPSGKYYASILAEIEGENPAPSTEGRVIGVDLGLKHFAVTSDGSKVSKYDNPRHLAKHEKNLKRKQQKLARKQKGSKSRNKYRKVVARVYERVSNSRADFLHKLSRKLVNENQVVVVENLHVKGMVHNHNLAKAISDVGWGMFTNNLAYKLERKGGKLIEIDRWFPSSKLCSNCYHQVDEMPLDVREWTCPHCNTRHDRDGNAATNIREEGIRLLQADGTSVSAGGGGVRPKVGRKSVLRHSPVKLETASRCRVRR

SEQ ID NO: 32913 - protein, 337 aa, Microcoleus sp.
MWGKRLNCARLQKHIAKLRKRNPFWQLVGSQAVQDICQRIDKAYQLFFKHHKKEVRPPGFKKVKKYKSFTLKQAGYKFLGGNRIKIGSRVYQYWNSRKIEGTVKTLTIKRTPLGELFMVVVVDSVLEPELKIMTGKIAGFDFGLKTFLTCSEGFGVDSPQFLKVSLNAIGKASRQHSLKQKGSNNREQARKHLVRQHEAVSSRRRDWFWKLAHDLTNKFDVLCFETLNLKGMQRLWGRKIGDLALGEFLAILEWVAKKKGKQVVYIDPWYPSSKTCCCCSHVLESLDLSVRRWRCPSCHSVNDRDRNAALNIKRVGSPTLGVEDVRQDLILQSLLDA

SEQ ID NO: 32914 - protein, 376 aa, unknown
  TnpB Polypeptide
MSHLTIKSYKFRLYPNSEQKTLLEKTFGCCRFVYNHYLAKSIEDYETTRKSNSCNQNCKDLTHLKKDYKWLSEVSSTALQQSIRHLDAAYQNFFRRVKQGKTPGFPKFKRKSSNQFFTVPKDAPSTLAIKENKIQIPKLKFVKFKQDREIQGRIVSATVSKTSSGKYYISLCCVDVPVEEFEKTGSVVGLDLGIKDFAITSDGGKIENPKFLRKSEKRIKQLQRQLSRKQKGSNNRAKAKIKLACKHEKVANQRKDFLHKITTNLVKNHDLIVCEDLQVKNMTKNHHLAKSIADASWSEFYRQLSYKSEWYGKTFVQIDRFFPSSQICSCCGQRNRQVGKDLSIRQWTCPSCGAEHDRDINAAINILNEGLRLVLN

SEQ ID NO: 32915 - protein, 246 aa, Oscillatoriales sp.
LVKGLNFRATEPIQKTEFATQLVRDKKRWFACIPIREEARTKELDKVIALDPGVRTFLTGYDGDSFQEFGKADIGRIQRLCSHLDKLMGRASKAGRRQKRRMLKAASKLRIRIRDLVDECHKQVVNYLTSQYKVILLPRFETSQMVVKSKRKLRTKTARQMLTWGHYRFECHLKQSAKKRGVVVIDVNESYTSKTCTKCGHKHSKVGGSKTFKCPNCGHEHDRDWGGARNIMIRALRDGYESSLYQ

SEQ ID NO: 32916 - protein, 383 aa, Lachnospiraceae sp.
MNNRTEGHSKPPALKAQRAYRFRLYPDREQEKLFHRTFGCCRFVYNRMLADKKAMYEETGKTKRLTPAGYKKDFPWLKEVDSLALANVQLHLEAAFARFFEPGKNRYPRFKSKHRSRKSYTTNVVNGNITLEDGRLRLPKAGTVRIRQHRRIPEGYVLKSVTVSMEPSGKYYASLLYEYPARENQTPGADREDAKVLGIDFAMRGMAVFSDGSRAEYPGYYRLAQERLARDQRRLSKCKKGSRNYEKQKRWVALRHEKIRNQRKDYLHKLSRDLADRYDAIAVEDIDMQAMSRSLHFGKSVADNSFGAFRTMLAYKLEEQGKSFVKVGRFFPSSKMCSRCGNVKKELRLDERVYRCSCGLCMDRDLNAAVNIRDEGRRILEGA

SEQ ID NO: 32917 - protein, 577 aa, unknown
  TnpB Polypeptide
MVINVKRPPNIYYYKLYLNLVFDSDIVTFHDHIPIKFTLLTEFKTYNQQCDKVPFIPSIINKIIRYNANYNYSVKEIIKIFNVFRKKNLEFIPSLIKVCSKDLLCIPFWNAYTKLLSDKLYLPTLNDLVKTINKTLDNSWFKANEFVNNKNAYKLNFKKVNYEECILTKTRKINIYFNKSQKKYMRQIIGIYRYFYNRCVSFLNNYDKKTRISKYYINSKNKMSLIIVKVPETINPYSFISMRPILKQHIPTWLLKDFPEHLIDQALNEAFVRFKICLDRCIKTGKQFEFKYKQSKENVHTINLEKSMIHKTNSLFRNWKINDNYLFRNLKTSERFHMYNFKGSTLSYHRILKKYTLNLSYEEKTYKHYIPHRIGAGDPGQRTFLTIYSTDKVIEVGNNGCNKLFNICKEIDIIQSRLNCKEYYTQINNEKIIYKMNHNRRRNLKKALHNKIQYLKNLKTELHNKSIKYICDNYSTIILPPYEIQNMVGKLHSVIARGMYNLAYYTFREKLVAKSKEYNIKVLIKPEYYTTKTCGQCGILNHNIGTNKVFNCPICKLEMGRDQNAARNNLLRNIKYT

SEQ ID NO: 32918 - protein, 381 aa, unknown
  TnpB Polypeptide
MQTHLWLSKNLWNDGLELAKQLYTNYQKFPTRSTYQEISKNSGLHSQVAQNVFIRLDLALKAKIRRKKAGLKGGFPRFKSIDRVKSLHYPQSGFCLKTDERKLKVSPFGEINIKKHRELEGTIKTLTLKREASDKWYAILTTEAEAKPVLKNNGSQIGMDLGLMNFAVLSDATIIKNPRHLKRHQDNIRAKQKPLSRAKLGSSNRKKAKKSLAIVHEKVRNIRRDFLHKLSRRLVHSHSLIALEDLASQEMAEKNYGKSINDAGWNEFISMLSYKAESAGSRVILVNPENTTKECSRCSIMTDKELSERQHNCPSCGLSMDRDLNAAINILNRATLRTVPRSQDSREQKLTATAGIAGSNACEDEAIVSSVKQEAHAFRRG

SEQ ID NO: 32919 - protein, 353 aa, unknown
  TnpB Polypeptide
MIKHTKTLKVRIKDKHISLLRKQAMAVNFVWNFVNELSQRSIKERSVFLSAYDMHPYTKGAGKELGLHSQTLQCIAGEYVTRRKQFNKTRLNWRKSGGVRRSLGWIPVNTGAAQWKSGQVYFNGQYFGVWDSYGLGQHRFRTASFNEDARGRWYFNVVVDVQAEIPAGQDRIGIDLGLTDTATCSDGTKLEAGRFYRGLEEKLAIAQRARNKTQVKTIHAKIANRRKDTLHKFSRELVNCCGEIYVGNVSSLKLVKTKMAKSVLDAGWGQLKTMLDYKCAHAGIVFKEVNEAYTTQTCSCCGALPDSRPKGIAGLGIREWTCECGVTHDRDVNAARNILAVGHGRLAVGIPVL

SEQ ID NO: 32920 - protein, 594 aa, Crenarchaeota sp.
VVTMSRRNNIILESYKVRIPDQYHNYVFNLLNIAQELINAILIVKWKEYREKGKIEIDNKGKAYVALGGTAFKGSLFYPLYLPNRFVRCIFEEVGRILRSQDERQDIYTSLVYGWEINKNFIPFDIIGAIADDEIYEALDIIRELREKYDSNLINQEIKHIRNLVRKRYRLLKEGKDIRNYFDVTLPQKKSLSLDYAVDSDSQLCKISWDGTYLNIEMKVPTVAIPISPKDWKWISFKVRPTKKLLERLRQGCKIKKPRLVAKRVTNGRLVPMLEIVVEVPCEKNIDESIKEVLRKRVKKLKRNVRVLSIDLGLRKFATCVPFEVTKDGQIIQLGRPIFVRENNSILRKLSRLFDEVSRIQSKLSRLREGSRRWRILYREFHRKWRKIRNIIYQLKHYVSTFIVRLAKLYNCDIIVVGKLDSYRPPAGYGKLSSLLTMVFPRSVRLYLEYKCKRSGIVLVTVSEEFSSRICPKCGKIGLTVKSYNNLTQCRTGRVFYCPHCKYMADRDYVGALNIFRIFLKKYLSSLSYYSYTYTPINPRSNAPRVSPSVCVSSGVFSTKMQNYLTTLTVIIHPLQITQLIMTKTTKDNNYHSQ

SEQ ID NO: 32921 - protein, 304 aa, Nocardia sp.
MLRFMVRHTCFQFCLDPTVEQHTALARHAGAARLAYNQCLAAVKSALTARDSNPEVVVPWSGFDLINHINTWKKSEAAGRMFPVDSGGVATVVVTGLAWRHEVCQQVFEEAAVDCGRALAGWSASRSGIRRGRRVGFPRFKKKTDTTQRFRIRNRNSSRGRSSIKVGDRAITRSITLPVLGTIRVREDTRRLRRMLASGRAKILFVTVTRRAGRWHVSVNVEAADLHSDRRHPPRAPQDHGGWVGTDRGLSVFLVAATSDGRELDRVIDAPRALAAGLRRQRRLAKSVARKRRGPTTGAGPPHD

SEQ ID NO: 32922 - protein, 361 aa, unknown
  TnpB Polypeptide
MKTNERTKYTYLTVQLMPTEKELEMLQTTWNNYKKVCNIFSRTWYYILAKEANMDVSAYKKKTLKSSLGLAQKLLHTVYEDSMKYTMRTAYNYRKSDKKLELIAFGEYDEKNVNQLTIPYLYKSTFNVDFANKVCRLDLAKSFQTIAFSLPEKLPEPPASWEVKRAYLQPIYGTWYMTLMYPNPMFAMEVRPDTHIVGVDRGKINVATTYSKEKGAKRYGNKKQVFQLSKGCTKDDLHKALFAYDITVANNIVKEESLGTMFVLEDLHFDQSLKGWSYHHFGDVLIYLAALHHQSICFCDPRNTSRTCPRCGAVVNTERNLDEHRFICRRCGYGKYEYVNDDDNAAKNIYLRGRKMLFGES

SEQ ID NO: 32923 - protein, 368 aa, unknown
  TnpB Polypeptide
VNKHTEELSRLVTTSIYVWNHIVALYRRYYKLYNTNPSCGKMQHHIAKLTKNNKYWSKMGSQSLQELCQRVDQSYKEFFKKKGRGRPNFHKISGNGSFMFKGTVGYSLNGNQLTINKLGYTYRFKLTREYGVVKNVHIKRDNLGYLWLVVTTDVQPKTHERLGNASIGMDFGLKTFLTLSDGTTINSPETHKHALKQLRKLNREVSHKVKGSNGKKKNIKRLAKLHEHIANQRNDFQWKLAHELCKYNVLIAIEDLNLKAMQKMWGRKVSDLGYNEFVNKLEYIAGKYGTTVVKIDRFAASSQVCHCCGYKNSEVMNLGVREWVCPQCGTTHNRDINAAINILNIACGKDVSHDRSNSKTSHNGEAVA

SEQ ID NO: 32924 - protein, 371 aa, unknown
  TnpB Polypeptide
MKKTLKIKIITDDFQHRALLGTMNMFNQIQNEISSLAFEQQEYRKYHVHQIVYRIMKEKYPKYSSQLIIRATDNVTNSYKTSRRKTPNGFKRTSAVVYDERILTIYDDTISIWTIEGRLKKIPIIVHNKELFSLRKGQCDLVLNNGQFYLMCTIDVPDVEQSESKDVIGVDLGINKIVTASDGTVYSGDQIKKKRQQFHDHRSRLQKCGTRSANRRIKKIGNKESRFRKDVNHCISKQLVEKAKGNLSALALEELKGINNRVSVRKSQRNERLSWSFYQLRSFIEYKAKEAGVQVLIVPAPYTSQTCSDCGHCEKGNRKSQSYFSCLRCEFSMNADLNASKNIRNLGLQSINLLFSDYSDCNKPKTLVVGS

SEQ ID NO: 32925 - protein, 437 aa, Hungatella sp.
  misc_feature (355)..(358): Xaa can be any naturally occurring amino acid
MKSITITAKVKLYPTSEQMIILNKTLSFIRDVLNFVSAFVFGQEGIRYLELEHALYYPVRQQFGLRSQMTQSVFKTVLAKYKSMKSNGHPFSKVSFRNFEYDLVWNRDYSISGQYVSLNTLSGRLHIPFELKGMEHWFLAGGRFGTAKLIRKNRKYYLHIPVTLEAGNRNILNHIVGIDLGVNHLAVSFDEEGNTRFFSGRAVNEKRAKALALRKRLQACGTKSAKRKLKKLREKENRYVTAVNHAVTKALISQYGAGTLFIIEDLTGIRTATEHVRLKSRYVMVSWAFCQFREMLEYKAALSQSEVLAADPKYTSQSCPVCGNTTKANRNRKRHEFCCTVCGYRSNDDRTGAIXXXXSRGYEGTYLTVWSRNAFYYRGFNRDTHCHRTRPFKIPVRNGLLGILSVPGDAGIQSCAVAVRSPCGRPEVYQPELSGLW

SEQ ID NO: 32926 - protein, 555 aa, unknown
  TnpB Polypeptide
MNPSTKDYRGAEEEMILTYKIKHGKDFSEELRKAKKVAHYAILTRSRSSKDVKHLGLKSMIANQILRKYSNDGRAKQVKHVKLAIPHQGIRVDRATRIISAPCLALSLRYDFPDTFEKVNQIEVGEEYAYISISIPEPNLVRVSSWIGVDRNTTGHIAVVSDPETGKVLKLGKTALHIHQKYKNIRKDLQHKGKYGKVKQIKDRERRIVKNINHNVSRKIVDVAKESGKGIKLEDLTDIRQNTKQVKSFRYAKNSWSFYQLQIMIEYKAKLRGVEVAYVDPAYTSKECSRCGQIGTRNRKEFKCPTCGHVDHADSNAGFNIAKRPNVGRLQTDRDACKGNTDIPIVALARIPLTTEPTSFSGGSMSGRQAYWEEYNRKKKTAISYDQHCSYCGKMETVEYTVYCRLCHDALEKLHLYLNFSRVHYLKVLKQFRDAIANGMKLESEDSNVPGCRYNYCTWGMCSMDPKMWPEPSEHRWPYSFFKEGRVAPLSLGKLQCPLDWRTEKQNDGNGCFWTCRNFQTAPDKKPLIQEFVLQLYDERIVKIKAMKKGLRKCP

SEQ ID NO: 32927 - protein, 419 aa, unknown
  TnpB Polypeptide
MMQLTEQIQLKTAPELSHLCHLAKNLYNEANFEFRQFFFNLGEFVNYYDLQVMLKNTACYKALPAQTSQQILDLVVKNWKGYFAAVKEYKINPAKFLGCSKPPHYKEKKGESIAIFTNQNTRLKDGYICFPKKCHLPPIKTRLVQYQQVRILPQGIGYIIEIIYNAPEMDLGLNRDNVIGIDLGLNNLATIVNNIGKQPIVVKGGIVKSINQFCNKINSKLQSIKDKQGYKFQTQNQLRILKKRNNQIQDVFHKTSRWIIQYCIQNDIGTIVFGYNPEWKQEINIGHKNNQNFVQVPFAKLIQMIEYKAKLVGLQSIQQEESYTSKCSFVDNESIEKHTSYSGTRLRSISIHGKKVRCNLFRRANGQYLNGDVNGAYNILRKAVPNAFAEERAGLALVPHSLAMQSTFASRMKHILAVC

SEQ ID NO: 32928 - protein, 393 aa, unknown
  TnpB Polypeptide
MMRIDPREKGWDSSSVMKTIQQNYMLSSELLGVLEQFRRMLNDCIRIGLETGATSLKSLSLKAYKELKGYEVPSAYKLCAISRATGVLRNYRKAKRKGKRVREPCARRLQLTTCYGFKIKDGCLLIPFRPKEPITIRLNQHTLAVLSKSGGAVRSVTLTVDRLSIAYAKEVSEIQPEGLVGIDRNLDNLTLADSSERVEQFDLTKATEIKSKYRMVKAHFKRNDVRVRKRIFQKYGEKEQSKVQHIFHNASKHIVEDAKARGFGIVMEDLKGIRKLYRKGNWQGRYFRGRMNSWSFYELQRQIEYKARWEGLPVFYVKSYGTSSRCSMCGHRLSEENRTVKCPSCGFTVDRDVNAAKNILARGMRFVPDALPVEAMVQEPALAVILKVDGGEI

SEQ ID NO: 32929 - protein, 378 aa, unknown
  TnpB Polypeptide
VVKAVWQRCTPTLELPWLLEQFRQMLNDCIRIGLETNATSLKTLSLKAYKQLKGYEVPSCYKLCAISRATGILHNYRKAKRKGNPVREPHARRLQLTTCYDFKIRDGHLLIPFKRKEPIAIPLNPHTIQALCGMNVRSVTLTTDRLVVAYAKEVSEIHPKGLVGIDRNLDNLTLADSSGRVEQLNLAKATEIKSKYRMVKARFRRNDVRIRRRIFQKYGEKQRNKVHHILHNASKHVVEDAKARVFGIVMEDLKGIRKLYRKGNWQGPRYRGRMNSWSYYELQRQIKYKARWEGLPVIYVKPYGTSSKCSMCGSRLRPEENRTVKCPSCGLTVDRDVNAARNILARGMRFVPDALPVEAMVQEPAQAVILKVDGGEMS

SEQ ID NO: 32930 - protein, 423 aa, unknown
  TnpB Polypeptide
MKINKGIKVRIYPNKRQQEILNKTFGCCRFLHNKMLEERQTVYNKLKEDKDQLHTHRYKTEKQYKQEFLFLSEVDSKALQSETRNLLQAFQNFFRGIHKGKKIGYPKFKSKKNKQTYTTYNINNNIRIDQKAKRIKLPKVGWVKYRDDRNVVHPIKHVTVSRTRTNKYFVAIIIEVDIDVTSLNTIPLHKIEAFDMSAPNFLVNENVKLTNPRFYRDQERELKRLHKLVSRKQKGSKNRDKARFRLAKRYEKIQNQKMDWTHKLTHSLSNQFDAIILEDLNIQGMQQFNSGLSKSVTLDFSWNQFISYLRYKLEWQGKHLVLVDRFFPSSKRCSVCGQINNDLQLSERIWTCQCGATHHRDVNASTNIKEEGLHILHDQGITIINDNYSTVGTTGSHASGDRVSPALAGSGQGRRNPSVFRQW

SEQ ID NO: 32931 - protein, 217 aa, Anabaenopsis sp.
MVVVVDEGNKPEVEVKTGKIAGFDFGLRTFLTCSDGTTIKSPQFFKQSLNAIKIASRQHSQKLKGSSNRERARKNLVRRYEDVSHRRLDWFWKLAHHLTDKFDVLCFETLNLKGMQRLWGRKISDLAFGEFLQILEWVAKKKKKRVVFIDQWYPSTKTCSCCGYVLESIELSVREWRCSGCQSVNGRDENAAVNILMVGASTIGLGDISRFETAIAV

SEQ ID NO: 32932 - protein, 258 aa, unknown
  TnpB Polypeptide
MLEVHRTHRAKILNHSQVAEPLDRHGWSASKLWNVASYHSRQVWEETGEIPGHEGLKDELMTHSKYKGLHSQSSQRVPEEFAEAFNSWYSSDDERDKPPGYRKRNYYDDEGRRVHEEHPRSTVTWKQNGIRHDSKNNRVRLSKGANHKEHPRAWEYILVEDETRPGVKVENLQQVRAVYDQQNERWELHLVCKDEIETPTAPGTETAGIDLGISNFAAVAYSTEDADLYPGNRLIVLIVDYFRIVPTPGSARTGKSLQ

SEQ ID NO: 32933 - protein, 322 aa, Clostridium sp.
MSIFPKNQDMKWIKEVSSKATKQAIMNGDKAFRNFFKKSKGFPKFKKKKNQDVKAYFPKNNKTDWTLERHRVKIPTLGWIKFKEFGYIPANSVVKSGTVSQKSNRYYVSILVDEDDIQVSNPINEGIGIDVGIKDFAICSDGVKFKNINKTSTVKKVEKKLKREQRKLSRKYESLKEGRATRQNIQKQVIKVQKLHQRLTNIRTDYINKTISLIIKQKPSYITIEDLNVKGMMKNKHLSKAIASQKFFEFKTKLMSKCKENNIELRVVDRFYPSSKTCSQCGEIKKGLKLLDRTYKCDCGLTIDRDLNASINLKNAKKYKIA

SEQ ID NO: 32934 - protein, 417 aa, unknown
  TnpB Polypeptide
VERHLYEGGSPRFISSGRGLHSFEGKTNRTGIIWKADPQCVTVCKHVYRVRVAKHDDWLTRALQDPTDPTKPRKVKYCRIVREMRKGKERFLLQLVAEGTSPLKHAYAGKDQRMAIDPGLGSLTYATEDGKIAKVQIAPNADTDHRAVRRIQRAMERSRQATNPDNYETVDVVRHGKKRQSLKVKSGRLEWRFSKRYEKLRAELAQTHRLAAATRKREHGEVCNWLLGHAGTIIVEDNSFKAFQRGQFGKSIGRHAPAAFYTQLTSKAESAGLQVKVVSPKKLKPTQHNLLTGRFVKHELWERRVQLGDRTGVCWIDRDAAACVNLLYADLDQQIYDPKRIREAVLAGVTAWLDAGVVVIQAREGITEREFRRFRRRGIPSLAVQGLRQKGFRGRSDSKSGAIPEAKSLGYIETFPL

SEQ ID NO: 32935 - protein, 376 aa, unknown
  TnpB Polypeptide
MKLTAKVKLTPTDTQADSLKRTLETGNAACNHISTVAWDSQTFGKFQVQKLVYHDVKAIFDLAAQLVIRCIAKVTDAYRIDKKVKREFRPLGSIAFDSRILSWKLDQSEISIWTVDGRQKVSFVCHARAKEILLGVRGESDLCLIDGAFYLFTSCEVEEEAPKDVDDFLGVDLGIAQIASDSDGNQYSGKQVNALRGRHARLRAKLQALRTKSAKRLLKRRSKKELRFAKNVNHVISKELVGRAKDTNRGIALEDLTGIRERVTVRKAQRRQHSSWSFSDLRTKIEYKAQLHGVAVVLVDPRNTSRTCSSCGCIDKANRKSQSNFVCVSCGFVSNADTNAAVNIRIRGRALVNAPNVSVRDSIHPGTSSPDLSESH

SEQ ID NO: 32936 - protein, 424 aa, unknown
  TnpB Polypeptide
MDIQRTVTIKLPDDADLRATLAAFRDVQNAVTEDAFNDGVPLAAVPLQRIVYNRVKGTLNSQMTITALRLVVGAYASAVKGRNRRLKAEARRKKRCEAKGWRFKARAIKPLGVCRFERMAAMFLVGVRGRDADFRDDGTLAIWTVGGRKRLPYELVRSHRTLFEAATEINSITVIERDGHLYGRVAVTLEVPDPAGVTPVGVDLNETNALVAVDADGRELFMSGLAIKVKNKRTMQTTARVQRKLATKKAEGTDTRAVRRVLKRLGRRRKRRTRDFARVVAKTLVQWAPADAVLVFEDLSCLPRAEKGLTRGVALRRRLSAWQYGAIREAVTSKAEMHGLAIVSVNPAYTSQNCSRCGLRGKRHRHTFICPSCGHEAHADVNAAINIRSRFVQSRLDAAPSVAAEALSLSSEGNEGKPNSCSVG

SEQ ID NO: 32937 - protein, 288 aa, Bacillus sp.
LTYGTCSAKLPAMKKEFVWLKKVDSIAIQSSVRNLADAYTRFFKKQNSVPRFKSKKNNVQSYTTKQTNENIAVVGNKMKLPRLGLVRFAKSREVKGRILNATVRRKPSGRYFVSLLVETEVQELPKTQSHIGMDVGLKDFAILSDGTIYKNPKFFRLLEEKLAKAQRVLSRRTKGSSRWNKQRIKAARIHEHIMNSRKDYLDKISTEIIKNHDVIGIEDLQVSNMLKNHKLAKVISEVSWSQFRAMLEYKAKWYGKQVIIVSKTFASSQLCSCCGYQNKDVKNLNLRK

SEQ ID NO: 32938 - protein, 459 aa, Lachnospiraceae sp.
MKAMRGKSCRKGGSDTMILTENHRIKRNKHKELFKKIDAYCYRAKNLSNSVQYLICQCYRIHQKLKNGEIPDQWEQELIDNTNHAITAYNDGREEKKKLKRVDADNGFVADAYFLSWHMKTWDVYKAMPYATCSQICIQEKCRQWKSFYQAKKEYLKDPDKFLGVPRKPGYLDPMKGRDSLVITSQNFSIDEDDRITMPGFIKEIKLKAKHRSVRQIRIKTDKNSIRIMLMYEQETESIGSDGNIMGIDLGVDNLVTASLSSGGTPFIINGRPLKSINRYYNKRKGLLQEIAKRSNRLDITNRMERLTEKRNNKVKDYLHKASRKIIELAKTSNVNHICIGNNRGWKQKVELGKRTNQTFVSIPYRMLIDMIRYKAELIGIKVSVVKESYTSGTSYLDGEIPEKNFYDATRRVKRGMFKSNKGTLINADVNAAYQIIKAGGYKNLPIKEKEKVIRLNVA

SEQ ID NO: 32939 - protein, 402 aa, Nocardia sp.
MGETLVKRAYKYRFYPTEQQERELVRTFGCVRFVYNKALEARTTAWYTEQRRINYNETSAMLTGWKKTDDLKFLGEVSSVPLQQTLRHLQGAFASFFDKRARYPRFKSRKKSRSSAEYTRSAFTFRDGQLTLAKMADPLNIVWSRPLPEGAQPSTVTVSCDSAGRWFVSLLTETVVAHHPPTESVVGVDAGITSLLALSTGEKITNPGHQRRVQARLVKAQRALARKTKGSVNREKARRKVARIHARITDRRRDHLHKLSTRLVRENQTIVIEDLHVAGMLGNRSLARAISDASWSQLRSMLEYKAAWYGREVIAVDRWFPSSKICSACGSVNDTMPLHVREWVCRCGVTHDRDINAARNILAAGLAVSACGGGVRPTRQSSARRSPMKQETRPVKVGIPHL

SEQ ID NO: 32940 - protein, 392 aa, unknown
  TnpB Polypeptide
MRTIQITHRYRLEPTEQQAAHMRQFAGARRYIWNWALNRKKQHYAQTKKSLPLAMLYAELRDLKQQPQMAWLRAMDSQALQQTLRDLDKAFQAFFAKRSGLPKFKSKKTDAPRFRIPQRVTLEGSFVRVPKLGLIRARLHRPVAGTTKSATFKQAPDGHWYVAFVVEQAAPDREERPVQTHVGVDLGLKTLAVLSDGAQIANPRFYRTQMRKLRRAQRLLSRRLKGSANRTKARNRVARLHQKIKRQRADFLHKLTTDLVKHFDLVSIEDLSVRGLAKTKQSTSVLDAAWGTFRQLLIYKAERRNSHLMVVGRFYPSSRLCPACGAINADLSLTDRIWVCWCGVVHDRDLNAARNIDTEGLRLFTHNVAVGQTETQNACGASVRPATVGAGR

SEQ ID NO: 32941 - protein, 375 aa, unknown
  TnpB Polypeptide
MKHTALKVRLIPTKEQQRLLWMHAGTRRYAYNFAKNYSENYYKTHGKSISIYDIAKIFRSQYNQILWIKDICKDVSDVAISDYGKAREKSFKDFKDGFHTSFKSKRDLMQGFAVDARKIKIDGKIYLPKIGWISVNQTPKRRKYKNPRVVFDGQYWYLSLILEIREKEMELTDEVIGIDFGLKSLAVVSNGDVYRNINKTKKVKDLEKKKKSLQREMSRRYKKGSKVQSKNYMKSKKAHLRVCRKLKNIRQNHLHQVSNAIVKTKPKAIVLEDLKVSKMLKDKRQAKPISEACWYTMRQFITYKAERYGIDVVIADEWFPSSRLCSNCHEKFNEVEQGRTWGLDIREWTCTCCKCKHDRDLNAAYNLKWYYNNQV

SEQ ID NO: 32942 - protein, 397 aa, unknown
  TnpB Polypeptide
MPAGDEGVLTLSISMRVSPEPAGIEILKRYNVALNYAINKILRLDLRSIGSVHNALYRELREWFGLPSRVAIDCYRDALTNANAWRNNPRRGRRPRVKKLSMLLHQGQGYRIEDGYVEIIGGIRLKIIGWDRRYDQYENGEARLVYRDGKMMLWISKRIPRPKPYKPRDAIAVDINERKIVYGDDKINKERDTKIDEAHRWKLLAESLQKKYSSPRYPAWRRRRGILNRIRSYHRKARNILEDWARKAPLKMIRLALKLQHAVAREDLTGLINSLRKIKNKDHRTKLIIMGYSRLGRWIDWQAMKHGVPLAIVNPNGTSSDCPQCGSKLEENGYRRLKCPKCEFEADRDIIGKLNIRKRALKKLKIKANPGGVLAPLTAPQMTDVNPNRWGEPMNRR

SEQ ID NO: 32943 - protein, 277 aa, unknown
  TnpB Polypeptide
VGRGISRMSGGGNPRGVPARDPDPLQAFRKEIEKRKRSRRRTNRVALFPNRYEEETLFDIGLACARLRNELSYEKRQAFFNGELSPGKRDEISKRYYHRYKGVLGVNAGQVVNKNDEAWNAFFKQLDLRKQRRLPPHIRKLSPPGYWKDRETGEKEIHILIRNDRYYLEPISEDEGYIVLEDFDLRIRYVGRIRWEGKQGRLEIIYEASRWQAHIPIEVGVDPPKSNKRGYVKPNYKDKKGRVVNPKSIKQKDPIGDKETFIDMGLNNLFAVVISDG

SEQ ID NO: 32944 - protein, 377 aa, unknown
  TnpB Polypeptide
MSETIETCRLLYNDLLDDRIKNRTQCLAQKRTVTVVRNENKFLKAVHSQVVQDVVFRLDWSYRRFFASLSRKPRFKRRGRYNSFTYPQLGGFKVVGGRLRLSKIGLITAKLHRPIEGTQKTCTIIRDIDQWYACISTEAERSEKAEPQSETAVGIDLGILKLATLSNGRVFENLIRLRDSITGIKSLQGELSRKKKGSHNREKARIMLAKAWRRVRNQRLDVAHKISANLATEYSTIVFEDLRIPNMVRNHKLASAITDASWGTLRQLTVYKAERRGRRVILVNPSGTSQKCSGCGEVIPKGLSERVHDCPKCGLVVDRDVNAARNILKAGLEQARVEEQPLPVQRRRISKLVPMKQKAHGTEPVSSVPRVAHTKSA

SEQ ID NO: 32945 - protein, 392 aa, unknown
  TnpB Polypeptide
MLSEMKRAYKFRIYPNNHQELRLNRTLDTCRHLYNDSLAERKRQAELNRLSFEFHVFPWGKPEWISYEDQANEMASLKTPEQKEVYSQVLQNVLKRLDRSFKNFFNGFGYPRFQGRGRYNTFTYPQSGFEIKDGKLTLSKIGSIKIVQHREIEGKIKTCTIKRDIDQWYVIFMVEIDQDIPKVHINSQIGIDVGLTSLLTLSNGLTVEPPRFLCQSEERLIREQKKLSKTKKSSHNRTRQKLKVGRVHRHVRNQRKDFAHKTSRWLVNTYDHIVFEDLQIQNMVRNHNLAKSISDAGWYQLINFTNSKAEYAGKKVELVNPRNTSQVCLCGQSVQKNLSVRVHKCPSCGLTMDRDHIAAKIILNRSTAGTTGIKACQSILNREPMKQEASQL

SEQ ID NO: 32946 - protein, 423 aa, Natrinema sp.
MQKSLTKTLVFQLQPDESGQQLLADAFLEARRVYNETIRRAKNGEDWDEIRQDLESDADLVNNTAQLVVQKSLEAMENYYEYDDYNQPSHTKDGAYPLRSNYEEGYNLFLEDDCIRYRASTKPYNTVKGTLSGSPDSLEQLRHAIQSDAWRVGTAEAMRRNKNYELHINITHTKAKVREKEESRTVVGADINEDCVALAALHEEDIIDSVVIDYPEIKGKRHRYFTMRKRTQNVGKSSFDRMFERKEERFVHDRLHKVSRQVVEWVSRFEKPVIVFEDLKGMRDSIDYGTRMNCRLHSLPFRKLREFITYKAAFQGIPSDKINPKYTSQACSLTDCEHTTRVNRNKKRFKCVECGRQDHADRNAAINIAKKGLGKLNRNVPALKTLPNVRKMRRQASGCVNQPTVTHGTARSHHADGIVGVSD

SEQ ID NO: 32947 - protein, 395 aa, Methanoculleus sp.
MLISYKYRAYPDATTEARLNAALDTCRWLYNKLLEECNTAREAGIAPTMRGTQARIVTLKDESPSLKNVYSKVLQMVNATLWSNIAALSQTKKRGRKIGKLRFKSAVRYRTLNYNQSGFKIDREHSSITFSKIGTIPFTMHRPYTGKVKGILITRSGDRWYVIVQAEQKVSESKREGRSVGIDVGLNSFAVDSDGAAIENPRFYEHSLDRIKKLHQSIARKQRFSINWKKAKGKLEKAYEHITNQKNDFLHKLSRQYVDTYATICVEDLNIKYLKEHGTSRGLRRSIHSASWGRFYSHLSYKAESAGTNFIQIDPRDTTQLCANCGSIVTKDLSVRVHDCPYCGFVADRDYNAAVNIHRVGMEQPFEPVEPRPLHHISVVQVLAMKQEAPPFRAG

SEQ ID NO: 32948 - protein, 406 aa, Methanoculleus sp.
MIASYKYRAYPNDVVELRLNNALDTCRWLYNKLLEECNTSRGNGISPTMQNLQARIVTLKKENPRLNEVYSKTLQMVNYTLWSNIRALSQMKKRGRKIGKLRFKSTFRYRTINYNQSGFKIDREHGTVTFSKIGTIPFDMYRPYSGTVKGVLITRSRDKWYVVIQTEQKVLTSKRDGRSVGIDVGLTSFAIDSDGVVIENPRFYEHSLKKIRKLHRSVSRKQKFSQNWKKAECKLSKVYEHVTNQKKDFLHKLSRYYVDTYATVCIEDLDIKRLKEKGNSTGLHRSIHDASWGRFYSYLMYKAESAGTNIIKVDPRNTSQMCSNCGSIVKKTLSDRIHECPYCGFIADRDYNAAVNIHRVGMEQPFEPVEVIPLHHRNVMQVLLMKQEAPPERRGVVHYTEVIRSS

SEQ ID NO: 32949 - protein, 427 aa, Methylacidiphilales sp.
VLTLTYEYKAMPTDEQIQLIEHTLTVCRKVWNFALRERKDWINSRKCPVNACLINSEYIIPADAPYPNCYEQANSLTLAKAEHPELKTVNAQVLQQVLRKLETAFVDMQRKGMGFPRFKNRYRMRSFVYPQLGKGEILKGSQIKLPQLGWMEYVKSRDIPDGFKVKQARMVRKASGYFLMLTLECDVNVPDPVASGHPRGIDLGLDQFAATSDGELIERPRFLNTLHRKLKLLQRRLKNKQKGSNNRHQLNRKIARLHQRIADTRKDWHFKLAHRLCDEAGMLFVEDIDFRTWAKGMLGKHTLDAGFGQFVSILQWVCWKRGVYFAKVNKDYTSQVCPQCDTHTGKKELSDRLHVCHNCGYTTHRDVAAAQVIRNRGISAVGRTVEENACGDGLTGTGNRLVKSQRSRKKGYEARLLQSRSKLQPAS

SEQ ID NO: 32950 - protein, 693 aa, unknown
  TnpB Polypeptide
MDDKYKRPSSTGHQYTGLKYLVEEFTLVSPEREVNKWGRGKRPDPRYKSTPTRSLGRELERATGQKVNRASLSLLGSYFSKYVELVNLVLDRIYAVPGRLDTLGEELSSYRGQGYTLLKKEEYLAYKENEDIKQQCFERMYRNVLEQAARITLSDWMRRQLMSSAIAHVSTDTDSLLQLLKNRYIPSKMIKEVRKRCNAIEDNGSGYYYTASVLRQLRKTLDQHILTELEQPLSYRSYQRKRVSNYLRDKSMSETVLRLAEGLLANFSTEGYPFSTPQMLSYTEDFSASTENSPGQGYWYSEDPEREDELFLFLKLPEPLRGTEHGASPYRTRTLAFRFLDWLPRAAEKDRGKAAVAEREGDRHRATRLRFRAMKFEDMHQQLMNTVGLQHATYQYARLKSRKEKDSEKMTELQEKITRLRKARKCGPPRLLLRGDRVVLQIPFLPPTREMTDAELGGTRTHSRRAGADRGVRVPVVLSTGDGNGGFVDEMISFGELLSKRDLLRQQTRGLTSQVKKMRNNWERKHPDRSPPAHLLKKERHLQAIWRKVRRLDGEIARQVASRTVWWCEEHGVRTLYFENLKNYSAPPGWGTLSWRLSSNLWSKFLSAVVYMRQSLGHKYGGVWTVSPAWTSQTCHVCGGRGVRVENEGSTEEKRGGEYFYCETCGVHIHADVNAARNIMCVQRPTAVGGRTA

SEQ ID NO: 32951 - protein, 315 aa, Fusobacterium sp.
  misc_feature (5)..(38): Xaa can be any naturally occurring amino acid
  misc_feature (246)..(279): Xaa can be any naturally occurring amino acid
LKFLXXXXXXXXXXXXXXXXXXXXXXXXXXXXXXXXXXLEKKGNITGLRFFKEDCCISWLGLKIPVIIKNNDKYAQSCFLDKLLYCRLLKRVVNGKNKYYVQITFEGTPPKKHKVGGENEIGIDIGTSTIAIVSDNKVELKILAENIEINEKEKTRLQRKLDRQRRANNLNKYNADGTINIENKEKWKKSKSYLKTQLKLANIQRKIADKRKQAHNILANSILEIGTIVKVENMSFKGLQRRSKKXXXXXXXXXXXXXXXXXXXXXXXXXXXXXXXXXXKKRKCKNIKNVWDFKIKTGFEPNQQDVNILNGEFVH

SEQ ID NO: 32952 - protein, 382 aa, Erysipelotrichaceae sp.
MTKKNRRSYRFRIYPNPSQKELIEKTLGCCRQVYNDFLSMCIESYKADKNYSIKKYDLVKLLPEYKETFPYLKEVDSNALQQAVIHLFNAYMNFFRRNAEFPRFKKKKNDYGYMTTKINNSIRFIEDDIQIPKLGRVKVKAHRHLPESFKFTMVSVSRKGKYYYVSLMGEEEYFDYAEYIKESLDPNNSIGLDFSLAHLFVDSNGNHLDMPTYYQDSLTRLAKEQRKLSRMKKDSSHYKKQLLRVRNLHEHIANQRKDFLHKVSRKLANTYDYVFVENLDLKEMSERKDKLKLGISIFDLGYWTFLNYLSYKLEWLNKKLIKVDRYFPSSQICSSCTYRKTDLTLNQRNWVCPICGSKHDRDLNAAINIKKEGIRIILNPSK

SEQ ID NO: 32953 - protein, 419 aa, Moorea sp.
MIIIEFKAYGKESQYQAIDEAIRTVKFVRNSCLRLWMDNKGTGKYDLSKYCKVLAKQFPFANELNSTARQAASERAWSSIGRRPRYANVRFYDNCKKNKPGKKGFPRFQKHCRSVEYKQSGWKLSSDNKAITFSDKKSIGKLKLKGTWDLWQFDKKQIKRVRIIKRADGYYVQFCVAVDIKEDLDPSKRNVGLDVGLKEFYTDSDGNTEPNPRFYRKGEKRLKFYQRRVSRKVKGSANRKKAINRLGRHHLRISRQRVGEACAKRIEHAKRLARCVIRSNDLVAYEDLRVKNLVKNHCLAKSINDAGWYQFRKWLEHFGTKFGRVTVAVNPAYTSQNCSECGEVVKKSLSTRTHICKCGCKLDRDHNAAVNILKKALGTVGHTGTWIIDPNASGDLASTVLGSGQVQQAESMIEESPRL

SEQ ID NO: 32954 - protein, 270 aa, Beggiatoa sp.
LIGKTIKQVEIIPKSHSFQAVFVYEDQTTYRQVASNDNVMSIDLGLNNLATCVTNSVIKPFIVDGRRIKSVNAYYNKRKALIQSELEKSRGKRWSNRLQSLTDWRNARVNDYLHKATAHVVKTCLTHQISFVVVGDVAKSLDQINLGTKTNQNFVNLSLGQFVEKLSYKLGQHSIKLIVANESYTSKASFKDSDKMPKKYEKNAKPTYSGKRLKRGLYRSKDETLINADVNGAYNILRKSDCSFSFQKLINKVGNGIKSWLHPTGRVFIK

SEQ ID NO: 32955 - protein, 225 aa, Rubrobacteraceae sp.
VEDAPAGSVYALVRSGESVDPHVGWLASQQDSALRNAGEKFRKGKKQSANYKKAKKKPGEKHSKVSRQRKDHAIKAARCVVMSNDFIAFEDLKVRNMVKNKRLSKSINDAGWYQFRVWLEYYGKVYGKITVAVSPEYTSQECSNCGELVKKTLSTRTHLCRCGLILDRDHNAALNILDRALRTVGHTGTWASEAVAALLARNACGEVVRSHLGANLAEARRIPRL

SEQ ID NO: 32956 - protein, 130 aa, unknown
  TnpB Polypeptide
VHEKIANQRNDFLQKQSTMLVRENQTICIEDLNVKGMIRNHKLAKSIASVSWAKFFKMLEYKAIWYGNEIQRVPMMYPSSQTCSSCGYRNPRIKNLSIRIWECPKCHAVHDRDTNAGINILKKALQMQSA

SEQ ID NO: 32957 - protein, 543 aa, Verrucomicrobia sp.
MTITIETRIADDPAILPVLESCAALFSRLERLLFVALYARGETLNAAKRRFLTEHCITARHFNAIYKQLSAKVESWREVRKLNLATVSKQIVKTQKAIAKAKAPFVKHQKKRRLQKLRDRKAGIERDLAAPVPSVCFGSRKLFGQQHELAANGYADHAAWQKAWRASRSSSFFVLGSADETAGNQTCQYRDGALHLRLPDALGGETLVVPVAFRYRVADLLAALTPTKQTVTRGPRKGKAVTRHSAVSYRFLRRDNGHWYAQAMFEVAAAPITTSGRKGCAGIDTNPWGLAVTRCDRCGNPVDTLDIPWAVEGRSADQAKASIGDAVAVAVLYAEKHGVPVAVETLDFDDKKNEDRGARCNRMLSAFAYAAFAQMLRGRCAREGVELVEVNPAFTSVIGAAKFAAGYGLSVHRAAALAIARRALNFGEVLRTRHTGSALALPARNRTRHVWSDWRRWAKARRPQRKAPTKPKGSRGSKPPNGRQMPIPCHPTTAQVGGRAGRATPRRNAVPVECGATPQANGRHRCSDGLVSVNSHAPKCAVR

SEQ ID NO: 32958 - protein, 451 aa, unknown
  TnpB Polypeptide
MQLTHKIALCPTPEQVDYFKRACGTARRVWNWALNEWNRQYTAGGRPNAMSLKKQFNAIKYTDPQWLDENGRPWLKDIHRDAHAQPFRNLAKAWERFFADLKQGKEAHKPRLKKKGRCRDSFYVANDKFTLNGRTIRLPKIGEVAMTEELRFAGKILGATVSRTADRWFVAIQVEVPDAQFYRRRTSHEVNGVDLGIKAAATISNGEVIEAPKPLKAALRRLKIRSRHLSRKLEAAKKAAGFERRARLPRGTRLPVSNNRRKSTATLARLHARIANIRADFTHKLTTRLCRENQALVIEDLNVKGMLENEKLARAISDVGFGMLRSQLEYKARRYGTHLITADRWYPSSRLCSICGWKNEALTLTDRKWVCAQCGAHHDRDLNAALNLKRLATETALPVASPTSNGGAASGTVPAVVGKVTPVRYDGKTRRGRKRNVRTFAHFLDSSRRSQ

SEQ ID NO: 32959 - protein, 438 aa, unknown
  TnpB Polypeptide
MITTAQKIMLIVDKKTASILNRACGCARYAYNWARDTWFAKKKAGQSSVTCEELCKEFNAQKTDWMYESPKGSMVRAIKNFVLAKKRHYENPELFGFPKRKKYKSKHSFYIENDKAKLLDESHIKLPKIPMPVRLAEPVKQECVHGKINNFVVSKGSNDCWYVSISYTYDDTYVEYGTTENCLVGIDMGVKTLMQLSTGEHVANDKILRQHAKRLKRYQRMMASRKYNSVHYKDIKKTFDKKNTYIKNFRKDLIHKATTEIVKHNMVVAIEDLNVKGMLSNHKLASAISDCGFGMIRRFLEYKSAKYGTLLLKVGRFFPSSKKCSGCGHVKEKLSLSEREFICEECGLAIDRDTNAAINILAEALFIELNNRFNTDIARRKFTPADLVALASSLSGSGETTEVDAHCLLTRDGRAAMVDDFLNRLWNQVANATINCYI

SEQ ID NO: 32960 - protein, 382 aa, unknown
  TnpB Polypeptide
VATVQKGIRVRLYPTEEQEALINKTIGCCRFVSNQTLADCKQSYEQTQHFPSKNERVKNLVPLKETNEFLKEVDSTALQQSVRDLNSSLNNFFKNRSHFGFPKFKSKHDLKQSYRTPYNGGNADVLDNKHLKLPKLGRVKTKRFDMPESYKIFNITVERTNTGKYYASICIETEAQSLPKTGRQVGFDLGLIDLLIGSDGTRYERPKFNYANKDRLAKEQRKLSKMRTKLERADANLDECKNYQKQKRKVAKLHEHIFNCAKDFNHKLSRKLVEEYDLIAMEDLNVSGLIQNHYLAYSISDVRWTQLVNFIQYKCQWYGKEFKQVDRFYASSKICSCCGIYHKDIVNSLKVREWVCPDCGVHHDRDVNAAKNILIQALSVGV

SEQ ID NO: 32961 - protein, 382 aa, unknown
  TnpB Polypeptide
MKAAYKYRFYPDKQQEALLAQSFGCVRFVWNKVLGYRNEQFEVGNKINSSAAMKYLTDLKKEPEFTFLNHVSSVALQQSVRNQNKAYDNFFAKRAKFPRFKKRHNRQSLQLMANAFSIKNDEVYIAKNKKPLNITWSRPITGKISSLTISKEPSGKYYISFIAEKEQKLLPVVSKTCGIDIGLKDLLCFDNGEKIQDLKAYLLYEKLVLRAQRKLSRFDERRKKLGLKVRDSSVKRERLRKKLARLREKITCIKRDYIHKLTTKIINENQVICVEDLGIKNMIKNRKLSRRIHEASWGEIIRQLMYKAEWYGRTIVKINRWYPSSKKCSTDGCDYKKDKLPLSIREWTCPCCGTRHDRDINAARNIKAAGQAALASGVTVAG

SEQ ID NO: 32962 - protein, 405 aa, unknown
  TnpB Polypeptide
MGVIFVGRWLYGVGVQMRYRYRIEPTPAQQKKLSRIFGCCRVVFNDAVRLRQEAHRAGVVLSDTEIQHQVLTVAKTTAERGWLREVPSVALVQSVNDARRAFRNFFNSVTGKRKGRQVGAPRFKRRKTNRQSFRLTRNGFRIRPNGRLEIAKIGGVAVRWSRALPSEPSSVTIIREPDGHHYATFVVEVPSFPLPTVRLASIADTSGGCVDVSIPRYLQRKSRKLAQLQREMCRRRKGSKNRDKARRKVAIQHGKVARCRRDHHHKEALTLVRENQAIYVEDLNIAGMVCNRRLARAINDAGWSQFVKIVGEKSDRYGRSLHRVSRWLASSKTCSGCGHVLDELALRTRVWQCPACSAVHDRDHNAAKNVLAAGRAERLNAGGASVSPPIREVRGDEAGSTSTAA

SEQ ID NO: 32963 - protein, 409 aa, unknown
  TnpB Polypeptide
VRTAYRCRAYPDEQQQAVLHRTFGCVRVVWNRTLATRQARWQIEGRGTSYAETDRALTAMKKDPDLAFLAEVSCVPLQQALRHQHQAFTAFFARRARYPRFKSRRSRQSAHYTRRAFTLRGGQLRLAKTDAPLRFVWSWPEMDLTALDPAMVIISREPDGRWYVTFTVDTDAPRPLPQTGHAVGVDLGVTDFAVTSAGEKIPSPRHLERRARSLARYQRRLARCQQGSANRAKAAAKVARAHRKVRHARADFLHRASTRLVRDNDVIVIEDLNVAGLVRNSRLARAISDCGWGEFRRQLAYKCQRYGRRLVVIDRWYPSSKTCSGCGHRLAELSLSTRYWTCPSCGARHDRDLNAAKNIHAAGRAVARGSPGDACGAEVRHSGSSRVRSAVKQEPRPARAGIPVPEGGE

SEQ ID NO: 32964 - protein, 184 aa, unknown
  TnpB Polypeptide
MRVKKCSLNLFIAILHLLCSLVARQETHVELDPRHRMGPHRIRPQGIQIQHDCSHIVFEDLTYIRVNIPKATWQHVWAFRRLYEYVEYKAEEYGVEVLQVDPRNTSKRCSTCGFTHSDNRSSEAFYWQKCEFENHADNNASKNIGLQYLRRRQNANDGDAPVDVRLNRGTLNVNGEYSPTALSG

SEQ ID NO: 32965 - protein, 531 aa, unknown
  TnpB Polypeptide
MNPRMPKGEAPKLYLGVHARLVFPDPRDEEAVLDLMRRFSSAVRFAYNRLLEGRPREELKRAEGPLCTLFRLNTRYADGAIAKAKAVLDSALELGNDPKKVVFGGRGLFEQLKRKHLSGKDRERLKRRWKEKRRGLLYTRGDRSKKGGNPHFKLQVEGGALWLLVHLGEEEGQKEGERKKFARALVKTSHPQLNALLERIHTGLPYNAELTLKEGKVYAHFTWSEELPPPVHTQANGVLGIDVNGDPYHLALAVVSPDGNLVRYLTLSLEEVDFAPNRGAKELFLWKVAHQVVAVAEEHSIALATERLKYLRKSKRGDGSGRSFRRKQYRFAYRSLLEKIHSLARKRGVEVLEVDPQDTSTIGMLKYAPQLHLSKDVAAALVIGRRALGFEEKLPKGYEALLKDDAFLAHVQGFYGNRLQELQSLRGAEKNPYLRRRLSRGIGKAKAALTLVSSLQGSPGSREGVTKGRNPSGAHPWRVLRVGFFLPLLGLEVPRDLSPFKAILHGSWEGWKVGSGPHPGGGPECANVHFY

SEQ ID NO: 32966 - protein, 411 aa, Trichocoleus sp.
MIVYEFKVKGKEAQYRGIDEAIRTSQFIQNKCLRQYDLNKYCAVLAAQFPFAEELNSMARQSAAERTWSAIARFFDNCKKKVLGKKGFPKFKKNCRSVEYKTSGWKLSPNRKAITFRDGKNIGTLKLKGTYDLNYYDIKLLKRVRLVRRADGYYAQFAIDVKVRVETKPTGKMVGLDLGLKFFIADNEGNTEPCPQFYRKSEKQLNRGNRQKSKKFKRGAKPQSKNYHKARNRYARKHLRVSRQRKEYCKRVAYSVIQSNDLVAYEELNVKGLVKNRRLAKSISDAGWSTFRQWLEYFGFKYGKVTIAVPPHNTSQNCSSCGKKVKKSLSTRTHVFPHCGFIEDRDVNAAINILKLALSTAGHAGTYAWGDLPSWAIGAILSFNGESANQESHSLSSVGVSKDNAAYPTHL

SEQ ID NO: 32967 - protein, 419 aa, Trichocoleus sp.
VFTLSYEYKLVPTPEQVATIEQTLDVCRKVWNFALRERKDWVGSRKCEVNACSLISEYIIPADAPYPNYHKQAKALTEAKKANSGLKEINAQVLQQVLRTLDRAFEDMRERGFGFPRFKNYARMRSYVYPQMLKNPLRKDAVKLPQLGWVRMRMSRPIPDSFELKQARIVRRPSGYFVILSLQLDVNIPEPNFHGHVIGIDLGLEKFLATSDGKLVARPKFFNSLHRKLKLLQRRLRNKKKGSKNRRKLNQKIARVHQKISDTRKDFHFKTSHYLCDQAQTIIAEDLNLKAMSRGMLCKHTLDAGFGQFLNILSWTCWKRGTHFAKVNPNGTSQECPRCHAQVRKDLSVRIHRCPECGYITDRDVASAQVIRERGIAAAGQVVEQIACGGDAAGAEVTRSSWHPLRQETLGAILGNPRP

SEQ ID NO: 32968 - protein, 235 aa, unknown
  TnpB Polypeptide
MFIRKIKTKDIFMRKNNLSVVIELMLLSAFYSDNSDPVYDSYLDYLGLDYKSNGLYMDSDGNKAFGSNKIYRQYEKKLAKAQRKLKNKDVGSNNYYKQILKINKIHNKIKNKRLDYLHKLSTKITNLYDVICIEDLNMKNLSNKGFKNGKATLDNGYGMFTAMLAYKQELKGHYLVKIDKWYPSSQICSNCGNRQKISLEKRLYTCPKCGKIIDRDHNAAINIKNEGIRLLKAIN

SEQ ID NO: 32969 - protein, 329 aa, Halomonas sp.
MKQTKTLKVRVKDKHAAELNHMARSVNFVWNYLNELSSRAIREKGLFLSAYDMHPYTKGAGKDLGLHSQTLQCIAAEYVARRKQFKKPRLNWRKSGGVRRSLGWIPVNTGAAKWKNGQVFHNGTYFKVWDSYGLSTYKFRAGSFNEDSRGRWYFNVAVEVDVQPTLGQGAVGIDLGLKDVATCSDGGRLENSRFYRRMEDQLATAQRARNKRRVKAIHAKIKNRRQDAQHKFSRKLVNQYGEIVVGDVSSTKLAKTKMAKSVYDAGWSQLKTMLEYKCAHAGIVFKVVRETNTTRACSSCGSLSGPPGVNGLRVRAGSAWSVVYSTTGT

SEQ ID NO: 32970 - protein, 442 aa, unknown
  TnpB Polypeptide
MRTVSSYGVELRKQNIPIRQTLDIYRSAVSCLIEIYSQAWDELAVITESKKRFNTAEHLVHTTKKNQARFDFDLRFPKMPSYLRRAAIQHALGSVSSYKTRLKLWEKMDQKGGTPKLVCGNHAMPVFYRDVMYREDTEEKDGAYLKLYDGHDWKWFRVSLSHTDMEYLRKNWAGKRAAAPVLEKRYRKYFLCFSYTEEVPLTKAPVKEQIICSVDLGINTDAVCTIMRPDGTVLGRKFIDFPSEKDRMYRVLGRIRRFQREHGSVQVKSRWAYAKRLNTELGRKVAGAVTGYAEENHADVIVFEYLETKGKISGRKKQKLHLWRKRDIQIRCEHQAHRRGMRISRICAWNTSRLACDGSGTVVRDPGNHSLCTFQNGKRYNCDLSASYNIGARYFIRELLKPLPATERSLLEAKVPSVKRRISCVYADLRELFSEMELLRAA

SEQ ID NO: 32971 - protein, 363 aa, unknown
  TnpB Polypeptide
MALKAHKIALRPTAAQVTWFQRQCGYARYAFNSALADFKAGLSEGVFRSFIDLNTRWNQRKKELDWAGEQDQRAALHGVKNLSDAVSRWQKKQNNFPKFKKRGFRQSYTVEGYQCKVDGKSIKLPKIGEVKMFSALRFDGKIKRVTISRTTHRWFVCILVDTGIPNTPRDTRGLPVVGIDVGVNTLATLDNGAKYENPRPLKRYERKLKREQRKLSRKVFLSANWYKQKRIVERLHYRIACIRRDAHYKATTAIVMSAAKIGIETLSVPNMLKNRKLAKALSDAALGGFLEKLKTKAETLDIPIVQADRFFASSKTCSRCGQKKDDLTLSDRQYHCRLCGTSIDRDVNAAINLKHLAAGYAES

SEQ ID NO: 32972 - protein, 373 aa, unknown
  TnpB Polypeptide
MRKTYLYQTKINKTTEANCNQWLEICRTLYNLALEQRISIYKQHGKSISLYQQMSQLPELKQSFPEFKTVGSQCLQDVLQRLDKAFKGFYQRLKERHSKAGFPRFKSKNRYDSFTLKQSGWRLEGRCLYIKNVGRFKLFLSRPIEGDIKTVTIRRTSTGKWFIAFSCDNVPVKKLSDTPAEIGIDVGIKSFCLDSEANQIQNPKHLEKSLKLLRRRQRSLSRKKKGSRRRNKARILVAKAHEKVVNQRKDFLHKVANLYIKAYNTIYVEDLNIKGMIRNRYLSRSIADSSWGMFFNLLSYKAAEAGRTVVKVTPNGTSQICSGCGEKVPKSLSVRVHQCPFCKLVLDRDHNASLNILRLGQSLPALSTERVFA

SEQ ID NO: 32973 - protein, 386 aa, Streptomyces sp.
MKQVVQVKLLPTPEQASALEMTLAACNEAATWVSSLAYEHGVTRNFGLRKLAYPQIRARWGLGAQAAQHVIKRTCDAYATLKANLKAGNLGKPGSKRYRKAAGKPITFCPEGAQPYDDRCLSWQYDTQTVSIWTTAGRLKNVRFACSADALKTLQQYRKGESDLIERDGVFYLIATCEIPESAPYEPDSFIGVDLGIANIATTSTGYQAAGRGLNRYRKRQLALRAKLQKKHTKSAKRRLKERSRREARHAKNTNHIIAKTIVTEAERTSAGISLEELKGIRQRVRLRKPQRVTLHSWAFAQLGDFIVYKAKRAGVPLVFVDPAYTSQTCAECGHVDKRNRIDQGLFICRGCGVVAHADRNASHNIAQRGESVWNAGRESRVPAIP

SEQ ID NO: 32974 - protein, 519 aa, unknown
  TnpB Polypeptide
VTKNRTYRSFTARLTHVLGLDGELLEAAHIMAWLSSEVCDISAYATFVVRNDTALGEKLEDVAVSVPADAGRRAGVTMPDFLVSGKSGRSRKEKLLQYNVVTTHRSWRERAKAENGESSKYVSQGWKRTANAAAPSYGGDYVNLGAVDDHYARIENNPFADGEIVLKMVIQGQWYRLIFDFDNKRFGEGKVTLPVIKVEDGVPVFIFTVVTDNPVVQFSDDYTIGVDVGINNYATVVVRSSSTGQIVHKSTLSQRVHSLWNSVRASELQVRYLRKKAATLLRDRQARMSALDEAQLHREAASRKKRELAILAAQEIAYLSHVWGNAVVAVEDLSWIVNTMQNGRWNRGELVKWLTHYVSQNGGWVVSVNPARTSQLCYKCGSKVAHPTHKDSVCPEHGVMDRDVNAAANIAARTISRVTKARVTRAKNRKLRQQAPLRTPVARNSLKYPGRDRTKNKPTPRRKNRSRVFGEVILPVCPARAQAQRLEARVLADGGTHRVAGTSQAALKQACVTYRCMLL

SEQ ID NO: 32975 - protein, 430 aa, Shimazuella sp.
VSEKTHGFNHGMKARVRREMAEIISSDYFFEILDINKRKFYNIRKIPFREVKSMHKAFQFRLRPTTKQRILMHKSIGCSRFVFNHFLRKWNESYQETGKGLSYPKCSQLLTAKKRELTWLKEVDSTSLQNTLKHLADGFSRFFQKQNDAPRLKSRRNRVQTYTSQCNYPKQGRPTIEIVKNKIKLPKLGWVKFVKTREISGRILSATIRRTPSGKYQVSVLCEGSYLRSVPAQKEAVGMDLGLKDFAIFDDGTKINPSRFFRRYEEKLAKAQRILSQRMKGGSNWHKARIKVARIHEKIGNKRHDFLHKLSTQLVHENQVISTESLQTGNMIKNRNLAKSITDASWSEFVTMLTYKAAWYGRTIVKVGKTFPSSQRCSSPDCRYKNKEVKDLNLREWTCPSCHEHHDRDINAAKNIVQEGLRLIAAGLAV

SEQ ID NO: 32976 - protein, 310 aa, Synechococcales sp.
MKARYQFRFYPTDQQRQSLVQLFGCVRVVGNNALAFSKSSKYQWLNRVSSALLQQSLKQLEVANKTYFDSLKGKRKGGTVGQPRFKKKTNDPSATLTKATFSIQQGGVFLAKIGNLDSIWSRDLLSEPSSVTAIQDYTNRYFFSVVVEMQPVQVDTINQSIRIDLGTKPFAMMSDGSKAESPNYSKHVRKMRKLQKTVVDQQKGSNRGNNTQIQIAKQHNRMVDIRDGWEPRSQICLAWGFKWGKLNLKVWSVRCLNCGTEQNREENAAKNIESSRHRALGDSKRTQRQSKTTSVASVSEASRITVASAR

SEQ ID NO: 32977 - protein, 349 aa, unknown
  TnpB Polypeptide
MAFEVNQVWNAANEITRDYSWVPIPGVGFVNLDTSEFDLNKELRGIRKERSLSIGAATVQSVIAQHAKSRRQFKKNKLNWRSSSGSKRALGWIPFKAAGVKLVNGQIRFCGGFFGLWDSYDLSKYELGTGSFSQDARGRWYFNTTVKVEVKPSEGSKSVGIDLGLKTTATCSDGEKLERKRITDEFAEPLAKAQRANKTRLIKTIHARIKNKRNDAIHKFTTAMTKNYGAIFVGNVSSSKLVKTRMAKSVLDTGWGMLKTQLEYKANARSVVYQEVNEKNTTQTCSSCGVISASSPKGRAGLGIREWTCCECGATHDRDINAARNILRLGHQSLEAGILALSAQAAAVG

SEQ ID NO: 32978 - protein, 262 aa, Hydrocoleum sp.
MKSIRTKLKLNNKQKAMMAQHAGYSRWCYNWGLGLWNAAYKDGYKPNTRKLREVFTNHTKPLYPWMKNLSSRVYQYAFINLGEAFKRFFQGLGKHPKFKKKGKSDSFTIDNCGKPIELNGWSHKLPFLGIVKTYEPIEATTKKITISRQAGDWYLSCSYEFNGITTAKKTDVVGVDLGVKTLATLSDGKVFKSVKSYQRFEAKLSRLQYLHRQKKVGSANWKRAQLKIGRLHRRVASIRKDALHKLTTYLAKNHSVVAQAKI

SEQ ID NO: 32979 - protein, 469 aa, Nitrincola sp.
MLIGIKLRANPTPHQRLILSQWMGCARSIWNAKVEEEHYYRTFARKYCPIGTYAPIDQTTAQFKSAELTPWLDNCPSQILRNSAVNWFKTYKKFMSGQCGRPKRKPKTDKGSIHLTREVFRFDRCEDGNIRLFIGTKTNNIGYLSFKAHDKFQIPNSMYIRKERGQYTLSFCYENNVSDADLLTPEQHLTRLQGATRDYLEENTLGIDRGVIIPVHAGKKTYDFTQDQKKSMSKSERYIKRLQRRLARQQKGSHRRAKTKHRIAVHHAKKANIRHDFAHKTSRSLVNSDANIIVFEALRTAMMTHKPKAQQDEQGRYVSNRAKQKAGLNKSILNVGWHFIEAFTKYKAFHAGKVVFKIPAPRTSQECALCGHTHPDNRKSQDVFACGHCGHTDNADHNASMVIKKRAINLILDTGTVLSDDGVLKPKSDTGRGGMRKTGQAKSSTSRGLRSVKKEKRATQVAGLEALPL

SEQ ID NO: 32980 - protein, 406 aa, Hapalosiphon sp.
MQVFNLTYEFKLKPTQKQFITFEQWLEINRRVYNYALRERKDWYKSRSCLFNACSLRSEYIICVDVPRPTYASQCKSLTEAKKTNPDLKIVQSQVLQQTLKRLENAFTSMWEQNHGFPRFKKPGRMRSFVFPQMKGDRLDVGKIKLPVIGWVKFRQSRPIPDGGVIKQARVVKRVSGWYVMLTVQWDVNLPQPMPHGEAVGIDVGLTSFVATSNGLLVKRPRFFVDAERKLKLLQQRVSKKRIGSNNWYKAQKKVASLHEYVANCRKDWHRKLSHQICNDAGMVFVEDLNLVGLSRGMLGKHCLDAGFGQFFNILEQTCFKRGVYFQKVDARKTTQICPSCGIETGKKELSQRTHKCSNCGYTTDRDVASAQVVAIRGLAAVGHTVKMLAEGKFIGIPVKQESPHL

SEQ ID NO: 32981 - protein, 445 aa, Clostridium sp.
MKVYSSYKVKIKHYNNIFKQTVEIYRNAVSFFIDVCDKEWDTLKPLKNLERCSKIEKLTIQTKKNQNPKYDFNERFYKMPVYFRRSAINTAIGCYSSYYSNLKNWEANPIDKKPTLQLDRNVMPTFYKGNTYIRTDSNTARIKIFHKNDWVWLDVELNNRDVKYIQKHCKFKKEYVPTLKKQGKCWYLVFPFSDDIKLQKVDIKEQLICAVDLGLNNNATCSIMQSNGTVVGRKFINLRTEKDHLYKSLNRVKKAQQNGARKCPTLWKHVNDLNTDVSRKTAKEIIDFAVLYNVDVIVFEYLDTQGKKKGKGKQKLALWRKQEIQRLVEHKAHILGIRISRICAWNTSRLAFDGSGKVERGTYIQNGKEKYNYSICTFQNGKQYHCDLNATYNIGARYFIRELLKSNSVMRRLPNQTKDSDYGTGTTRTLSTLIRLNADLCGVSA

SEQ ID NO: 32982 - protein, 410 aa, Clostridium sp.
VIVAMDNEATRVEKHIIKSNNKYYKILDEYCFKSKNLYNFANYHIRKTFIDTGEWLKYNKLDKMLKQKDMDFDYRNMPTAQSSQQCLKLLDKNWKSFFKSIKDWVKHKDKYSGRPKLPKYLKKNGRNILILTNQNCKLKNNIINFPKTFNGFTLKTKANNIQQVRMLSRNKHIVIEVVYKINIKDKIKDNNKYVSIDIGLDNLATLTNNCNIQPVIINGRKIKSINKYYNKELSHYREIAKRVNNLDYTNRMNRLTIKRNNIISDLIHKASKSIIEYTLSCGANTIIIGNNKDWKRNSSMSKKVNQSFVCIPHQDLIDKITYKAENIGLNVIVTEESYTSGTSFLDNELPIKENYKKERRIFRGLFKTNKGRLINADVNGSLQIMKKVFSNAFDGYEIEGLGLTPIKVGL

SEQ ID NO: 32983 - protein, 376 aa, unknown
  TnpB Polypeptide
MIRAIRIRLYPTPDQKKYLAGLFGAVRFCFNKALYLKTHFYKVKGVNLHPIHDLKKLIAIAKKSKKYAWLAEYDCMALQESVRNLNKAYGRFFKKEAGYPRFKSRRGEQSSYHCTGVSAGDDFVKVPKMKKIKAVMHRKIEGKVKSITLSMDACGDYWASVLYEDGLPEAVPATCVRQTKTVGVDVGIETFGTCSDGEKIKSPKALKSAEKKLKKAQRAFSRKQKGSKNREKARKRLARLHRKVKRRRSDFLHKTSRRLVNDNQALIFETLKIQGMMKNHHLAKAIADAGWAEFMRQCEYKAKHEGRIFAKIGTFFPSSKTCSACGHKLKELSLATRRWTCPHCGAHHDRDLNASLNIKQEGIRMLKAAGLTVLRS

SEQ ID NO: 32984 - protein, 539 aa, unknown
  TnpB Polypeptide
MTTPSFILELPIQDGDDVRRFLDPKFDFGREVFNATLSTALGRLQALWESKAWREACALEKGKERTKRLNALREAAGLTKYALITVANDHRNAAKRFIPVRTPGVKGKRTPDSECILGAHVAQKIGLQVWKAMERYMFGKGGRPRFKSKRRPLHSLEGQSANATIIWRPSTQEVVWNKRPMKVLIPDTPYVKEALRDPVHPEKPRKVKFCRIVWKMIRGRRRYFLQLVMEGHAPVRHVYAPTSEQVGIDPAPSKVHAYSPEGVLITKAATVDGHEKEIAALQRKMDASRRATNPDNYNADGTAKVGCRNWVFSKNYGKLQLKLNEIHRCLTETRKRDHGTIINLILSLGGSVRVEKNSYLSFQKNFGKSVGKYAVGSLIQRLKNKAESAGLEYVELNPYRLRLSQYEHVEGTYKKKPLSQRWTRVGNCVVQRDIYSAFLAAFANEKSHDPSLLKKEWTRAEPLLRAAGLLRDYDPATDGDLSKSTKEPAFAAAFRRQSGEQLEAFRKHGDSRSPTHHRRRKRKRASKAGKAAGKAVPSR

SEQ ID NO: 32985 - protein, 302 aa, unknown
  TnpB Polypeptide
MLCYRFRLYPTKTQARDLTATLDVCRQFYNGLLDERKIGHENGHQVTKTEQLRRVKELKAAGLPVFVHSHVLQVVAADLDKAFQNFFRRVKSGETPGYPRYKGRDQFDSFGLKEFGNGFFIDGRRLKITGIGRIVVRWHRELPVDVKTLRITRRAGKWYACFACETEDEPLAPTGLAVGIDVGISHLLATSDGEFVENPRWYRAGQKDLRRVQRSVSRKKKGGRNRRKSVLQLQRHHERVKNRRKDFLNKVAHRLISRYDVIALEDLRIKNMVRNHHLSKSILQEYFGRGLELPHATTRRQG

SEQ ID NO: 32986 - protein, 349 aa, Clostridiaceae sp.
MLFNRKVEVIFSKENSNILDGQSRICNWLYNKLLEISIKDYAENNNDNRLLNGSNLRDLVPQMKKEHNFLRTVYSSPLKNVALRLKESYIKFFNRDNGFPHYKAWKDNWFSLFYDEPNKGFKILEGNNIQISLGTDGFEKRLKVVGHIKESLSLRKTDKIKNFRLCKQQGERFYAVFCIEREDIELKEVEKWISIDPNHKNLFMAVDNNGVSYEFSKLYQLRFWDKIIDKIKAKRDLCRKKSKKVITENGATYFIPSKRWNHLNRALDRGYNSRREQIKSACYSIANWLAKNYDYVAFGDYSPSIDIAIETNMHRSMLNQAVIGTLRGIVKWVMIRSGKILLQVAQPSN

SEQ ID NO: 32987 - protein, 212 aa, Exiguobacterium sp.
VSQTLTVNIKLHPTRAQQAILERMMDTYIRTANQLVASTGCDKERFFGNGRENKYMKRKFRAKRKELGQKKKLKAIKKLDNKEQRWMKDKDHKVSREIVDFAKENHISVIRLERLANIRQTARTSRKNAKNLHTWSFYRLATFIEYKAKLEGIKVEYVNPAHTSQTRPSCGSRNKAKDRTYVCLCGFKKHRDLVGAMNIRYAPVVDGDSRPA

SEQ ID NO: 32988 - protein, 454 aa, unknown
  TnpB Polypeptide
MTVKIINKAYKFRLKPSEEQLTKLYQMAGCGRVVYNDSLDYFLSILKKETGISDKKKLYEHLNDITPKERRELKKSLPSAFTLNKLLTGWKKKPDRLWLADSFASSLQQRQADLAKACKDWASGKRGFPKVRKRKIAHHSTMRFPSFSTQCEIDNRRIKLTGKLGFVGFYKSQNIEGNPKSATVSLNAQGQWHVSILCEVENRIPDYVEGGQVGIDMGIAKNITCSNDVCGDRGVFGGVHSYRAFEKKLATEQRKLSRKAKGSSNWKKQKQKVNKVHGRIANIRRDYLQKTTTEICKNHAMVVCELLKVRNMSKSAKGTEEKHGKNVAAKSGLNKSILDEGWHEIRRQLEYKMAWKGGVFTTVNPRNTSRECNHCGHTEKANRTSQAVFKCVSCGHSENADKNAAKIILLRYLKELDESITGLDLARSACEVSRVIDQQQEVLDWSNPTQLTLI

SEQ ID NO: 32989 - protein, 350 aa, unknown
  TnpB Polypeptide
MLAKTAGTARYCYNWGLAKWNEMYKNGESCSTCELSRLWTKERPEWAKETFRGAQTKAFMYLGTAFSRFFKNLAGRPTFHKKGRKDSFYVDNDKGRIKGEIRVHLPNIGDVRMAEKLRFDGKIQRFVVSKVADKWYVSISVEMADEPMPENENITPIGIDVGSKHWAVASNGDVLDRPKSIPKLEKSLKHAQRSLSRKQKASRNSAKARIRVARLHQRIRNVKRDAVHKFTSRIAKNHGVVCCETLCVKGMGRSVKSIRKAVHNSCMGELRIMLAYKAAHYVEIDRFYPSSKRCSRCGNVKDELSLSERTYRCESCGNVIDRDLNAAINIRDEGFRIFTEGHSESACGGR

SEQ ID NO: 32990 - protein, 590 aa, unknown
  TnpB Polypeptide
MRTGRTHQPLTYDVRLPDEAQVDALRLLDESREVVNQALTMLWPHLDEFGSERAERAGPAWKQVGKYIGSPSPHGDRQWRCESEVVGRLLRQQAERKKAFELVAPILSDGFIRPKTEKRPAGKNRPAIKEAITALQKSLEEDETSFVALQNVVEQACNFFFQQDCFPIAYEELQPVPLLKVGMLTYAGDDGREKGQAYRMAVDLDKGVARFRFRYPDEAGTWRWRTGDTIIPLPDCLEERLRHGELMAPTLREERRADGERFAVLDFIVEVEKAEMPEWRSVERVLGADWGVHTLLTATAVDEHNEQVGRPVFLNTGGFGGRQARTRRQIDELKKKVARFEQERNALALDHPKRAWYTQRLALYRREIERCWRKYEQRNRALAHLASNVLLLLCQVHGCSLLSMESLTTLKSTGRGRGVRGRWRNYCNNSTIRGEIWRLLRYKCHLVGLRFHTEYPRGTSHTCPHCGQPAKTYRSPSDRTEAVKWGRWIYCDACHYNGDRDYCASVNIARLGVAYLMQMKQSGKARSCSMTDPQVKPVSYTGAGAVLLLPPTGSHARPIRSGKICYYPGWLGSAFLQSSQPKAVFLRLCG

SEQ ID NO: 32991 - protein, 426 aa, Microcoleus sp.
MSSYTVRKLKIGNTEQMQTLSRAAGELYSRTVVNFWRTVRKQDKWLKPNSMMRWLPNDSENLLHAHSADAVVQSFYASLKSWRERRKSDPDAHPPRRRKWFFKVQWKSSAIKVKDGKLRLSNGQGNEPLLIDWEWDTPKLIEMGWDGKQYEIRACYATEEVPVKESGTVAGIDLGEIHLAVAHDGKETIILNGRLLRSKRRYQNKLKAKLSGLIDVKKRGSKRRKRLIRSKQRQLAKLNNQIKDIQHKQTTKLVSTLNNRGVQTVVIGDIRDIRKSVDYGKKANQKIHQMLHGQTRQMLTYKAERLGMKVECFDERYTSQTCPACGKRHKPKNRLYKCSCGFQFHRDAVGSINIRRKYLGCMDIPVVGVMASPVGVRFRPHLQCSPVPLLTSRTVKRIPCFSNGEKVNGEVLLVVQWHFLCGRVLI

SEQ ID NO: 32992 - protein, 663 aa, Mycobacterium sp.
LRRVGDPVVAAGPVGVRVRTRLHLTDSESAALAEIGGYLGSVYRRELAYRIALGRLDRQAHGVWRAQRKRAVTAVSSSRWAGAITRAVEDQYQLGMRALAAEVADLRAAVAVVESRCVLHPGEVAAPEPNVAGGPRQRSRRPVRGYANAGQRFAKTRRLAALRERLAAAETALAAGRPSVTVGGNRLWRTRHHLDAAAMTEPQWRQRWDAARMFVTADGESGKTGGNETIRVEENGRLRIKVPAALVDQLGTHLHIAAPVAFTHRGDEWAARVAGRRAVRYDISLDPQRGRWYLDASWTLTPPPVVDLEVLRAGRVLGVDLNADHLASCVLDSCGNPIGAPATIDVQTAGLRASRRDGHVRAAITTLLDLAESHQCTAVVVENLDFADARATGRETLGRGRRGKRMRRSVAGIPTRRFRDRLTGMAARRGISVIGVDPAYTSMWGRQHWRKPLQQQTSDPTAVTVHHGAAAAIGRRGLGMPIRRRPAGPRTQQRMRAGTPPARPDQPPGPTRRCDSPGSPTRPQRRRGVPVHQTNPHRQRPTPFGPHRTHSCSLLRNGNRKLSARARMRRHALTTTGEIVDCTTYSTYSTYCVNLTARFLDPEFREPRWIRRNYVFSRMPTTAAQFAATAHGNGTTVTVYRNRRGSWYGLDIADDHLTWLQWW

SEQ ID NO: 32993 - protein, 412 aa, unknown
  TnpB Polypeptide
VNFTRAYKTEVDLNDKQATGCKRHAGAARFVYNWGLARKQAAYAATGKSPCAIDLHRELNALKQTELSWMYEVSKCAPQEALRNLDNAFAHFFRRCTLKRQGKFKGKLGYPQRKTKKQGLGSFRLTGAIVVFPAAIQLPRLGRLRLKERGYLPTTGVKLLSATVSEQAGHWYVSVQVEQEREAPTTTGPIVGVDLGVKTLATLSDGTVLPNPRHLKRRLKKIKRLHKAVTRKQHGSKNRKKAARTLAKQYRRVGNQRANTAHQVTTRLAKTKSVIVIEDLNVAGMLKNHHLAQAIADVGFAEFRRQLLYKASWYGSRVILASRWEPSSKTCSRCGWVDDDLTLGDRIFRCEHPGCGQVLDRDLNAAINLAKLAGSSSDSQNACGEGSAGASRWAGVKLPSVKQEPNTRCASA

SEQ ID NO: 32994 - protein, 432 aa, Calothrix sp.
LYGCQQNLINPNKGLKAVLEFICSESHKLTNCGIYYARQLYFKTKKLIGKFDLINEYKTNKHYQVLHSQAAQQVLMSVAESFKSFKELNKKYSKGELHFNPKLPKYRKGGGYALVTYPKQALKLVGDNIKIPLGNSVKRWFQLDSFTIPKPSNLRFEDIKELRILPRNQCFYAEFVYQKESATRYYVNPSNALAIDPGINNWLSCLSNVGTSFIVDGRKVKSLNQWYNKRVSALKEGKPQGYWDDQLAHITEKRNRQMRDAVNKAARLVVDHCIKYQIGTVVFGWNQGQRQEAKLGKTTQSFVQIPTAKLKQRVKQLCEEYRIKFVETEESYTSKASFLDGDFLPTYGEKPETWKPSGKRVKRGMYRTGRGKLINADLNGAANIFRKVETQLELNLVKVCRQVLTLATRYRIWETKTKKRRGTALASLIATV

SEQ ID NO: 32995 - protein, 404 aa, unknown
  TnpB Polypeptide
MNKIVKTRGIKFLSLDTKKIEEEINIITRVCNDFSKQIRKDMKSGHITKVTSFGFKDSDKNTITFKEYRDKHKHIFNSIGWTKPLNGYERDLVGYVGRRYKGFFKRNRTKKMPTIKFSQKGIHVKDRFVKVKDDHILFPCHNQEKGSQPELKVPFGKCTNFNSLNELDLKKGVGGNLSLEQKFFMCTTVNEVDPLYKFESTISFDINKDKDYWISFEDGEIVCMPDDVADELENLRLLNEILTNKKRHESLLKSSQRRHYRRRWRNKHKKVEKMIEPYVMKIVDKAIENKSLVCIDNVSTGHKNGSFGQDKIISILQKKCEDLNIPFYGVPTFFTSQMCNNCGHCDEGNRDGNDFECLSCAHTDVSHLNAAKNIRDRALLFYENKVPFSMYKDSEENVLKKYGS

SEQ ID NO: 32996 - protein, 402 aa, Streptomyces sp.
VQLPRVPRARPAPRAGQGVRVRPGGLQRRPAGPSGSPRGGPAVHQGHLPPEAGHHRRQAHRRTGVAGRGVLRRAGAVPEGPAHRLPELLLLRHRQAQRAEGRAAPVQVQAGQPAVHPPHRQRVQPARERPPVRGQGRRPAGALVAPASGRADLGHGHDGRGRYWASFVVDTDPQFLPETTTEAGIGLGLSAFAVLSDGTKITSPCFLRRAERRLKRLQKDLSRKAKGSRNRARARIKVARQHARVAGRRRDWHRKESTRIIRDNQAVYVEDLAVSGLARTRLAKSVHDAGWSAFLGMLEYKAAKHGRYFGRIGRFEPTSQVCSACGIKDGPKPLHVRAWTCKECGTVHDRDVNAARNILAAGRADRPNACGAPVRRASVPAQRREAGSPQTGRTAQAGIPVL

SEQ ID NO: 32997 - protein, 339 aa, Sedimentibacter sp.
MKTVQIKLKPTKTQDMELKRLSLEYIRQANALVKQAISEEKFPRVSSKHIESDIPSVLKNELIRYAKSKHKQFGKCIFKKPMLSYNNQNFSVDATAIRFPIMADGKAKKTAIKAVIPEEIFALLSESKLGTLRITKKGFHWMAQICVRAEDKEFVGDGILGVDLGILCPAVGVVAADGKTQFFGNGRQNKHLRRKYKELRRQLGKQKKVNAFRAINNKESRIMRDINHKLSRQIVTFAAENNCGTIHLENLSGIRRTSRLRGKNKASLHNWTFFELASFIEYKARELGIKVIYIKPEYTSQSCPSCGERNKVKDRNYQCGCGYHAHRDRVGALNIAKTI

SEQ ID NO: 32998 - protein, 365 aa, Blautia sp.
MQKGIKFRIYPNKEQKIFIQQTLGCCRLIYNRGLAMRKEGYEKGEKIGYSQTSAMLTELKKREEFAFLKEADSIALQQSLRDLDRGFVNFFQKRASYPTFKSKHNRFQSYRTVNQKDNIRIVGRYVKLPKLGYVKVRQSMEVGKINYATIEHTPSGKYFAVLNVDFEPEPRPNQGGTIGIDVGIKTFYSDSNGNAVSNPKYLERAMQKLVREQRRLSRREKGSHNRDKQRIRVARVHEKVTNQRNDFLQKQSTMLVRENQTICIEDLHVKGMIRNHKLAKSIASVSWAKFFEMLEYKAVWYGNELRRVPNMYPSSQTCSACGYQNPLVKNLRIRIWECPICHAVHNRDTNAGINILKKGLQMQSA

SEQ ID NO: 32999 - protein, 300 aa, unknown
  TnpB Polypeptide
MSLRDLDSAFTKFFKKQGGYPKFHSKKNTHQSFTAPQNIKIANNRVYLPKFTKDGIKTKLHRELPNNAILKQATISRQNNQYFISILIDDNIPIPKPIKAKTAVGLDMGITHQLITSDGVKYPNEKHYVRSQMKLLKLQRRLSKKQKGSNNRNKAKLRVQKLHTKVTNQRKDNLHKISNEITNQYDIICLETLNIKGMIKNKHLSKSIADVAWGEFIRQLEYKAIWRGKTVIKIDQWFPSSQICSHCGATTGKKPLDIRKFDCPECKKKDIDRDVNAAVNIRNYGLGQLDNRNTAGTVEI

SEQ ID NO: 33000 - protein, 397 aa, Lactobacillus sp.
MSVNEVGQKKDCLITVIRTQKVRLYPNQHMKVVLNQLCDYRRYCWNKALETWNDMYDLHTIDSSIPIPNVYSVRNELVFNKMDWQFNLSSRTLQLTIVDLGIAWKNYFDKSLPDWGKPKFKSKKMSRQGFKTDRAKIVDGKLRLDKPLGVKQWFDIHISKHVNLNGQLKTVSVYKENGKYWASFPLEVCIKHKLMTGKSTAVDVNVGHFNYTNGLINTLPKGLIKLYERIKIYQKCLARKRVINGGNATKSNNYIVMRDKLQRDYRKAANIQHDIIQKFTSNLVAQYDKIVIEDLNIKSMQMSHVASKGLQRALFGYFRKVLSYKCEWYGKEVILASQIYPSTQRCSKCGYVKRGNEKLGLQGNLKHHTNHSDYVCYSCGARIDRDKNAVANLLDLI

SEQ ID NO: 33001 - protein, 203 aa, Planktothrix sp.
MPSNLDYSKVKEFTILPKNGAFYLEMSYEAEKQHHELDINQALSIDLGTADNLAACVDTLGNSFLIDARDLKAKNQLWNKKVSTRKEGKSQGYWDNWLDRVTRKRNHQMRDGINKAAKLMINHCLKYGIGTLVMGWNEGFKINANLGNLNNQKFVQMPLGKLKSRVKQLCDLHGIKFVETEEAYTSKASFLDGDSLPKYGEKG

SEQ ID NO: 33002 - protein, 392 aa, unknown
  TnpB Polypeptide
MPSETIKLTAKFKLKTEPEGLEDLFSLYSDIVNLLLDYVFENNITSFYRLKKETYKSLREQYPELPSHYHYTATQMATMIYKSYRKRRKKGKANGKPVFKKEVIMLDDHLFKLDLEKRIVKLSTPKGRVRLEFYPAKYHGKFKDWKIGQAWLVRTQKGVFINVVFSREVEVREPKTFAGVDLNENNVTLSLPNGEFVQIITHEKEIRTGYFLKRRRIQKKLKTGKKRKELLEKYGERERNRLNDLYHKLANKIVELAERYGGIALEDLTEIRDSIRYSAQLNGRLHRWSFRKLQSIIEYKAKLKGVSVVFVDPAYSSSLCPICGGKLSPNGHRVLKCECGFEADRDVVGSWNIRLKALKMWGVSVPPESQPMKTGGWKPTRYEINALHALYW

SEQ ID NO: 33003 - protein, 444 aa, Methanoculleus sp.
  misc_feature (293)..(357): Xaa can be any naturally occurring amino acid
MPSIFRGAESPFVMFPEDYQKQYIPVRSTDTCMLQAYKYRMYPNCEQTAMLMKHIHACRFVYNHSLEQKIRAYEQEGKKLSCYDLNNRLPVLKEEHPWLKEVNSQSLQNANKNLDNAFTRFFREKKGFPRFKSKKNPVQSFQVPQHYTVDFGRRRIKLPKIGEIKTIFHRMFTGKMKYAIVSVTTTRKWFVSILVDDGQPAPDPSPFCLDTTLGIDVGLTDFATLSTGEKIKNPRYLKNSLQRLKVLQQRVSRKVKESKNQQKAIQRLARCHEMIANQRNDFLHNLSNRIVSXXXXXXXXXXXXXXXXXXXXXXXXXXXXXXXXXXXXXXXXXXXXXXXXXXXXXXXXXXXXXXXXXRVSGMHRGVRSSRCWNTSAENTGRPFSRSGGLIHPRRFAISVGISSGISHFQTGTGSVPTAALTTTVTSTRQSISRNLPCKSRTLSG

SEQ ID NO: 33004 - protein, 376 aa, Clostridium sp.
MLKNKKQGGETMQITVKFNIILTKEQVQLIESISKEYIHTVNSLVSSTLQSEERVKLSSKDVFANMPSAVKNQSIRDAKSICTKYKKAIKANSKLPTDKQKVINVATLKKPVCIWNNQNYSLKDGILSFPVIIDGKSQRIQTRTIMTDYQLKQLEGHLGALRITKKSNKYIAQISVEKVSHIVKGDVVMGVDLGLKVPAVAVTDSGKTFFFGNGRQNKYVKRKYKAKRKKLGKAKKLKVIKKLDDKEQRWMTDQDHKVSREIINFAVNNNVSDIRLEKLTNIRNTARTSRKNEKNLHTWSFYRLAQFIEYKALLKGIKVEYVDPKYTSQICPECKKLNKARDRKYKCSCGFKTHRDRVGAINIINAPVVDGKSLLA

SEQ ID NO: 33005 - protein, 523 aa, unknown
  TnpB Polypeptide
MFVSLQFKLELKKEDREKLTKLMRKQSSAIHVAYNMLRELEKEKTKNPHAQIYHRLKQLFPELPTKYIDSAIYKAKQYPTDKPVVFGGKRLFEKLCKNHLTGKLRERLKKQWREIRQGTLISTGSKSDKGNRLMRFEDLNGQLHLRITTGNREFIYAKVLREPSNSKDKWITFMAMLLESWQTQSYFPYTVELKLRDGEVYGSVSFEIPTPKVKYTKENGVIAIDTNASPIHLAIAEVSKVGELVSYQTISLHHLLGLSQNSKDHQEWILANKIVDIAVQKGKAIAVENLKKLKRGMRGDGKAELRKRLHQWNAKKLLQKIKRVAMLKGVEVIEVNPAYTSVIGMLKYAPQLSIDKDIAGAYVIGRRALGFKEDMPENYEKLLKDKAYLEFALKKYEEREKELTELLEKETNEYKRNALKSELRNVQNAKEILVNLIQSLQSEPSSCEGANGRNPEQGETEKVSQVAWVVLKVALLFPILGKVVPRDLSPLKPLLVEGAWDRVRRSNGLVPLEAGGTVPIRDS

SEQ ID NO: 33006 - protein, 440 aa, Moorea sp.
MYGCQQHRITTSPENRAVIEFICSEANKLTNCGIYYCRQILFKAGKYLKNAELDKILKTNIHFKAMRSACAQQTLHGVIESFKSYKALSKLYEKGQLPDKPRVPKYRKKVGMAVVSYPARWVKLVKGQLKFPLGKQVKAWFGIDHFLLPMPSNLDYKSIREFRFVPRNGCFYLEFVYKQPDIEPIASTNDVLGIDPGLNNWLTCVSTTGKSFIIDGRKVKSQNQWYNKQVGKIKKGKTQGYWDERLALLTEKRNRQMRDNINKVARFIVNWCIRHKVSTVVFGWNRRNKDSINIGNKTNQEFVQIPTAKLKNRIEQLCIKHGIKFVETEESYTSKASFLDDDFLPTFGEKPEGWKASGKRVRRGLYRSGNNELINADCNGACNILRKVATQLGFPLAEVGRAVLNLPQRYRLDSLSRSYREASRRGATHGEFNSPMESAP

SEQ ID NO: 33007 - protein, 504 aa, Bacillus sp.
MPKSKKDCFVLELKLMVDSWQKDILLKRFEIARKLYNKTLSYALKQYTLMKESKRYRKQLRLYQNTIKAIKANNQKELKQHTKELDGIRQSFGLSEYQLHTYIKKHQHNYKKHIDSHASQKIVSTVWKAVQEIVFKGNKAHFKRYGMLHSVEGKSNKAGIRFKENTVYWNGLALPVRIRKQDLFVEESLALHTVKYCRIVKKIIRGKHTFYVQLVMDGIPPAKRISSTGAFRHQYQKQKRIGIDIGPSIIAIVSEETVCLQQLAPNVPIFEKQKRRLLRKLDRSRRSTNPDNFRSDSTLKRGIQLHWTYSKNYQKKLYQLKELYRKKVSYIKEQHGSLANVILSLGDEVYIETMHFKGLAKRTKETKTNKQGKFLSKKRFGTSIGNHAPAMLVEIINKKLGYTKQTVHKVNTITFRASQYNHIENSYEKKKLHQRWSQIGNHLVQRDLYSAFLLMNSDVDLQQTNRELCNKTFATFLRLHNQHIEELRQIKKTIPLSMGIKQIM

SEQ ID NO: 33008 - protein, 459 aa, Micromonospora sp.
VRTIQAYRFALDLTSGQERNVLAHAGAARVAHNWALAKVKAVMDQRAAERSYGVQDDLLTPSLSWSLAGLRKAWNHAKGDVAPWWGEVSKEAFNTGLDALARGLKNWADSRNGKRAGKPVGFPRFKSRRRATPSVRFTTGAIRVEPDRKHVVLPRLGRLKLHESARKLARRLDNGTARIMSATVRRDGGRWHVSFTVEVERTERQPAHPSSVVGVDVGIKHLAVLSTGEMVDNPRHLLAAQQRMRVLGRALSRKTGPDRRTGRRASKRWEQAATRLGRAHARVANLRRDGLHKLTTRLAREHGTVVVEDLNVTGMLANRRLARHIADAGFAEIRRQLTYKTEWNGGRLLLADRWYPSSKTCSGCGAVKTKLALHEREYECEACGLVIDRDRNAARNLAALAAEFDTAGSGPVAGRGDDRKTRIRGQVSVKRQPGTASAGQTGTVLPQGRTTIRAFARAH

SEQ ID NO: 33009 - protein, 250 aa, unknown
  TnpB Polypeptide
LSESPAQTLQQTLKDLDRGLMRFKQRKGGMVRYKARGDGDSFRLPQLLDGDFDEANARIRIPKIGFVRYRKSRDIQGKVKNLTISIEAGRWYVSVCTEIENFQPQATRDGEVGIDLGIVRTVQLSDGTVYQLDVNEIKKLEDRIAVYQKQLESNKTSRQKLAKLGKVADFDKKVPSRKRRRLKEKIANLHRRIRNIRKDFMFKTARAIAQKYGWVAIEDLQVRNMTKSARGTIEEPGTNVKAKSGLNRSL

SEQ ID NO: 33010 - protein, 406 aa, unknown
  TnpB Polypeptide
MSVVAVSVAGVKLVVKVRVLPTADEAAALGATLRTCNESASWLSGRMHELRVRGKYEAQKRFYTDIKARFGLSAQPTIRVIGKVADAYTALKANIDAGNYGPPGSAKRTTVAATPIEFRADAAQPFDARCLSWQIPEVVVGREATVSISTTSGRLKGVRVLAAAHDLALLRTRPVGETDLHCRDGKWFLYATVEVPEAPLEQPVNGFLGVDFGIVNIAASSDGQRLAGARLNRYRKRQQRMRARLQAKKTSSARRLLKKRRRKEARFAADVNHQISKRIVVEAQRTRRGIAVEQLTGIRSRVRLRKPQRAAVHSWAFAQLGGFLAYKAKAAGVAFVEVDPAYTSQTCSACGWVDKRNRRSQSEFECGRCGFVGHADHNAATNIATRGVERWGEVMRPHAAPTLTAS

SEQ ID NO: 33011 - protein, 406 aa, unknown; identical to SEQ ID NO: 33010
  TnpB Polypeptide

SEQ ID NO: 33012 - protein, 317 aa, unknown
  TnpB Polypeptide
VAEDRKGLPCGTTSRYTVFKFRLYPTPEQAELMDKTFHCCRYLWNRMLTDAREFYAATDLQYIPTPAHYKKEAPFLKEVDSQALCTVHQNLRQAYLNFFRNPAAFQYPRFKAKKDRVNSFTVYCRPYRTGPSIYLTGTGIQMPKLGHIRANLHRKPLRWWTLVSAAVSKSRSGKYFCSISFKCTAKEAEPVPPVRVLELNYSSARLYVDSEGSSPNPPDQTKSREKLARMQRKLSRMERGSNNYNQQLQKIRLLHEHIANQRKDFLHKESRRIANDWDAVRVKQEALRGENAGFGMFLEFLQYKLERQGKQYIVAPS

SEQ ID NO: 33013 - protein, 438 aa, Thermofilum sp.
MERGAPCGSGEGEVQSVRVWRRDTVRLLPTPEQEELLQRVGDAAAKLINMENFRRRRLFFEKGKVDYSWKSAWERRETAYSEIYKLLGSANFHETCRFISEQWKSFLELLKAKKEGKLEPWRELNPPGYRKREKLQLPIILIRFDNYEVDLERKVLRLGYWNAEIPFAGKPKWLAKGERLGRLAVVYDGVKKRWYAKIAVKVTLQIERNPRSSLKAGIDLGREILAAVAVEDGTALLYRGSVLKSDRHYFEKRIAAIDRMLSGSKTEGVDGSALREERRRLHGKRKRKRSQVLANMAAHVAQELATRGVSVAFVGYPKDTARDRAGKGDANVRDCWKLMLRLAATLENYGIAAFEVPEEGTSKLCARHGCRVERMPRGLVKCPRGHVMHSDVNAAMNILLRGARLLGCRVELPERVKVLSFTPTPSGIVEKEKRAATG

SEQ ID NO: 33014 - protein, 377 aa, Borrelia sp.
MSANKAYKCRIYPNTNQKKYFSKVFGCVRFLYNKMLSDKKDYYKNNRQNLITYPSKYKEEFPFLKEVDSLALCSAWIDLNFAYSNFFREIKKGNRVQGFPKYKSKKNRQTYRTNNQKNSIRIENGYIKLPKIGFVKLCLHRCIKDNALIKNVVVEKDTDDKYYISITVECLDTKNNNETKGDKKEIVGIDMSMKHFLVSSGGEKINHPKYLLKNENKLKKYQRKLSKKQKGSVNRAKSRLRVAKLHKKILNQRKDFLHKLSYYFVSNYKNIVIENLSIKGMQKGMFGKSINDLGWYEFVRQLSYKSEWYGSDLYKVDRYFPSSKLCSSCHIKNTALRLSDTRWTCSSCNTLHDRDINAALNLKAYYYKEIKTKAGTA

SEQ ID NO: 33015 - protein, 406 aa, Komagataeibacter sp.
MIQRKANRYRLYPDAGQRETLARIAGACRMVYNLALEQRRDWWQRYRDRTGQAISFAGQCRELTALRQEVDWLREAPIHPLQQALRDLNRAYQNFFSGRTGYPTPRRKGLHDSFRFPDPTSLRVERTGKRTGRIKLPKLGWVAFRGWYDLPGAIRNITLSRRAGQWFASVQWERDCAEPASSVQPAVGLDMGVSVFAATSTGELIAPGDFGKNALRALQKAQRAVSRKKKGSANRRKAIWRVQKLHARVANARKDFLHKLSTTITKNHGRVVVEALQVRNMSASAKGTAEEPGRNVRQKSGLNRSILDQGWRMFRTFLGYKLAERGGRLVEVPAAYTSQTCSVCGVTDPASRVSQARFVCTACGHIENADINAAKNILRRADSPLKPVEGHRIKRPVEAGSLGWAA

SEQ ID NO: 33016 - protein, 406 aa, Leptospirillum sp.
MKQKVTQEKPNPGTNKVTKTLKLPLLSLNSVKAKEFSRFEALNTRLANRILALSDEQKRSLSSKDFSDLELGSSWVNQTIRNVQSSKKTKSFKSLPLETNNQNWSLHKVGETWSVSFNLIRGTRNRVPVNVHASSHVQTLEKILNGEAKAGSLKLWRSRKGTWHVCISVTWDVPVTDNANNRWVGCDRGQNIPLVAATPDGPIIFYQARKIRHIRRVYAARRAMLQKLGKTRAVKKLENKEARIVKHINHCLSKDLVALAVRCNAGIRLEDLTGIRNAPQRRSAKSDAGLNRDTWPFYQLESFIKYKAAISGVLIQKVPAAYTTQACNHCGALNKRKKHLYVCTRCGHKAHADGNASQNVRDAETGRFCLLVLEASEGGCYDGALNEVRHEVKDGLMPRTRTAKSA

SEQ ID NO: 33017 - protein, 250 aa, unknown
  TnpB Polypeptide
MEAPKKNAVQIGTQKYRYFKSRAIEGTVKTVTIKRDALGDIYLYFVCETTENAVLARTGKSVGYDFGLKRFLTASDGNDREAPLFFKQNAHAIRKTGKELSRKQKGSNHRKRVRLALTRLHKKTANQRKDFHFKLAHAICEEYALVCIEDLNLRGMQKRWGRKISDYGFAEFVKVLEHQAGKMGTTIQTIDRYYASSQTCHICGVQNPETKDLRVREWICPHCGAIHDRDRNAAKNILKVGASTFFGEAS

SEQ ID NO: 33018 - protein, 208 aa, Cyanobacteria sp.
IGLSSFYTDSEGNKVDNPRHLRKSEKALKRLQRRVSKKFRRGQPQSNNYKKAKERLGRKHLKVTRQRRDFAVKLARCVVMSSDIVAYEDWKVKNLVKNRALAKSISDAAWSQFTEYLQGGVFGRIVVAVPPEYTSQHCSGCGTRVRKSLSTRTHECPKCKTALDRDQNAAINILIKALREIADTVGQTEFQAWGERTSFDDGQLTVPK

SEQ ID NO: 33019 - protein, 523 aa, Moorea sp.
MPKKVGTTKKISTQTVPVIGMTEMVKTELLATMKKLGIVRSESYNKLGSINHWGLDWKKAIPEVKSFRTPDTLGLPPKLMDWTVNDVGKAITAQQAACKNAVINKLYKRFPGKENQNKRKELCKQLKTSAFLNNSLLHRLVRREFQRGHSWVNNQIVYQQVGYKCKRLSRNTYQLELAGLTRGKRNKIVVRSNRKIKGQIRLIYDQILPRFEIHFLVDYGTVEIPPLRQNIGVDKGYTEAFYDSRGQAHGKGLGKVITKKSDRICAKNRNRGKLWALHRKLEKLDPAKSARILKNNLSRKTENRRYRQNQSEITAIIGAASKSLFNGESLKVFAEDLTQPIRNKRQSSAVSRQLNSWMKGVMRDSLQKWANWTGSVVTEVQPSYTSQIDSRTGTLLGKRTGDNFTGFDGVVLQADYNAAKNILARGTDHEITRYMNKTEVQAVLLRRTARYLRGMELSLVDGVDLGWIDPKHTKTKAFKQLLVEMPGSPKQTGGRFNSNYRLTTSHLGNNKLHLDRIVRVDPD

SEQ ID NO: 33020 - protein, 179 aa, unknown
  TnpB Polypeptide
LSTHRLENNFAVLNVDFEPEPRSNAGGTIGIDVGIKAFYSDSNGNTVSNPRYLERSMRKLIREQRRLSRKQKDSHNREKQRIRVARVYEKVTNQRNDFLQKQSTMLVRENQTICIEDLNVKGMIRNHKLSKSIASVSWAKFFLKCWNIKLAGMEMKFTEYQRCIRAVRPAAVVATEIHG

SEQ ID NO: 33021 - protein, 403 aa, unknown
  TnpB Polypeptide
VKHLYSYKFRLKPTSTQEVLLNKHFGCVRWIYNHFLNERIEEYKVNKRSLKRSDNEKQLPTIKQEYTWLKEVGSQSLQYSVECLQNAYNNFFRKCKQKVKGKKGFPRFKKRHGKQSFKIKQNIHLVEGKLVFPKFLDGIDVIQHRELEGEIQFATISKNKAGQYNVSITVFREMPELRPNDKSIGIDLNVMANVDSDGNAELNPRPAKEYQARLKLLHQRVSRKAKDGKNRSRAKKQLAKLYLKVTNKREDHLHKLSKRMIDENQVIVCEDLSVESMLAKVSPDERDEARWKECNRHRDIQDCGWSSFVNKLKYKALWYGREFIQVSRWFPSSQLCNHCHHQNKELKPTDREWFCFNCWENNDRDFNSAKNILAEGLRIRTSGTEGLAYCPDVRPAMSGLLVG

SEQ ID NO: 33022 - protein, 394 aa, unknown
  TnpB Polypeptide
MKINKTFKFRIYPDNTQKQHFAQSFGCARFVYNRFLRQRIDYYAENSKRLTYHNNALALTQLKKLPEFEWLKDVNSQSIQQTLRNLDIAYHNFFNKRTEFPKFKKKSNKQSFSVPQHFSIHDNLLDIPKCKGIKIKLHRDIEGTMKSITISKTPSGKYFASVLCELEIPEPVYSGGEIGIDYGIKAFITTSEGEIIESPKFLRKSEKRLNQLSRSFSRKQPSAKNRYKAQKQLARQHEKVSNQRQDFLHKTSKQLVSDNQAIYIESLAIRIESLAIRNMIKLHTLAKSISNSGWNAFVNMLKYKGSWYGCRIIEIDRWFPSSKRCHVCGYINDNLTLSDRSWLCPECNINHDRDVNAAINILTFGRAGIARIDACGEGSSSVFDQFQTEFDQYR

SEQ ID NO: 33023 - protein, 385 aa, unknown
  TnpB Polypeptide
MKTYKFRIYPSKKQEMQMKEHLQIAKNIWNELLAYSKDYYQKTGKFPSKSELQMLSKGKGLFSQTQQNVAHKVSNSIFRFFKLKKKGVKCGFPRFKSIDGMKSLLYPQSGFKLDKKLKVTPFGEISIKKHRKIEGNIKTLTLKREPSGKWFAAFCTEEKIQISKQNKGKSVGIDLGLKTFATLSNGELIKNPRHLKQHEEQLAKLQKELSKKKKGSENRQKARLKVAKIYEKVSNTRADFLHKITTKLVNDYSLIALEKLAPKEMSEQNFGKSINDAGWNMFANMISYKAESAGCQVVFVDPKNTTQECSACHQIVKKELSDRIHNCPNCGLVLNRDLNAARNILIKATEGHSESKLLENGAIVPSMKEEAHILKGGGMSHHTSA

SEQ ID NO: 33024 - protein, 258 aa, unknown
  TnpB Polypeptide
MVKREGEWYAHFTVKKAILFKEPETVIGIDIGENNLAVAVALKDKPREARFWRGSKLKQLRWRNSKVRANLQQKHRLDIVKRLRGREHRQVKQELHKLANEVVEYAKGFESPIIAMENLKGIRSNIRYGRRMNRRLHTLPFRQLQQLIEYKALWQGIPVAYVKAKDTSKTCHRCEGVKRIEGEVYRCSVCGMVYSRDLNASINIAKRLLGQEAKPKPKSEEFGGDIKVNPPNQQMQIAAKSLIQCWKPPFEKGGSSHQ

SEQ ID NO: 33025 - protein, 391 aa, Thermoprotei sp.
MAKVSRTVIVPSIVLTKKKYEVLRELEEMYKQMVMELVEYGFRHNIKSFTGLKKRMYRMLSDRYPQLPSHYVHTACQDVATRIKSFMELKKRGRAFTEKPAVRKVSIWLDDHLWKPLGYTAIKVATHRGWVVIELQPHKLYWRYVNSDWRLRAQPKLKLDHRERRVYVYFVFEKDVEEYNPKGWIAVDVNENNVTVLVDGKAYKLVTMLRRTIERYYEHKRRLQEKLTIQLNGKKYPLFTLWRKKMSRLRECVRKTDWRRKIAVAIVKTAKRLGYGIIVEKLPKRVAEKMINNVRNSELRHRIYQAAFRGMVKTIKETAEKHGVPIVEVNPKYTSQTCPVCGYRPMTRHAGRILSCLRCGFVHDRDVVACMNLLKRLVDDRPVPLEVLRYG

SEQ ID NO: 33026 - protein, 421 aa, Mycobacterium sp.
MKQVVQVRLEADAGQLDVLIRTLNVCNQTANLVSSIAHRERVFRGRDLRAITYAQAREHAGLGAQVAQSCIRKVADSYTALRTNLRAGRYGPPGSARRKKVQTTAIRFRALAAQPFDDRCLSWNHDADTDTGGTVSIWTVDGRLKNLRFVGEPAQIALLRAHRSGETDLVIRRRRRRRRGSGPLVGYLIATVDLPELPVRDGEHLNAAVGWIGVDLGIENIAVTSDRPLAQELMKTYRAQASDGAAGRGSVKDRRTRNRELRHKLQKKNTKSAKRLLRQRARKEARFAADVNHQISKRIVAEAERTGRGIAVEELTGIRERVRLRKPQRATHSSWAFAQLGAFLTYKAARAGVPIIQVDPAYTSQRCTACGHTDRRNRTSQARFVCRDCGYIAEHADILGADNIAHRAPTTWAQSTAPSAA

SEQ ID NO: 33027 - protein, 402 aa, Mycobacterium sp.
MQMRCRYRIEPTPAQQALLARVFGCTRVVFNDALRIRDEAYRSGIKLSDTEIQRRVITMAKTTAERAWLCEVPSVALVQSVNDSRRAWRNFFDSASGKRKGRRVGRPRFKSRKDHRQSFRLTRNGFSLKGNGRLFVAKVGEVAVRWSRELPSTPSSVTVIREPDGHFYASFVVEVAVSPLPPVAREAGVDVGVARLAIIAATDGARSDIANPKYLSRKLAKLARLEREKSRRQKGSNNRAKTRRKVAIAHSEVARARRDYHHKAALALVRENQVIHVEDLNIAGMVRNRRLARAISDAGWAQFVKIIGEKADHYGRTVHRVSRWLASSKTCSACGHRLDELPLQIRTWVCPSCLSVHDRDHNAAKVILAAGRAERLNACGARVRPQPVAAVGVEAGSNPTAE

SEQ ID NO: 33028 - protein, 413 aa, Campylobacter sp.
MQITKGFKYRIYPNKEQQKIINHQCFIYNQAYNICLNLQQEQWNKNKDLDKKDRIYLKASEIDTKVKLALKQRELSYKSVVTQQARINANRALEQALKDKNKGFPKFKNSKIAKQSFNWNNQGYQIKEHSNPKFKIFRLMNTPLKMCYHRELPKEYKLNQITITKNHNKFYIALSITYHSNTRELNAKEIQSCIGIDMNINDIALSNGTLIDTNSKLFSVEKYDKAFKRLQRKQSRRILKSKTQKIKLSNNFKKTQQKLNTIYERSSNVKKDSYHKITSRLIQEFDLIAVEDLQTKNMTKRAKLKNVKAKSGLNKSILNTSFYQFSQYLEYKAKHNGKFFVKINPQNTSKTCSICGHIKENLTLKDRTYFCENCGNTLHRDINAANNILKRGLESFGLGISLEDYKLKAFQIS

SEQ ID NO: 33029 - protein, 565 aa, unknown
  TnpB Polypeptide
LWLRGYFVSTVGHISETTVIKYIEEQKKMTIDEEFDKLLKQFHKLSDRHILVAETDMSCSDIQKVVELSDRIRKAGNELVGLMKKNYDQLMRTKRYRGLLKLYGSTKDKQKRKMFADQLNEIQKQYNVTGDYCRKSMIPIGKKYGINAVFALTKAEDVWHGIEKCLYGNGKTLHFSKHGDLPCIRAKQTKCGIILKVKDNQLQFKLGKSVFGIQVKDRFQTDEVNAVLDYLAAPEIADRKAVQTLLEDACCISTYRPCYATLVLKLIRGKYRVYLHLTIEGRAKPKYDRFGNPRHKYGKGIIGADIGTQTVAYTSDTETGLKNLSERGNSIQTSERLERLYYRAMDRSRRATNPQNYNDDGTVKKGAKTWNYSNHYKKLKARHAELCRINVTNRHLAINEDANHLRSIGDVFITESKNAAKLMKCASKTTVNDKGKINKKKRFGKSIKNRCPGGFQAAVENKFKTSGGTYIEVPNNYRASQYDHTADDYIKKKLSDRMYKLTDGTLVQRDWYSSFLLYCYDFKTNDIDKDKCAVKFNRCYSMEKDLIEWIKINKIKVLNSGIKIA

SEQ ID NO: 33030 - protein, 418 aa, unknown
  TnpB Polypeptide
MRVRAYRFRAYSSKTTARVLKTQLEAACRLYNTLLHAEQEEYERNKRTMSMNELRQLALDLRKQNPEFQVLHSQVAQQVADRFYQARQRFFDGLANKPKKKKPLKYLSLAYPQSGWKLSNWREVGQGKNKKRKAKLYLSKIGFFNLIIHRVFPESQVSQVCVKLHPSGRIHVIFLVEEPESQEHSSEEGEPVKAVGVDLGIARLATLSDGRILENPRPLERSLERIRTIQRTLSRKRFLSKNWFKAKTRLAKQHEHVRDFRRDLFFKLGALLAQEYDLLVLEDLDTEGLIQKGVTRTRRMRLYDSSFSELRRCLEWVFLKRGKTVLAVSAYNTSRECFLCGRINQSLTLEDRIFHCPHCGFTLDRDLNASLVLLKRAGWEPPVVPEKLRPIPLLPSLGLVRQGGAMKQEAPPGGVAHT

SEQ ID NO: 33031 - protein, 383 aa, unknown
  TnpB Polypeptide
MTMNMKKTLKYRIYPTKKQRRLLQEQLNECRWLYNHLLEQRRNAWEQDKKSVGYFAQCKSLVVLKKERPSLKNVYSQVLQNVADRVDKAFRNFFRRVKAGEKKVGYPRFKGFDRYDSLTYKQAGFGWKVKDNYLNLSKIGSIKIKIHRSIIGTLKTCTIRRQSAKWYACFSVEYQNNPLPESDEAVGIDVGLESFATLSTGEKVDNPRFFKTDQKVLAKAQRKLSKQEKGSFERKKAKKVVAHIYERIFNRRHNFIHQEARKIVNRFGIICIEKLNIKGMVENHTKIFGNKLNKGIVDVAWGQFANALSQKAEEAARQFIAIDPKGTSQICSQCSAIIKKELSDRWHDCPICGCHLHRDYNASLNILRLGLQSLGFTPRSLRL

SEQ ID NO: 33032 - protein, 276 aa, unknown
  TnpB Polypeptide
MWIFMKYRNFSYRFCQRKQKYWISNGNIAVDFETGKIKLPKLKAVKARLHREYSGQIKSATVSQVSSGKYYVSILVETEHKELAHTNHNIGIDLGIKDLCITSDGKVYENLKIIKKYEKQLVKLQRQLSHKGKRSKNYYKTKKKIALCHEKIRNIRKDYLHKVSHEIISENQVIVSENLQIKNMVKNHHLAKAISDVSWYELTRQLEYKAKWNGRKYIKIDTFYASSQLCSVCGYQNPDTKDLSVRTWVCSKCGAEHDMDINAAKNILTEGLRQIA

SEQ ID NO: 33033 - protein, 551 aa, unknown
  TnpB Polypeptide
MKEGKMDQIMPKGKPPKVFQGVHARLVFLKKEEEQAVLGLMRRFSSATRYAYQRLLEGKNREELKRENGPLCQLFGLNTRYADGAIEKAQAILDSAKELGQDPRKVVFGGRKTFEQLKRKHLSGRALLALKREWKEKRQGLLYSRGDSTKKGNANLRLESQKGALWLRVNLGSGRYAQALVQASHPQRGALIERVYASLPYNVALQLKEGKVYAHFSWSEELPPPVHTRANGVLGVDANGDPYHLALAVVSPDGNLVRYFTLSLEEVDQAPNKGARELALWKIAHQVVALAEKHGVAIATEKLKYLRKSRRGDGSGRAFRHKQHRFAYRALLEKTHSLAQKQGVEVLEVSPQDTSTIGMLKYAPQLHLSKDVAAALVIGRRALGYEEKLPKGYEALLSDRSFLAHAEGFYGSRLQELQKLREAEKNPYLRRRLFREMGKARRALSLLLSFPGPQRGRKASPQGSPGSLRKSTDGRNLPGINPWRVLKVSLCKIGPTGLALPLLGLETPRDLSLLRPILHFTSLSKGSWEEWKVGLGPSPSGGPGCTNVHFC

SEQ ID NO: 33034 - protein, 439 aa, Planktothrix sp.
MVMWIFNTFNSYNVDYFTANNKKMYGCQQILIHATPDIEAIIKYLCLESNKVYNCALYYARQMFFKKQVFVNRGAVCSEMSKSANRHFKAMYVSSAQQTCNSVVEAMSSYKELVKLWKTGKLEEKPRPPQYRKQGLFTVSYPIRWLKLTPQGIRIPLGNQVKVWFGIDSFLLPMPSNLNWDSIKEVRILPRNKCFYAEFVYQVQTENIELDQNKVLGIDHGIDNWLTCISNIGTSFIIDGKHLKSLNQWYNKQVANHKHDKPQGFWSNSLSALTEKRNRQVRDAINKAARLVINHCIENSIGRIVFGWNQGQKDGATLGNKGNQNFIQIPTARLKSRIQELCSRYGIEFVETEESYTSKASFVDQDFLPKFGEKPDNWESSGKRVKRGLYRTAFNQYINADCNAAANIIRKVSATLGLNLNGVSSGALTTPLRVRLWTT

SEQ ID NO: 33035 - protein, 406 aa, Streptomyces sp.
LNHKQGLRFELAPTEDQAVLMGRHCGLSRVVENFCSETVRKKKAQRDAEKTYGIPEAELTRVPWSAPALEKEWRAAHPERYPWFAENRLSSRVPKEACRARAAGIRNYFESKNGKRKGARLGWPKWRKRKHGSRFRYDADRAKPLDSRTVKLPAVGEVTTREDMTWLVDRMATGNARILGATVREQAGRWWVSFQIEVDRDDINKRRRVDADAPACGIDLGLKTFAVIKNGDGTKEEIHAPKPLKAAQRALKRANRELARSGENSRNRAKVRRRVGRLHLRVADRRRDLLHKTTTRLTRTKSAIAVETLHVKGMVKNRGRARAISDVGFAEFARQLDYKADWYGSRVWKADRWFPSSKTCGACKRVNRSLALADRVWVCAGCGTVHDRDENAADNLLTAMLAGQTV

SEQ ID NO: 33036 - protein, 402 aa, Escherichia sp.
VKRLQAFKFQLRPGGQQECEMRRFAGACRFVFNRALARQNENHEAGNKYIPYGKMASWLVEWKNATETQWLKDSPSQPLQQSLKDLERAYKNFFQNRAAFPRFKKRGQNDVFRYPQGVKLDQENSRIFLPKLGWMRYRNSRQVTGVVKNVTVSQSCGKWYISIQTESEVSTPVHPSASMVGLDAGVAKLATLSDGTVFEPVNSFQKNQKKLARLQRQLSRKVKFSNNWQKQKRKIQRLHSCIANIRRDYLHKVTTTVSKNHAMIVIEDLKVSNMSKSAAGTVSQPGRNVRAKSGLNRSILDQGWYEMRRQLEYKQLWRGGQVLAVPPAYTSQRCAYCGHTAKENRLSQSKFRCQVCGYTANADVNGARNILAAGHAVLACGEMVQSGRSLKQEPTEMIQATA

SEQ ID NO: 33037 - protein, 447 aa, Sutterellaceae sp.
  misc_feature (441)..(441): Xaa can be any naturally occurring amino acid
MKSRTPSFVIELGLKIGEDQESALETYFSDARQLFNAVLGTAKKRVRAMKSTEAWKLTAAMPKGKDRNKRFKEIQKSARLSEYALHDVVKEYRAKGGFTKRIGINEAQKIATRVWQGIERWLLHQGGQPRFKSAKRGLHSVEGKSNKTGLRWKAKTWTLEVLDLVIKAEAPDAWQKEALLSATDPSGFKRVKYCRLVRRMIRGRMRYFVQLIVEGVPPVKHVYAPKDLKVAVDPGPRTMTFYSPEWQQKILVSAGTVSQEKEIARLLRAMDRSRRDTNRECYNADGTVKAAGKKIVWKESKTYKATKAKLADLYRRQAQTRRCLHGEVINQVFGRAGTVIVEKNSYKAFQRAGYGKSLGKSGIAGLITRMTSKAESAGCCVVKVSPRKLRPSQHDPETGTYRKKALWERSHQLGDTGWYMDRDVAAAMNLYFADPATDSYXQETFAS

SEQ ID NO: 33038 - protein, 382 aa, Escherichia sp.
MRRFAGACRFVFNRALALQNENHEAGNKYIPYGKMASWLVEWKNATETQWLKDSPSQPLQQSLKGLERAYKNFFQKRAAFPRFKKRGQNDAFRYPQGVKLDQENSRIFLPKLGWMRYRNSRQVTGVVKNVTVSQSCGKWYISIQTESEVSTPVHPSASMVGLDAGVAKLATLSDGTVFEPVNSFQKNQKTPARLQRQLSRKVKFSNNWQKQKRKIQRLHSCIANIRRDYLHKVTTTVSKNHAMIVIEDLKVSNMSKSAAGTVSQPGRNVRAKSGLNRSILDQGWYEMRRQLEYKQLWRGGQVLAVPPAYTSQRCAYCGHTAKENRLSQSKFRCQVCGYTANADVNGARNILAAGHAVLACGEMVQSGRPLKQEPTEMIQATA

SEQ ID NO: 33039 - protein, 526 aa, unknown
  TnpB Polypeptide
MSTKTPSFVCEIELNTTQQIESVLNVRFNAARQIYNACLGESLRRLKQMRKSDLWQIALKLPKTKDNQPNPERKSAFTAARAEFEFREYDLHRYAVQFSHSYLGDHVDSNTVQKIASRAFAAVMRYCLGKGGKPRFKGKNRLDSVEGKSNTTGIRFKPSELVNEKIVGGSIVWSGLKMSMIVKPNDPVHLHGLNSRIKYVRIVRREIRGSLRWFVQLICEGLPFRKPKNVVSPGIVGLDIGPSTVAIVSEDYADLQKFCDSIGDKAQKIAKYQRKIERQRRANNPGNYNPDKWVKNANGTARLSSPKSWRRKKGTLKQGRHAWNRSKRMDANQTKLRGLHGKLSAHRKSLHGELVNNVLAQGSTIKLEKLSYKAFQRMFGKSIGQRAPGMFVSHLRRKAESAGGMMDEFSTRTTRLSQTCHGCGTIEKKSLRQRWHDCSCGIVQQRDLYSAFLATCVEDDRLVASVTPGALGARYAEIDYTLRAAASRTKSVIGQAMPANFVLVQSQNGSPADFQNGLAQITKTKQ

SEQ ID NO: 33040 - protein, 494 aa, Thermoanaerobacter sp.
MKNKQKENRIIGTYIYPSFANKNKIYKIKAVLLEYRKTAAAIAKLQWKNFYTKGQFDKNMNIKSLQSRLTERYKQTCQWQVVSILEGFISNIQQEFAKIVFSSNLPEKTKRILLFLNSRKEWLIKKNKKAVWYENNEKTEYEITQEERLLSKKIFKHILSKWNKPRFRNISMMLDSKVAIAEENRKSKTFDKWIKISTLERNKPVFIPLKNNTYAEAVDGEFLNFYQIEVKENKLTVRLIKELKKKEYEPMIPEIAIDLGLDPLFATDKGDLIGKQFLTFLTKMDEKITRRMAYLQKNGIKPSQDTMYNKMVKNLREFLKNEINRFLNHIVELYRPARIVVEKLDFRSPELSKRLNRLIQQFGKRYITEKLKRLNELYGIEIVEVNPAYTSQQCSKCGYVDKDNRKSTHEFECKACRYKINAQINGARNILNRRSIEDIKIHTPKKQVLKILIEQYLERHKGCNSAPLEVLSSNPYFSEFLDTLPIPLECDKCL

SEQ ID NO: 33041 - protein, 151 aa, Microcystis sp.
SRTQKGSKNREKARIKVAKIQARITDSRKDHLHKLTTQLVRENQTIVVENLAIKNMVKHPKLSQAISDVSWGEITRQLAYKCCWYGRNYIEIDRWFPSSKRCSNCGYIAEKMPLNVREWDCPDCGTHHDRDINASKNILAAGLAVSVCRAT

SEQ ID NO: 33042 - protein, 309 aa, unknown
  TnpB Polypeptide
MVKAIKVMLIPNNVQKTKMFQYAGASRFAYNWALAREKESYEKGGKFISDSELRKEFTKLRHSDEYAWLLNISNNVTKQAIKDACTAYKNFFKGLQKFPRFKSRKRSMPKFYQDNVKIQFSNTHVKLEGFSSSRKANKQKKNWVRLAEHGRIPTDVKYMNPRISFDGLNWWISVCVEFPDCKETLNDDGVGIDLGIKDLAVCSDAVKYKNINKSQKVKKLEKQKRRLQRSISRSYEKNKKGESYCKTNNVIKKEKLLLKRNHRLTNIRKNYLNQTISEIVNRKPRFICIEDLNVSGMMKNRHLLLQQRM

SEQ ID NO: 33043 - protein, 292 aa, unknown
  TnpB Polypeptide
MKLNKINQLISNGFKINLTFGTKHLLKTNKNKFLAKRDNQIVYIGSKCETCGNQQFQIYFNSKYNRFDYKLRVDNRWISKSDKYIFGSFALKNKEAKANILQTLSKKGSNPLTYRILKRNGTLYLQIMYRREVLNITQNTNGVLGVDFNKGFISVSEINQNGKLQSLTRYNYLHKGKATKTKTSMLELVSKLVAQAIDVGKDIVIEDLVSLDSSKKQDKTTSKGYNRMLNSLKFGLFKRCLLSKATKEGVSIHIVNPYNTSKIAKESYTNRMKLNVHDAASYVIARRFYQYD

SEQ ID NO: 33044 - protein, 379 aa, unknown
  TnpB Polypeptide
MKKRVTLKLKIPNNNLLVESMKTYSEAISFITEQGYQNNISNRYQLHNLTYYQAKEKFNLPSQYIINAIRISSQTLKSIKSNKGSKPKYKEYMPLDFDKRTFTFSYSKVRLTTINGRIDIPIEIPEYYNKYLDWNYQTARLIYDKRKDQTYLHITFSRDFNKVENNGEIIGIDLGINNIAVTSNKQFYNSNKIKQIKSKFRYLRSRLQSKGTKSSKRLLKKISGREKRFMRQCNHEISKEIISPLNPGDTVILEKLKGIRKIKGNKKQRYWLNSWSYYQLQKFIQYKAELKGIKVNYVNPRNTSKICSKCLSLNTKRNKSCFECLNCNYKLNADLNASYNLKLSGKNLLEKDLPKVLITKAAVNQPCIPSVDCKAILWN

SEQ ID NO: 33045 - protein, 480 aa, Actinobacteria sp.
MPRKRSAGSPRVVHRTARCGLRATPAQRERVFGLLRAGGDVWCAVLDLNRWRRQRGERPVAGYKELCAELTAAGPGTFGELDVSGARSVLRRYSDSWFSAAKRRAAGDAPARFPRRKRGLVPVRWYHGTFALEGRRLRIPAAKGRPPLEVQLDRDLPYPPGQVRSVTVGHEDGRLYADFTAEVPVAVYAEGEGPDPARAAGVDPGVIHPYAVAGPGGQGLLVSGRAIRAEHRQHLKDSQGRSRASARRAPAKGQRGSRRWGRHRKRQKKAQARSQRRVRQARHEAACEVVDWAVQQRIGTLVIGDPRGVLDRDSGRIHNKRTRDWAPGHLIGILADKAAAAGIRTEIVNERGTSSTCPAPDCGRRVPKPAGRNFKCPHCGLEGHRDLVGAANIAARGSGGGNPPPLPTERDTTHRRAGRHLPGVRPERRDPRRRPPSRPAPRRHLAGNGPPRTPPNGGTRGVARGNHARSTPGTCNPAGT

SEQ ID NO: 33046 - protein, 556 aa, unknown
  TnpB Polypeptide
MTARKKHIRTPYEDERKRHRAATSRHVLVLEAQIKEDDKRKLFHIANDLRVYGNHLTNIAQKRVSQLFRTKAYREALKQYHSAMFALSSLDEGTTKYNDIKKKANSAADVLEKLQAKYKLTMENLRHDMAKISKSSKINTVFLLSETENVWTAVQSVLYRDGKHLNYAKRGELPLIRAKQIERGITLSFVDGAPRCKMGGIDAFTLVVKKNDSFAKNELACIEAFVSDPETEKKAVAIFSKTGIPQNTYRPCFIALKCVTIRGRLRVYAHITVEGDPVPKYTKSGSLKHPCGKGLVGVDLGPQSVAAVSETSVILENLAERNGKSTKQHERKERLLLRALDRSRRANNKDRFNENGTVKKGIRKPWKKSKQYRIKEAYLKELRRKNALSRKYANNELANRIRAMGDDVTIEKSNVKALQKKAKPSIPEQGKKQKRRKRFGHSILHRCPGYLYAQLHSKFGDSHFHVVDNMYRASQYDHKSNTYNKKKLSQRWHSFDDGTKVQRDIYSAFLLLCHNDDFKTINQDICISKYETFKKAHDKCISDIKASGHKVCNSGI

SEQ ID NO: 33047 - protein, 383 aa, unknown
  TnpB Polypeptide
LYYARQVYFKTKRLVSYGELCAEMKRSKNKHFIAMYVSSAQQTCKSVAEALSGFKTKLKHFLREEMSSRPNLPRYRKKGMFSVAYPKKWLKFQEGRVRVPLGNQVKAWFGVDSFWIQFPTNLEWKDIKELRILPRHGVFYLEWVYTKPAQPQPLNPQRVLAIDHGVNNWLTCVSNLGHSFIIDGRKVKSFNQWYNKEVARLKTDKPQGFWSQKLERITEKRNRRMRDAIHKAARKVISFCLRHSIGKIIFGWHKEQKQECNLGRVNNQNFILIPTSRLKERIEELCRHYGIEFIEVEEAYSSQASFLDGDELPNYGEKPDGWRPSGKRVKRGLYQTAKGWLVNADTNAAANLLKKVSRTLGLCLGGLSRGALSTPLRVRLWTA

SEQ ID NO: 33048 - protein, 330 aa, unknown
  TnpB Polypeptide
MDRGVFLSGYNMDSYTSGSCKELGIHSQTVQRVSAEYATRRKQFNKSKLRWRKSFGSSRALGWIPINTGASKWKNGQVFHNGQHYSVWDSYGLSQYRFRSASFSEDARGRWYFNVAVDVEQRQSKGTSSVGIDLGCKTAATCSDGRQISGRWYREMEGKLSAAQRAGNKKRAKAIHAKVSNRRKDGLHKFSRTLVDENAAIFVGDVNVKGMAKTKMAKSSLDAGWGMFKTMLEYKCNHAGVVFEVVNEAYTTQTCSRCGSIAGPKGYAGLNKRSWKCGDCGASHDRDINAAINIRERGHALLGVEIPAFRHREDVKLPYQTLDKAYRRGL

SEQ ID NO: 33049 - protein, 364 aa, unknown
  TnpB Polypeptide
LKTKKPQKEKSSIVTVQFKLLLTPEQKTLLQNSANEYIRCVNELVALLNTAAEIPKLSSSNVSALLPSAVKNEAINAAKSVINKFKRGTCESLPILKKPVISWNNQNFKISENSLSFPLMVSGKSTRILVSAVFSDYQISLLQNKLGSLRITKKGGKWIAQVAVEMPQAEPAGNSAMGVDLGLKIPAVAVTDKGNLKFVGNGRQNKYMKRKFRAKRKALGKAKKQKAINKLSNKEQRWMKDQDHKVSREIVNFAKANEVSEIRIEQLQNIRNTARTSRKNEKNLHTWSFYRLALFITYKATLYGIKVMLVDPKYTSQTCPACGNRNKANDRRYKCKCGFMSHRDRVGATNILNAPVISGKRKPA

SEQ ID NO: 33050 - protein, 383 aa, Actinomadura sp.
VQLRYKFRLYPAPGQRAALGRAFGCARTVFNDGLRARQEAHAAGLPHLPDGELSKRVITEAKKTPERAWLGEVSAVVLQQALADLNTAYRNFFASLSGKRKGPSIAAPRFRSRKDNRQAIRFTRNARFSITAGGKLRLPKIGDVTVKWSRRLPSEPSSVTVVKDAAGRYFASFVVEAGIEPLPETAAEVGIDLGLTHLAVLSDGRKIDNPRFLRRAERRLRKAQQALSRKAKGSGNRAKARARVAKAHVKVADARRDFTHKLSTQIIRENQAVVVEDLAVKGLARTRLAKSVHDAGWSALVNMLEYKAARHGRALVKIDRWFPSSKLCSACGALAESMPLTVRAWACPCGAAHDRDVNAALNILAAGRVERLNACGGTARPAA

SEQ ID NO: 33051 - protein, 392 aa, unknown
  TnpB Polypeptide
VSGLYNWWVMRLKAGEKWNFKSCKKTLAESREHDPELDDVYGKLLAEVYYRLDAAMGAFFRRVKAGETPGFPRVRPRHTFFTLCYPAMYLQIEGNRLTLPTGGRGKQKKYPNIVARLTDTPPVEFGEVAMSRDARGNYYASFTYKEDEQTPEHVEGQADYAAFDVGIKTLATGVNEQGRVYTVGGFKGHQWYNKQLDKIRSKRDKCKKKSCRSIYLSKVYKRVSEKKRNKRKDSLHKASHLIAHTLVERTVIVGDLSQRQMVTKQHVDRKKHLNRAVYNEWGLYTFTQMLSYKCDLYGKELVFLDERNTSKMCSGCGRLQAMPLWKRTYCCTNCGLVMDRDVNSAHNILTRFLAGQPPYTQAIECDVLQRTGVDVASTELAQRCKVQQLGLW

SEQ ID NO: 33052 - protein, 416 aa, unknown
  TnpB Polypeptide
MAERFVVKGVVFLLKDRTHDIELPPQLVDLQKTFRLMVNEAIRAGLDLNLTSRFAICKAVYKGFRKDYDVYSQYIPSACEIAGSVLKSHRRRLRKGQRPRRPFVKRLSLKCENQTYRLDRRTGLLDIPIRAREHVQVQLNVSPYHRKYLDDEGLTLGSLTICPDSVIVAFRKDRPVKAPIETVMAIDTNERSVDGVFVSNDDEPLPIRYDIAEVPIIQKRHHDRRKRLMKKKAHDRRMKKKLCGREGKREHDRIEDRVRKVAIRLVSIAKVRNSAIVLEDLKGFRKKKRSKDLQRRLSSWPWSQLHKFICEYADWNGVTVIFVDPYNTSNDCPACGRRNAKSRKDGLFRCECGWECNQHISASLNIYLKAIASNEEVARAVKGRPDASWHDLMMSPYDLFTGARTEANRTSGAVGS

SEQ ID NO: 33053 - protein, 190 aa, Lyngbya sp.
MTENETALLNKGEIKGGIGYPKFKKYSRSVEYKTSGWRLLDPKQIEFTDKKGIGKLKLVGTWDLAFYPVEQIKRVRLVRRADGYYVQFCIQVDVKVETKPTGNTVGLDVGLKEFYTDSNNNTEPNPRLYRKSEKRLSFYQRRVSRKKKGSANRLKAIKRLGKAHLKISRQREEHAKKIARCVIQFLDLVA

SEQ ID NO: 33054 - protein, 367 aa, unknown
  TnpB Polypeptide
MRRAYQYRLCPTPTQQERLDWTLDRCRELYNACVQERRDAYRMCGVSVGFYEQKRQLPAIKDARPEYKEIGSQVLQNVVERVDKAFVAFFRRIKARQKAGYPRFKGRDRYDSFTFTQAGWALVEGRLRLGGIGSVKVRWSRPIQGRIKTVTIRRDADHWYASFSCEVDHVAPSAPDKPAIGIDMGLEHFATLSTGKHIANPRHFRGGEALLARRQQSLARKKRGSNRRKKAKLLVAKAHRKVRNQRRDFHHKAANGVVAQAGAIAVESLNTAGMVKNHSLAKSISDAGWAQFLTMLGYKAEGAGVQVIAVNPSGTSQACSACGAVVRKDLSTRWHTCACGASLQRDVNAARIILKRAGLARQAASVA

SEQ ID NO: 33055 - protein, 479 aa, Vulcanisaeta sp.
MLRRAVAVELETTKELNKLLHSVEAAYLNIVREVVEYAVVSNVTSATQLQRLFYRRYRLEYQGLHAHLVIQAIKQASEIAKSFIARRRKGLASKPYPEIKTVSIRFTEFTWSYEEFAKSIAPVRLELSLLGVRRVVWLRLHKRFWLYWWKVLTGGARLASTLIIKRKTNKWYAVFVFEIKPRQELPRAIVAFDINENTVAIGKIDLASTVGMVTNWNRQYLTPQLYTIKTDFGRLARRYGKIRNTIIEKLKPEFALPNGKYMNITNTREYRKLVRRLREGNRKLGRVRHVANELTKTPAIIVTEELGENPQESMIDGIVKSELRHRIKQTPFKALEKAVKDKALERGSRIFRVSAYRNSRVCPIHFTRLESTNDWHTLQCPLGHLVDRDYASVMNMAWKITPESWTKGVWWDLRKNMNWRKHESESNPLIPHLIVKYLHVTLKEFTASEQSPAVLARGSPMNPTGGANEGRARKPPTPF

SEQ ID NO: 33056 - protein, 481 aa, unknown
  TnpB Polypeptide
MPTRSVPTRETYTTTTTVRIFPLHGLTPEQRVLLRAGQREAGAVYSSCMQAHKIARQTHDPWPSYTDLHHLTKGRHPDLCAQSVQSTCRAFDGTIRSTVTNRKAGNTRMRYPWKERRFQPIRWPAQALQRKRDGTRFPLGGRGKDRRYVDLPLHLPRNAGACQVIWNHGQYELHACVTQGAAAAVQAASHTPHGGRGCVDLGEIHQAALVTDTGSGLIVSGRGIRAIMQGRNRAIGGLQKKQARCTKYSRQWRKLQRARDRITGKVERQVPDLRHKGMRLVIEQAKTEGVGELYIGNPDGVRRHKTGRHHNQRMSQWGYGTDMRYLKEKGARAGITVGTGPERGTSSTCPNPTCRQKQKVRGRRWACRLCGGTWHRDLVGATNMFALAFKETAIVLVPERQNITYRRPGPVGLRQRSRAGNARRSSPDRGLRGTSIPTELITSAVGHPPVPRFAQALLGTGPEGRTHCSPDGHGSACSALA

SEQ ID NO: 33057 - protein, 516 aa, unknown
  TnpB Polypeptide
MLSLWAVSINGSETALSIRGTELGDGLVRPLEASSNSFLARPRERASSGILPGPQTKMAITIIPMTTHSYPTIAITISYLRAWPFQALTFYQDWLCYRIFSRLSDLYLGFLPISLIVLAVKSVWQYYVPVDDVLRLLDVFRRMVNDSIRIGLLNDASSLRKLSLLSYNQLARYDSPSYYKLCAISRATGILAARKRSVRRGYATRTPYAIRQQLVSCYGFKIENGYLRIPVSRGKRFSIPLTKYVLEVISRPGVKVRSFTLTRNRLSLCIARDVPTVNRASTVGVDRNLRNLTVGNDVQTRQYDLSKCVRIGNTTVRIIASFTRDDDRIRTAIASRYGQRRTARVGHLLHNATKTVVALAVRRKTAIVLENIEGIRSLYRKGNGQGRRYRGRMNGWSFGEAQRQIEYKARWVGLSVICLSRRETRGSSLSCPRCGERLQSDKRLVRKLWCGKCRVVMDRDMVAAINLSRRGRVRFARSRPLIPLEAQGGAVEAMKGNPTTVIPGVDAPKLTQPTKS

SEQ ID NO: 33058 - protein, 423 aa, unknown
  TnpB Polypeptide
VNFYETDKKVALYPNQTMMKVLDDLCDYRRYCWNQGLELWNDLYDQRVEMVPVDLRKKSQQAIRDKNIVFSEEEQELLSIFPSPSHHIVQNILVADKADWQYNLSSRVLQLAIKDLANAWIAFFNSKKPKKKGSKKKKRKVGKPSFRSKKNPKQGFKTDRASIKDGKLVLDKPHKYKDAWYGIPFKGYDLPDGKIKHCAITRIGDSYQATITIDCPEQSLHKTGEKTAIDANVNHFDYTDGSFKVFSKRLDRLYAQIKHYQRLLARKRQENGKKATRSKQYFKVRIKLQKCYQRVTAIQNDLLHKFTTMIYQAYDTIVIEDLDVQAMQMQKKAKNLHRSLFGRFRLYMEYKAIKFNKTLVLADQYYPSTQRCSNCGHVKTGDEKIGLDGNKKHGTKHNEYICYSCGFVADRDQNAVLNLLALV

SEQ ID NO: 33059 - protein, 370 aa, unknown
  TnpB Polypeptide
MNTVCYKFRLFPSKAQETALNETLAICRLIYNSMVHERTAFHEQGLKPPTFYTQAPALARWKKDHAELKTVHSQVLQNVARRVELAFQAFFRRVKEGDTPGYPRLKGKGQYDSITYPQSGFKIGDSTVTLSLLAKQEQVKAKIHRPVVGAVKTCTVRRYGRKWLACFSVEQEDVPLPPCVGAIGLDVGLNSFLALSNGEFVDNPRFFRRDEKALAKAGRKQAKTKKRSRERRKANKVLSRIHERIRNRRHDFVHQTARRLVNRFGVIAVEKLNVKGMVKNHCLAKSIADASWSMFRTILAQKAESAGREVYAINPSYTSQDCHACGYRAKKKLSERWHLCPMCGASLDRDTNAAINILNLATAMGQHSVG

SEQ ID NO: 33060 - protein, 458 aa, Thermocladium sp.
  misc_feature (331)..(331): Xaa can be any naturally occurring amino acid
  misc_feature (353)..(353): Xaa can be any naturally occurring amino acid
MPSPGQFLGNEERRPIPPAIPGGGIKEIKHNNKRTIVIRLLPNGFQERKLRRLADTSAKLFNEINYERRQQFFREGRVDFKGTYDKYYEKYKNELGSANAQQVLNKNNEAWNSFFSLLKLRKEEKLPPHMNRVSPPSYWKDGETGGRKPLLVVREDNYVVDGLNHKLILKYFKMEIRFTGRLRWHGKQGRLEVYYDEVGNAWYASIPVEVGVEETKKGRRSKHVVRGERKSIQVKSPRGNRVVAIDLGINVLGSVVIDDGTWLLYKGVRVKEDYFYLQNRIGEVQSLSDKAKNINEYEAYYELNREKRRLFKKLTRRLLHLYRNFASHLLXTLHELGVSTIYLGYPFNIAQQXGNKFTVNLWSYRELMNIIELKAQEYGIRVFEVIEYNTSKYCAYHGVEVERGSRGVVNCPKGHKLHSDLNGALNILKKATGIVISAIKKPLSFIVDHNRVAPINGA

SEQ ID NO: 33061 - protein, 338 aa, unknown
  TnpB Polypeptide
LRSYKFQLRPTVGQAQSLGEMLRDHCSLYNGALEDRKGAYKHRGVTVSYRQQSAQLKEIRAFDPERQGRWSFSSQQATLRRLDAAMGAFFRRVKGGETPGYPRFKPVARFDTVTFPRDGDGCRWDSQPGHADTRVRFQGFGHVRVNQHRPVEGVVKTVSVVREARRWYVVLACDRVPVKPLPATGSTVGIDVGIANFLADSNGGFVENPRHAKLAADRLGAVQRHLASFPRTRARAKDRTRRYRAAVEKVRALHGKVRRQRLDFHHKTALDLVRAHDVIAHEELSTANMVRAPKSKPDPDSPGGFLPNGAAAKAGLNRSINDAGWGGFLSIVTAKARC

SEQ ID NO: 33062 - protein, 413 aa, Nocardiopsis sp.
  misc_feature (283)..(283): Xaa can be any naturally occurring amino acid
LRQARAGGAGRDSRPPSGPGFFLVFLRPHRSWSYGCSHAASVRLPPLPGPGSARRAGSFVRVCAGGLQRRAGTHQAGQGRQQAARFCEAPDRRGPLPTGAQERRVVQGVDHQGEEDPRAGLALTGVGGPAPTGAAGCGPGLEGPRGFQDRQTQGAQGRCAPLQVAPRPYSVGPVHQQRRLEDHQRRQTLPARGRAGEGGVVTQPSLAPELGDRPQGRRRPVLRLLRGPNHRRATPGNHARGRHRSGVVPLRGALHRGEGRQPPVPAPGRQKTAQGPARPVPHXRKDFHHQLSTRITRENQTVSVEDLSVKALGRTKLAKSVHDAGWSQFVNMLEYKAARGGRTFTKVDRFLASSQTCSQCWAVDGPKPLHVRTWTCPVCKTLHDRDVNAARIVLAAGRADRQNACGGAVRPAA

SEQ ID NO: 33063 - protein, 374 aa, Symploca sp.
MLTLKFKLYHHQRNRYLQQAINTAGVIYNHCIALHRRYYRMWGKHLNCARLQKHIAKLRKRKPFWQRVGSQSVQDICQRIEKAYQLFFKHQKKGVRPPSFKKVLKYKSFTLKQAGYKFLGGNRVKIGNRVYQYWNSREIEGTIKTLTIKRTPLGELFIVVVVDTVSSEEIRFETGKIAGFDFGLKTFLTCSEGFQVESPQFLKASLNLIKKASREHSRKLKGSAHREQARLHLVRQHEKVSHRRHDWFWKLAQQLTNQFDVLCFETLSLKGMQRLWGRKINDLALGEFLQILEWVAWKKGKRVIYIDPWYPSTKTCSCCGYVLDEIDLCVRRWRCPSCHQVNDRDVNAALNIKMVGSSTIGVGDVRRAEPAISV

SEQ ID NO: 33064 - protein, 325 aa, unknown
  TnpB Polypeptide
LQQSVLNLSQAFINFFDGRAQYPTFKNRHGRQSIQYPQNVKILSDSEIKFPGKFGTVKAHIHRDWAGKLKTVTVSRMPDGCYYASVLLDDGIEKPESRSEGKAIGIDLGLIDFVVTSDGSKFNNPHHLKKHDRNLKRKQRNLSRKKDKATHKRRKAKVALAKVHSKISRVREDFLHKLSRKVVNENQVIVVEDLAVKNMVKNHNLARSISDVGWGMFQTMLKYKAEQDGKIYLEIGRFFPSSHLCHVTLLPVPKMDLSARSFLCPHCNEHHDRDVNAAINIRDEGLRILSLGTSDTALGDNVRPKRFGRKSTTVEAIADELGSPH

SEQ ID NO: 33065 - protein, 423 aa, unknown
  TnpB Polypeptide
MKQMKDLPYIIGLKVKIYPSDEQKRLIAVNDGAKRAVYNHLVACGNEKYRLSKSADNVPVYQERLDYLESVTGGLDSIKNAMPFLYGKDVDDQAVANASKNYHTAWKNRKERHTGVPVFKKKSSVQSYQTNAHYYSKDTQEGHNSNVWFLDKNHVTLPKLGRIRFGGSPREVAEIIRRQEARDIRIGTITVERDAVGEYWASFQVGSETPFRETFPETGSKRGIDLNLLELVINSDGNELENPKFLQASMKNLKKAQRKLSRMAERAKKDGRKLSECKNYQKQRQKVAYLHRRVARQRADYLHAYSKHEIESQDFIAAEDLKVRNLMRNHKLAGAIGDAGWRTLLTMLKYKAKLYGRTVVLVPPKDTTQTCSVCGYIMSGDEKLTLDVREWECPSCHTHHHRDRNAARNVLKRGLQAAMQPYP

SEQ ID NO: 33066 - protein, 601 aa, Rhodococcus sp.
MTGPGSTVPRQFAFTTRAYMAVDDATGEPIGLDDVDIRVGWLLDLVTAAGGELVSRLWQPATFDVLAAGRDRQDRRLPAQGHVAAARLGWNPHYPGGVYVPSRVSRVVTAQVMATLRTMAYRDTAITALSARFDPATGTVAPPTEPRDFVSAGFARGVRRQLIAHSRRETSAQAGRLRITDLQGPPQTSAMARLSVADRQLAQIAAADGGLVLTVKLPTSPTPAGRAQWRRVRLTATIPAHLHGRAVTDWHLPTLILDRKGLLWRCAATEVVPAGDPKTAIVAVGVDWSPSALGAAALAADSAEGLLSDYRGWTYDDRGLGIKLARLQAEGQLLHRKAARLTRLAATAPPEARAELEAKIAVLDEHREAVGVKRGKINRELAFHFGRQVTDYAADAQAQLIAVEDLTTLETRGHGRVNNNRAAQSARRRAVAALAHTAAGVGITVVSVPARGSSALCPGCDGPLARPGGYHDAWCSHCRVGGNRDHVAGVNLAKRALLGRNKVTRRRGQLPAIRVAEHAPVRQCRDKHGPTPRRPRHRRVRRSLPTVTPRLGVTPKQYVPASQASVWDTVKPTPPHGDAGSRDTCLSQAPAIPVADSMRSM

SEQ ID NO: 33067 - protein, 611 aa, Rhodococcus sp.
VLADRELCPALTGPGSTAPRQFAFTTRAYTAVDDATCEPIGLDDVDTRVGWLLDLITAAGAELVSRLWQPATFDVLAAGLDRQDRKLPAQGHVAAARLGWNPNYPDGIYVPSRVTRVVTAQVMATLRTLTHRDTAITALSARFDPATGAVAPPTEPADYVPPGFARGVRRQLIAHARRTDGAQATRLRITDVQEPPRMAAMARLSAVDRQLAQIAVTDRELVLTVKLPTSPFPAGRAQWRRVRLTAAIPNHLHGRPVIEWHLPTLILDRKGLLWRCAATELVSAGDLELATVAVGVDWSPSTLGAAAITTDHPDGLVSDYRGWTYDDRGLGIKLARLQAEGQLLHAKAARLTRLAATAPPQVRAELEAKIAVLNEHRTAVGAKRGWINRELAFHFARQATEYASAAHAQVIAVEDLTTLETRDHGRVNNNRAAQSARRKAAAALAHAAAGAGITVVSVPSRGSSAWCPGCDEPLARPGGYHTAWCSRCRVGGNRDHVAGVNLAKRALLGRGKATRRRGQMPAVRVAEHAPVRPSRDKHAPTPSRPRHRRVRHSLPTVTQRMGVNPKQHVPAPQASVWDTVKPTPPQSDAGSRDTRLSPTSATPVADSMRST

SEQ ID NO: 33068 - protein, 444 aa, Paenibacillus sp.
VFVTHSFKIPYDKKMYSELRIMQREAASVWNDIVREATSYYFCFKKWLSKTEIQAIRRQTYHLHSQTVQAIADKYVANRETIRKLRVTDKKAKYPWRRKYYYCIPLKKASMDVSKETITIKKVEYGFQLTDLLTKKKTKNWNEKVSKKNESIVIPNRSEEILETCNYAEVVWRNGAYWFCYSVSVPEKDTSSYAFKAAGGDLGEIHSVTVATEDKALVVSGRAMRSISQFRAKVVADLSKKMSRCKKGSRQWEKYRQARVRIRQKTKNQLEELEHKTTKEVISFLEAEKVTNFVIGNVSGIEKNTKENGKKKRKNNKKRRQQLSLWNQGKIKQKLKYKAQLKGIRMEETEESYTSQDCSFCGGRHQANGRTFICSVHKTEIHRDVNGAQNIVRKKYHMETKPLLSVLYKQPVWNKRFLSMKERQEAKHPKDQPKKEKSIAGRTA

SEQ ID NO: 33069 - protein, 407 aa, Planktothrix sp.
MLHKAVKVRLYPTLEQRTLLAQHFGCSRWWWNYALNKSIETYKETGKSLGQSALNTFLPKLKASEETSWLSECYSQVLQATTLNLTTAYKNFFAGRARYPRYKSRHGKQSIQYPQNVKVLDGFVQFPGKVGKVKAKLHRKIEGTIKTVTVSLDPSGKYFASILTSVEGENPTVSTDGRVIGIDLGLTHFAIASDGKKVSKYDNPKHLTKHEKNLKRKQQKLAKKQKGSNSRNKAKKTVAKVYERVTKSRQDFLHKLSRKLVNENQVVVVENLHVKGMVRNHNLAKAISDVGWGIFVNFLAYKLEKKGGKLVEIDRWFPSSKLCSNCYYQIDKLSLDIREWVCPNCGARHDRDGNAATNIRAEGIRMLQTDGTAVSADGGEVRPKMGRKSVLRHSPAMSEAYTILASS

SEQ ID NO: 33070 - protein, 474 aa, Mycobacteroides sp.
MTTAAPTETVLRGYRFVLDPTPTQAEMFESHAGGARFAYNHMLARVKANLSQREAERSYGIPDEELTPALGWSAKDLNDAFNAVKDADAPWNRENSSRIYLYATRDLAQALKNWSDGKKGARRHMGFPRFHSRRSRKSFTFTATDKTLLDTRHHVKLPKIGVVHTLESTRRLYRLIEQGRAKVKTATVSLHRGRWQVSILAEITRAVTPQRKQPRVVGIDLGVKDWIVAATPDGAEVLRVPFPAELKKLDERKRKLQRRYRNRQRGDKRTGQQASNRWRQAQKRINKVDYKMAAIREDMLHKATTGLARLFDVVVMEDLNVAGMKTRGGAHKRGLNRALQQSGMAMTRTMMSYKASELILVDRFYPSSKRCSSCGETKAKLTLGERVYRCGNCGLETDRDLNAAINLARQADVHMAESPSVSARGAERKPAKPSGAAAAGDEARSRRRQRQSVGVTGNGGTSPRTQLNEEHSAA

SEQ ID NO: 33071 - protein, 274 aa, Planktothrix sp.
  misc_feature (259)..(259): Xaa can be any naturally occurring amino acid
VLKAVKVRLYPTPEQELALAKSYGCARWYWNFALNACIQHYQETGKSLKLATYKGMLPQLKKEYPWLKEDCYSSVLQCVAINLDKAYKNFFEGRAKFPRFKFKHHKQSIQYPQSVTVNGEHLKIPKIGEIKAVFHREVTGKIKTVTISKTPTDKYFASILCEVEGTDIKQSGDKIIGIDLGLKDFAIVHDGDIATKYINPKHLYRHQKNLARKQKKLSRKTKGSKSRERFRKIVAKVHEKIANSRQDFLHKLSRKLVDXLLIKLLFKMINICMN

SEQ ID NO: 33072 - protein, 425 aa, unknown
  TnpB Polypeptide
MTNITLVAESKLYLKDNTPLYDYFDDYSKLFNFLVRRCVHHLRHKLNGESESRYRTNLMLDFNLTNRMAKAILRTAKNQLKLLKESARYQYSNLYKRKRSLYKKLAKFKSILSSNSTSLKQRKLAKLRLFWTQMKLNKVNQLIDNGLKLHLTFGTKHLLKTNKQKFLAKRDNQVVYIGDKNETCGNQQFQITFNSKCNRFEYKLRLDNRWVSGSDKYIFGSFVLKNKEAKQCTLQTLSEKKSNPLTYRIIKRQGVLYLQIMYRRKTTDVTRYNHGVLGVDFNKGFISVSEINIDGKLRSLTRYNYLHQGRATKTKTSRLDLVSKLVSQAVSAGKDIIIEDLVSLDSNKKQEKTTSKNYNRMINSLKFGLFKHCLNSKATKEGVSVHTVNPYNTSKIAKVSYTDRMKLNVHDAASYVIARRFYQYD

SEQ ID NO: 33073 - protein, 356 aa, unknown
  TnpB Polypeptide
VEVARTLRFKLEINSEDAEKLHSLIVEYSKLVKDFLKVLKHSRAILKPSKGKLHRYAYHFLRKKYNLHSNHVTSARDRAVEMVKASAYHKVFPDPETVPVRMFRDKTFFLNGKRIKIVIAPREHVTGKLIGGQFDEIERARCAELIERDEEFFIHFIVKRKVNLEYPFVTRIGVDVNLERIAVSAVGEDGSVLATHLIEMNVKGRREYFLNRRRGNQRRKVRAGHEERDYFKNLIEQTTHQIITFIKNFEKPVVCLENLKNLIKRVRKRGGDVYPKFFYEEVHRRLVEKLTWEGIRVVFVPAMFTSVRCHRCGGYGKRYGKKFVCGKCGEFDADVNASASIARRLPALKGEVSRWL

SEQ ID NO: 33074 - protein, 294 aa, unknown
  TnpB Polypeptide
MKITAKILLQTTPEQAKALRQTLELGNKICDHISEKAWSEQVFTPFKLQKIVYHPVKTLFPITAQMIIRLIAKVADAYTLDKKTMRTFRKHGAIGYDSRILRYYTEKHFVSIWTTKGRMKIPYIVNEHNAKLMETQQGESDLVYRNGNFFLFATCNVEEPPPHEFNDILGVDFGIVNIASDSDGNTFSGERLETNRQWYAERRAALQSVGTKSAKRRLKQLSGRQKRFQQNENHIIAKTLVAKAKGTKRALALEDLTGIRKRTTETIRHEQRAKHSNWAFFQLKQFVAYKAKRA

SEQ ID NO: 33075 - protein, 293 aa, unknown
  TnpB Polypeptide
VSGSIKVDFEKGLLYLPKIKDGIKIELHRTFEGQIRSATVSKTKDGKYYVSISVETEEPRNKVIEPKSKACGIDLGLEHFATIANDFGTYKVEHPKHLGRAEKRLKKLQKDLSRKQKGSKNYEKTRQKLAKLHAYISNARNAFLHKLSKAIIDENQVVVVEDINVKGLMQSNLAKSISDSSWSKFLTYLRYKAEWYGRTLIQVHKFFPSSKLCHCCGYKKEDLALHERIWTCPVCGTAHDRDVNASINLYLVGLERPEVKLVEHALVDDRIPYGIPKKPSCVEAGSSTFYKVE

SEQ ID NO: 33076 - protein, 172 aa, unknown
  TnpB Polypeptide
MRFFFTIVVTPNYPPKMTRNGVKIQLISGIDVGIKDLAICSNGMVFKNINKTRVIKQLEKKLRRLQRQVSRKYKKNKKGKEYVKTSNIIKLEQQIKLLFRKLANIRKNYLHQTTSKIVKTKPSTIIMENLNIKGMMKNKHLSKAIANQCLYEFKRQIKYKCEWLGIKLIKTM

SEQ ID NO: 33077 - protein, 523 aa, unknown
  TnpB Polypeptide
VKQKVHLMMKKDKTNTTPSFVLTLPLDVDQDSQERLNADFFSFWRIYNGLVSISTKKWHQLRKTRRYKALSFAISKAKKGSPERKALYAQRNQLLKEAGFSRTGFDEIVKPLAKHFGVNSAIAQTVAERVWKAWNDFFFGKGKEVHYRRFDAFYSFRGKSNVTGIMCREQNGGFVLQYKDCVIPIILRNANTNTGWYQREALKNRIKYCAILRQWVKNKWKYYVQVILEGQPPIKVDENGVLKHPIGSGNVGLDIGTQTLAVSASDYCDLKVLAPSALVQAKSLVNEISKIQRAMDRSRRATNAKYFNEDGTIKRLRSKHGHKQRREWAYSQNYFKLRSRYRDLNRRHAAIRKQEHYALANELLEYGDTFFIEDMNYKALQKKSKDTKVNTKTGRSRSKNRFGKSLSRCAPAAFVSILKQKVERLGGKLTKVNTFETKASQFDHTDDSYTKKKLSQRFAKLSDGTVVQRDLYSAFLLAHLNKDMKSFSKTSTEKDFPHFLELHKQTANRLKRSTDWLPASVGF

SEQ ID NO: 33078 - protein, 440 aa, unknown
  TnpB Polypeptide
MALFLDYFLLNLYNTSRNVKGGEIMYLTIKQQLKHLSKEDYENLRGLCHTAKDLTNQAIYCVRQYFFNEHKYLGYEKVYAELKICDNYKLIAANMSQQLLKEVDGSFKSFFALLKLVKEKGYPASAAKIPHYLPKDGFATLVVQEFAIRDGIFVLPYSRAYNKDHSKVKIKVPLILEGRKVKEIRIIPKNNARFFEIQYTYESAIESKELDKSKALTIDLGVDNLATCVTSEGDSFIIDGRRLKSINQWYNKQNARLQSIKDRQQFGYGKTEQQKRILHRRNNRVNDYISKAAKIIVKYCLAHNIGNLVCGYNVTFQQSSDLGKINNQNFVNLPFGQLRGKLAYLCELHGIAYTEQEESYTSKASFWDEDKIPIYNADTPQQYEFSGRRVQRGLYRTATGKTLNADVNGALNILKKSSVVVLDGLYGRGEVATPVRIRVA

SEQ ID NO: 33079 - protein, 502 aa, Unicellular sp.
MKRKPIDKASEYAVTRIGYCIGGDVEKARKMAVRAGHLRSDIWNKYGSLKCWGISHQKLYKDFQKTNPPSIYKLPQKQWQKTFERVINDIHACQEAAKTIVVRKIYRHFKPEKDNQGKEIKSTSFREELIKSLKTKQWMKYPLIHRWMRQAYHRGHTYINNQICVGISNGAVVKRISRNVVSVTIGGDLISPSATLRANSRKYEKLTLLFKVGRITPTGLFQIIFDDVTQKIRLHFPKIVKRSPSTGKGKCGLDKGYTEAFTDSNSITYGDRIGKVMTQSVKKRHIRGQGRNKLYQIAAKKNKPHIFQGNLTKKRHQSSENKKKQTLITMVRTGVNQFFDKYQYAITEDLSFVVKNKRISRQINRNLAEWCKGTLQKALDEISYRRSSSVTVVNAAYTSQVDSRFGVLLGTRKGDQFFTFDGEVLQADCNAARNIETRLDDPNITRFMKSVDVRKVLIKRTVSFLLQRDLTLDDAINKGWFNPRHLKGINKKAWVESETLGA

SEQ ID NO: 33080 - protein, 210 aa, Okeania sp.
VRISKRAGDWHISFKYDYQPNPTPKEGDIIGVDVGINALATCSDGRIFSNVKAYKQAKKRLTGYQRRVSKKKIGSKNRAKAVKRLAKAHKKVADIRADALHKLTTWLAKNHSTIVIEDLNISGMLKNHKLASAIADCGFYEFKRQLTYKCEWYDSVLVIADRFYPSSQLCSNCGHQQKMPLNVRTYECANCGFKADRDFNAAVNLANYVY

SEQ ID NO: 33081 - protein, 454 aa, unknown
  TnpB Polypeptide
MYHHQFITSTLNPTSTMKLAHKIELIPNQAQREYFAKACGVSRFSYNWALANWNSQYQEWKKAEEEAEKNGTINLLSKPKEYELRKQFNAIKKEQYPFVTEVTKCVVQQSIKDLGVAFIRFFKKTSNYPQFHKKGRHDSFYMDNSVFQVVGKKIYIPKLGWVKMREELRFYGKIMSATVSRIADKWFVSIQVDIPLEFLNIAHEPYHQDNSCCENQTVLNDSMEPLAPLAKDLNLKVVGIDLGIKTMATLSYANKMEKIDAPKPLKRLLSKLKRLQRKLSRQGQHYVMEDYVDANGETRKIRKYSNNYMKTKIKLARLHAKIRNIRQDFLHKLTTRLVKDFDVICIEDLNVKGMMANHKLARAIMDLGFYEFKRQLLYKAQMWRKTVVIADRWYPSSKLCSNCGEKLKSLELSDRDWECPHCHTVHDRDANAAINLRKLYFDNLDVANHATQHT

SEQ ID NO: 33082 - protein, 208 aa, unknown
  TnpB Polypeptide
MQVFFFSTKIRYRKRRCSVFWVWIFPCTNYIVTVMGMSLHIRGITGKRRKKLAREQRRLSKMQKGSNNRGKQRIKLAKLHEKVSNQRKDFLHKQSRQITNAYDCICIEDLDMKAMSRSLNFGKSVSDNGWGMFTTFLKYKLEEQGKKLVKVDKFFASSQICSACGYKNTKTKNLALRKWDCPQCGIHHDRDVNAAINIRNEGMRLVIA

SEQ ID NO: 33083 - protein, 423 aa, unknown
  TnpB Polypeptide
LLRGNPGLQSGEEAAPLDFQPHGKYTTYVKVRYRFRFYPTDEQKNTLARVFGACRYVYNWALRMRTDAYFKDNVSVGYDESSARLTVLKTTPEHVWLNEISCVPTQQALRHLQTAFVNFFEKRAGYPSFKKKTGDQSAEYTRSAFKWDTKNQNLALSGIGRMKVRWSRGFASAPTTVTVSKDTADRYFVTLCLDEKIEPLPSARKAVGIDLGITTLATLSTGEKIENPKHLKRIENQLARAQRDLARKKKGSKRRTVQRLKIARLHARVADARADYLHKITTDLVRRFDVIAVEDLNVRGMVKNHNLARALSDAALSEFLSMLRYKCEWYGRELRTVDRFYPSSKRCNDCGRVLEELPLDVREWDCPECGKHHDRDVNAAKNILAAGQAVTARGGKVRPKRGLSRKGASLRSANQPESLHKAS

SEQ ID NO: 33084 - protein, 404 aa, unknown
  TnpB Polypeptide
MIVKGVVFYLDSELPSEARSLLEDFRLAVNNAIRAGLQARITSRNALIKIAYKDFREQHPRMYAQHLVSAFEVAGSVLKNHRRRVRKGVTCKIPYVKRLMMKAENQAYKLDRKSGIIDLPIRAGCHVELRLVVSQYHRKYLDDMTLSLGSLTVLPNRVVVAFRKDAPKPFVPESALSLDTNERSLDGVFIGGDVAMAVKAEFPDIATIQQRHYDRRKRLQKKKAHDRRTSRNLCRNEGSREHHRIDYRLHQVANSILKFAEERRSAIVLEDLKGFKPKMNKELNRRLSMWPRRKLHRIIEYKAQWKGIPVVKVDPRNSSRTCPICRRIKYSRMGAEFKCECGWCLDRHINASINLLQTAISKGMAGGLWFNPGAFQHDAMMTLYALSRGARSEPNGTSGIAGVT

SEQ ID NO: 33085 - protein, 373 aa, unknown
  TnpB Polypeptide
MIKRYKKFTTPTMRRSSRVYVNDLNTGKVATIHDFLVQCHDVTQYFVDLFWQRNDHTAKLADLETVHRGCERFDITTRLSQALAKQAKEMIRSAVERDGKRARKPYVRRLTTTLYSHFVEVTPFTGSFDFAVKLIGSGAPRLVIPCRSTSHLNGLVAKGFTIGKTIRLGWRKGQVFVDFILEKERPALKTDGRVVGMDSNYVNGLVFSDGQQLARTVVEKIRSFPKRKQRTHAQIKSLVACELKKLDLAQVRMLVIEDLKRVKHGKRGKFSRVFNRRLSHWLYAFVADWLRGYCEETGTRLDKKHPAYTSQFCQPCGRWDRRNRKGERFLCVHCGHVDHADFNASKNLELLGLAGVYGLRSLLTSSSYDSVRL

SEQ ID NO: 33086 - protein, 426 aa, unknown
  TnpB Polypeptide
METGREFQPVARRVSTSHRLKPEAMPKELAVHTRKLKLQYTQQLDTINAATASVWREGLVLKEMWDYAHGYRTGGTLDVPCELWMDKQLSKSQPLHSQSIQEVRRRYFKNRKGFREKRKNGDKKAKPPYRDKRFQTTTWKKSAIHFKGNMLVLSNGRQGDPLKVRLPKNFDLKYAIAHIAIVELVYDKGQYTLHFVYGVEKPLKSDAEGVVGVDIGEIHPMVSHDGVATTIFNGRYIRSLYRLRNKVIASYGKKIDRCKRHSQRWWRLVRRKWKRIRQIDNQILDGLHKHSTKFVKMCEDRDIATIVIGDLTGIREHIDYGKRANQKLHQWAFGKVTELISYKAKALGIKVEVIDEAYTSQTCPKCGNRKKPTHREYTCKCGFEYHRDGVGAINIRRKYLGCLGVRVAATMASPVGIRLEGRCCSA

SEQ ID NO: 33087 - protein, 435 aa, Cyanothece sp.
MKQIITAKLKLITTPEQKESVRQVTLAYRDALNYTSEIAFNNNKLSQAAKLQKLVYRDIRGDFKLPSQMSCNVPRQVAATYKTQWTKFRQNQQAREQGHTKKRYKGLDKPQKFISRTCTLNYQRDYSFKTDQKVSLVTLSGRIVVSYAGYNKHLELIKNGSKIGAAKIYYNRSSNTYYLLVSLEIELSDIKPETINKVKGVDVGQRYLAVSAGINNSSQFFSGKQIRYKANRYYKARKSLQHKGTRSAKRRLITLSGRERRFIADVNHQISKNIAQPNSLIGLENLTHIRERTRSKSGKQVSKKQRKANKNKAKWSFAELHSFVDYKAVLNNSLAVKVPAHYTSQMCPKCGHVSKENRPNKGLTFNCKCCGYKLHADLVGARNIALRALLIRQDWMSTGILSASPNMSDVEAKAKNLQRFLELRWSLDVSPDQAR

SEQ ID NO: 33088 - protein, 311 aa, unknown
  TnpB Polypeptide
LNDISARALQRSCADLATAYERFFHKQSGFPKFKSRKKSKAVFPVDNNLGALWFSPTFVQIPKIGKMPYRAQENLPMGRQQKFYNPRISYTPNDKWILTFGIECETQTPILTDLSMGIDLGIKELAVVAYGDEQIVFHNRNKSKKMRQLNRKFAHYQRNLARKYSVNGSYEETSNVRKTKKKIKRLYYHISNIRKDYLHKTTHELISKCPKRVVMETLSVQDMMKNKHLAKYIQEQCFYEFKRQMKYKCEWNGIEFVEVERYYPSSKTCSCCGAIKKDLKLNDRIYHCGACGLTIDRDYNAAVNLMRYGVQ

SEQ ID NO: 33089 - protein, 394 aa, unknown
  TnpB Polypeptide
MSRYRLLPSPAQEAVLRDHCAHARFVWNLAVEQHSHWRPGRTGAPGYLEQCRQLTAARAEHDWLRAGSQMVQQQALRDFAQAMANYFGGAHNRPSWRKAGRDEGFRVVALRPGDVRRLSRHVGEVRVPKVGWVRFRWSRTVPPEVKSYRITRDRAGRWHVAFAVIPEGIASPGNGGTVGIDRGVAVSAALSTGEMLIVPGLSAGRKQRWRRLQRRLARSRPGSNRRARVKLAVARLRAREADARKDWAEKASTDIARRFDMIRVEDLRITNMTRSARGTAGNPGRNVRAKAGLNREIMRSGWGLLVRRLEDKAPGRVEKVKPHFTSQRCSACGQVDAKSRESQARFVCTACGFAGNADVNAARNIAAGHAVTARGGDGVARPVNREPQLLLHSA

SEQ ID NO: 33090 - protein, 394 aa, Planomonospora sp.
VRRSFKFLLRPTAKQAAALTACLEDHRQLYNAALEHRRTAYRKADVTIRYGDQSGELKHIRADDPGGQGRWSFSSQQATLRRLDKAFRAFFERVKAGRTPGFPRFKGRGRFGTVTWPKDGDGCRWDSQPEHPTATFVRIQGVGHVRVHRHRPVKGRVKTISVQREGSRWYVVLSCDDVPAKPLPATGAVAGIDLGVASLVTTSDGGHIANPRHLAATADRLAAAQRDLARKKRGSARRRKAVARVAALHATVRRQRLDHAHKAANALVAAYDVIVHEALKVANMTRSASGTIERPGRSVAAKSGLNRSILDAGWGVFLTVLAYKAESAGRELIAGNPADTSRTCSRCGHCAKENRLTQAAFACTACGREAHADVNAAVNILRAGLALREAAQAA

SEQ ID NO: 33091 - protein, 496 aa, unknown
  TnpB Polypeptide
MHIIQLPLCTRQCDVRALNKRFYEMNHIHNVLVKHGIEQLKALKSDPEYAKLLQAYKNATKTKKKHISNQLSAVRLQYGLSEAQLQAYAKLCGKQFRKRLSSQQVQKEATRVWQGIQKCIFSDGKRLHFKKYNELTTIQGKTNTNGVKFDKDALAIDWQGLHLLCRSPKLSKDIHYIKESLNHKVKYCEIVRKMFNNGWHYYVNVYLDGDAPLKQMTIKDGTMGIDPGVSAIAAVSNDKIFLRELAPDCKKYNKKIVRLQQQIDRSKRQSNPKKYNPDGTIIKNNRNKWIYSKTCKKKMRQLTALYRQKAAYIKQSHRLLCDELIQSASVIYIEEMNFKALQKRAKKTERSDKLSSIKQKDGSVKQIHKYKRKKRFGKSLNNRAPASFLQILEYKASRYNVSVAYINTKTYKASQYNHKTGACTPVTLGQRTKEIGRTKVQRDLYSAFLIQHPKKNLMTPKRTACTKDFKHFVKMQNALITEMKENGISMKQCFGF

SEQ ID NO: 33092 - protein, 364 aa, Bacteroidetes sp.
VHAAPSASSNFSGSSTDNSARWACRPTWPFGPSPAWAIAKAIAQSTTVPPPATTTGARSRCEARRSAFRPRAGGCAAEGLPLTEAVVLSTTRGRLRVPMRLSPYHRYWLARARSVQGGRLLRDRRGRWYVHLTVRIETPEAAPTGRVVGVDLGQRLLAALSTGARFPGGALKTKRLHYRAKRAEIRSKLVRPFRTHQKRQVPLAQLSGRERRFVRQVLHEASRRIVDSLAPGDVLAIEDLRGLRGRTKRKGKAARHLHQLWPYGLFRHLLEYKARLKGVRVVVVDPAHTSQTCPRCGHIDRRNRRSGRLFRCRACGFQHNADVVAALNLARRAGSEGMGRCQPAPGAIPAVDREGKPTTSVVGS

SEQ ID NO: 33093 - protein, 379 aa, Oscillatoriales sp.
MMIVLEFKLKGKPQQYRVIDEMIRTAQFVRNKALRHWIDNQAVKLSDLYKQCAIMAKEFEWAGKLNSMARQASAERAIFAVQRFFSNCKAKKPGKKGYPQFKKHNRSVEYKTSGWNLSVDKRCLTFTDGFAAGTFRLLGSRDLHFYAPNEIKRVRVIRRADGYYAQFCVNVDRTEEVMPTGTAVGLDVGLNHFYTDSTGETVPNPRHLRKSEKTLKRLHKRISRKKKGSSNRKKAINKLGRKHLKVSRQRKDFAIKTALCVVKSSDFVAYENLQVKNMVKNHKLALGISDAAWSQFAQWLQYFGKVYGKIVVAVAPQYTSQDCSSCGNCVKKSLSVRTHICLCGTVLDRDHNAALNILAKGLRQAGINFNTVGHTEINA

SEQ ID NO: 33094 - protein, 391 aa, Symploca sp.
MLLKSFKTKLAPNNLTRTLFAKHAGTSRHAYNWGLAICLEAKNKKEKIPTAIDLHKRLVAEVKSVHQWYYEVSKCSPQQALRNLSTAIKRWLSQKVSKKPRFKKKGHRDSFYLEGSITVSGNQIKLPRIGWVKCHEILPIEGVKNVTVSKCADDWYISFKFEPEVKPTAKVRECIGVDVGINALATCSDGTVFPNLKPYRQAKRRLAHLQRAVSRKVKGSRNRLKAIKQLARQHRRVKNVRADSLHKLTTWLAKNHSTIVIEDLNVAGMLKNHRLASAIADCGFYEFKRQLLYKTEWYGAKLIEVDRFYPSSQLCSNCGNRTYMPLSSRTYQCGNCGMKKDRDFNASLNLEYYRTPSSGEIACGDSSQPKSIAQGEPKKQEVNVKPTASSA

SEQ ID NO: 33095 - protein, 687 aa, unknown
  TnpB Polypeptide
MSKFVIECPKCHRYAEASGGLFGTGLFAKRTVKCSCGETINIQTEKLSSRKCPHCGNDVVFDQSKGDKAKCPVCHEPINTMAEQDKTVEFSCGQCGIRLRAAKGADKLTCPVCDHVNDVAERAAQEKIKHDGLASIIKYEGDNSTFIWKHPIEDFNYGSQLIVHESQEAVFFRDGMALDLFGPGRYTLETQQLPMLEKLYKLPTDNDGTFHTEVYFINKTVQMGIKWGTPDKVRFIDPLTGTPLDLGASGEMNLAVDDSRKLLIKLVGTMKGISWKTEALPETIMCEKCGQTLYTVNASGNTLICDNCRHTNIIKVSSSFTKSLQASFRPMIASSVKTNLPSVIKANDIDILEIDEKLDIISASLREKIKVGFEEYGLTVPQLYVTSVVLPENDPNFKRIRELHTIVLQTRVIQAEATVKTVEAQSKAQYRTAEEQAAAAIEAARREAEMQRQMTQTEVARREAERKVIGAQAEAQAQRMQGLTEAEIMAAKGYNQKDVLQAEVQEAYAAGIGNMGSGVSIGGGGSMMGDLMGLGVGMAAMGAIAPQIGNMMSGMNPNAVQQPPAPVQPAAEGWTCPSCGKAGISFKFCPDCGAEKPEPKPAGGWTCPKCGTENITSKFCPECGAKKPEEKKGWTCPECGTKDITSKFCPECGAKKPEENKSWICPNCGTKDIKSKFCPECGFKKGE

SEQ ID NO: 33096 - protein, 319 aa, unknown
  TnpB Polypeptide
MPVFYRDVMYREGAEGKDEAYLKLYDGHDWKWFCVRLDHTDMEYLRKYWSGKKASAPTLEKRHRKYFLRFSYTEEVTLTKTPVKEQIICSVDLGINTDAVCTIMRADGTVLGRKFIDHPSEKDRMYRTLGRIRRFQREHGSAQTQGRWAYTKRLNTELGKKIAGAIVRYAEENHADVIVFEYLEMQGKISGKKKQKLHLWRKRDIQKCCEHQAHRKGMRVSRICAWNTSRLAYDGSGAVTRDWENHSLCTFQTGKRYNCDLSASYNIGARYFIRELLKPLPATERSLLEVKVLPVKRRTSCVYADLRKLHSEMELLKAA

SEQ ID NO: 33097 - protein, 423 aa, unknown
  TnpB Polypeptide
MLTKNERIKATLKVTKEHRKHMKCRVYTVKLDRSHVNQDSLTRLRLLFLESKWLYNYCIGHPNVFSIDDKIKVVPLKVKDQFEMRQLRHLSSHMRQSIITRTQQNIRGLVRLKAKGHKVGRLKFKSYVSSIPLKQYGNTYKLINGKYLQIQKLPQKLRVNGLEQLPPNCECANATLLHQHGDYYVAITTYTSREHRSAMVAPAQSIGIDFGIKNQLSLSNGIRIRYTVPVTRRIKQLCKKLSRKQYRSKNWWKMLYKLLKAYAKTTNIKRDIRNKLIHFLATNFQVVCYQNENLGAWRYLWGRRMLSTSLGGIIRMLEVKVQTPVEIDRFFPSTKTCSRCGHQRLISLEERTYVCHHCGLVIDRDYNSSCVIEKEGNSILGRGPTEVTPAETNTSTLALEYLNKIAYVEASMVAETGSLTALA

SEQ ID NO: 33098 - protein, 426 aa, unknown
  TnpB Polypeptide
MNYNYRYRLRPSDALEDRLAWTVDTCRQVYNHFLHRLNRTDNTSAYSEQKLLPSLKKWWNDLKQVHSKVLQKVVQRLYDNLSTLRGRKENGYHVGTLNWKAPGEYRSFTYSQSGFKLKNTSGRTRLWLSKLGEIPLTFHRDLPDDAEIKTVTIKQEPTGKWYAILGVETPESPPAKPENPEKCVGIDVGILKYAHDTDGTAVEFPDFSDERERLERAQRALSRKEHGSANWEKQRRVVAQRHADLKRKRRDFLHKLSNYYATEYDLVAAEDLDAKGLVELPGNSRNRAGAAWGTFLRMLEYKCEREGTHFVAVDPSGTTKECASCGVSTEKPLWVREHSCPSCGFEADRDANAAWNIRSRGIKQLGEGRSESTSPEIEDFWCANESRSDSLTPVETALPVDTDSVSAKRVVEAGSPTLKREPSGER

SEQ ID NO: 33099 - protein, 429 aa, unknown
  TnpB Polypeptide
MSYNNKINFRDTIPVLKSHHFYTVLGQCFWQLKSLQSNIQNKIHFKDENNIKQRVYNYCKPFIFEWDKLHKNVLKQSNKDKKNKEYQEFINNVLIYLNDEKLFNQMKQDIENRFWEIKSNYKIPQKKELQIWVNTHLTIKIEKKEFDWFFIIDNNQKRTKKIYDDMVIPVKLSDYHKKILEGKNTKNSLNLKLNKHGKIEITVVYEEEINYPEPQPKNYIGIDIGLKRLITDSNGEFIEQNTNIINKVNKIVNKQSNRQTLEEHLKIKYNDKDFKLGNKRYLKQQARLSDYVKNNNRYKIKQYLKSHTDYHIVMEDIKLRDSKTYNKKTNYLMRRLRIQHLKQDMFDYSKKIGVEISLINPAFTSQQCSCCGYISKDNRKTQETFCCVKCGHENNADVNASINIKNRLFEKRIKLNTPFWNVKQILQMK

SEQ ID NO: 33100 - protein, 402 aa, Streptomyces sp.
VIRAYKFLLRPTARQAAALGEMLRDHCSLYNAALQERRDAYRHVSRTSIKYGQQSAQLKEIRAFDPERQGRWSFSSQQATLRRLDKAFAAFFRRVKDGQTPGYPRFKGVGHFDTVVFPKDGDGCRWDSVPHDRQTRVRLQGIGHVRVHQHRPVRGRVKTISVKREGNRWYLVLACDNVPAEKLPPTGAIVGIDMGVAHFLTTSGGEHVANPRFLQAMADQLAEAQRHLATFPKRTGQRTKAHRAAARKVATLYGKIRRQRADFHHKTARALSTGHDVIAHERLNTAQMTKRTAPRPDPAGDGAFLPNGAAAKTGLNRSILDAGWAQFLKILANKAESAGRLVVSVDARNTSRTCPECGHVTKENRATQAKFQCVRCGFAANADHVGALNVLNGAGLVLCAAA

SEQ ID NO: 33101 - protein, 348 aa, Escherichia sp.
  misc_feature (5)..(5): Xaa can be any naturally occurring amino acid
  misc_feature (188)..(188): Xaa can be any naturally occurring amino acid
LSGKXNDAFRYPQGVKLDQENSRIFLPKLGWMRYRNSRQVTGVVKNVTASQSCGKWYISIQTENEVSTPVHPSALMVGLDAGVAKLATLSDGTVFGPVNSFQKNQKTLARLQRQLSRKVKFSNNWQKQKRKIQRLHSCIANIRRDYLHKVTTTVSKNHAMIVIEDLKVSNMSKSAAGTVSQPGRNVRXANIRRDYLHKVTTTVSKNHAMIVIEDLKVSNMSKSAAGTVSQPGRNVRAKSGLNRSILDQGWYEMRRQLEYKQLWRGGQVLAVPPAYTSQRCACCGHTAKENRLSQSKFRCQACGYTANADVNGARNILAAGHAVLACGEMVQSGRPLKQEPTEMIQATA

SEQ ID NO: 33102 - protein, 494 aa, Allochromatium sp.
VQRTYHTRISDPDERLDEVLDGYAEVYGRAERALLADLARGGDPAALKSDYLIRFGLTARQFNAMAINLKGKIASIQERRAGLLEEARARIKKAEQVVAKLDQVLSQPLEAAERRRRLNTRHQKQRRLARLRARLAQLEADRADDRVRLCFGGRKRFHAQFDLHANGYDSHDAWRADWCRARASQFVVLGSKDETGGCQGCVAEYLGEQCFALRLRLPNVLCQEGDKYVRFDIRLPYGTEALVAALTLEQAISYRFQRDAQGWRVFITTQARPFEQRSDRQLGAIGVDLNADHLAVCETDRHGNPIASLTIPLVTYGLDRHQTQARIGEAIKTLMDFARDRGKPLAIEKLDFSAKKAALEAEGGRYARMLSALAYDRIVATLKARAHDAGLEVFSRHPAYTSLIGREKFAERYGLGPHHAAALVIARRALNLSERPNRRAGTARPLPVRNRGRHVWAFWRQVAREQRRMYRTGGRSTDRSRAPPTPRGTARTAT

SEQ ID NO: 33103 - protein, 412 aa, unknown
  TnpB Polypeptide
MQTTLRFRASLSDAVASEAWRHIDVLRQIRNHAVRDYYNADYNDQLSNYDQHKKLTDWADKWPTFAEPSQHAAQQAISQIHTDLDGLEERRTNGYNVGQLRWQGRGKFRSVSYNQPRRWNVDHNTGGDRFVRFRLEKIGWFNIRVNRPVPDCDEISEAILKKHKTGDWYLSLVVEVGDTPEKPALDEVGPQDCIGIDLGITNYIHTSENLTVDTLDLSDEYDRLRREQRKLSRKQHGSHNWEDQRRKVAKANRKIKRKVTDFQHKLTTWLLTEYDLVAVEDLDVKPLLEDSHNAKNKQDAAWSRFIRLLEYKADLHGTHVVTVDPAGTTKECASCGVATDKPLWVREHSCPACGHTQDRDLNAARNILNQGLKQIGAGRSESTPMQTALPASAPQREAVDAKRVVEVGSLGA

SEQ ID NO: 33104 - protein, 492 aa, Desulfovirgula sp.
MRPGVSKPADVVTIPGRIYPDEAAKERLISFMRRFQAAKRAAYQALRRGKEPGEIVKDLYRKFFPNARWCQWAVEDAKATIESQKEQVKMHVSDLEAKIEKSAEKLERTKNKLHRQGLTLRLNRLRAKLAYWKGFLDRDEVPPAVFGGRKNLLLLQEGKLSREEWRELRSNAFYSVGQTNQKGLEGQHGNANTEVVFDEVIGSFRLNIYIPPEPENKSNRKRQEEDWVTVPLEVSARYRNLLLRCLAGGGPYSVRVVRRDGRFDCLISLSLGDTAEVDKSQPVGGIDLNPDVVAVTVVLPDGNFKVSRCFWCSDLVHASHNKREWIAGNLAREVASWLESLDVKQVALEELSFAQDHDTNRLFNRITHNFCKKLLFNRITVALRKHGIAVFTVPAHFTSLIGFFKYAETYGLSAHQAAALVIARRALGFKEKVPKALLQLLGRPPGEGWVNAKLWGRLFGMFKAARKKASRYFNTRAFTPSAWVEHVFAGAG

SEQ ID NO: 33105 - protein, 522 aa, Rhodococcus sp.
MKVTKICQIADGSAVDFEELNRLMTVFYAALRYSFNRLLEGEQSSKLIKSISALFHLNKRYAEDAVMQAQATILSQKELLPLRIQGVQGKINKTCMKLEDYQTGRKRPKKVPIETCLKGLSARLEKLKVKESVLLKHQEDQTIPTVIFGGKKNFYERLKGKISSNEWKDLRSNTLYSRGDKSKMGNLNTRIVFDEVEQQFFIEVANPLLVEGRKRSPRLRFKLHVPDKYFDDVVEVVLPNEVGVTSKNKPMEEYIPYSIELKRKNSKIFVHITYEEVVHGSMLNWNEKIQSDLLAGIDVNIDRIAVSILTKQGNLVESKTFYCHEMEYVKSNRRSNISGEIAKEIVQYLLTWNVGAIVIEDIKLKQDHDTNKRFNRLVHSFAKTKLQKAIISRGIRFGFKIKKVNPAYTSVIGRFKYSKKYGLSVHEAAAFVIGRRGLGCDEKIPQGILNQLRTLVKPKLISILGSMEESEEKSKNGKQRRKYLGMLLKNMEVFKENHSWKLWNVIHKTLTIKNQELQLKEV

SEQ ID NO: 33106 - protein, 299 aa, Rhodococcus sp.
MSVCGSQNFLQYGIIRTNIPLEGEVKTMLINKAYKFRIYPTEQQEILIAKTIGCCRFVFNRFLGQWNDKYKATGKGLTYNSCSAELTQLKKELLWLKEVDSIALQSSLKNLADSYTRFFKKQNKSPRFKSKKNKVQSYTTKETNGNIDIAGNKIKLPKLGLVRFAKSREVDGRILNATIRRNPSGKYFVSILAAVEAHPVDKTGSSVGVDLGLKNFAILSNGEVFGNPKWLRASDKKLADVQRILSRRHQLSLKRKCKLDDAKNFQKQKRKVARIHEKITNARTDYLQKISTKIIKSPM

SEQ ID NO: 33107 - protein, 410 aa, Rhodococcus sp.
MSVDGSQNFPQYGIIRTNIPLEGEVKTMLVNKAYKFRIYPTEQQEILIAKTIGCCRFVFNRFLGQWNDKYKATGKGLTYNSCSAELTQLKKELLWLKEVDSIALQSSLKNLADSYTRFFKKQNKSPRFKSKKNKVQSYTTKETNGNIDIAGNKIKLPKLGLVRFAKSREVDGRILNATIRRNPSGKYFVSILAAVEAHPVDKTGSSVGVDLGLKSFAILSNGEVFGNPKWLRALDKKLADAQRVLSQRQQLALKRKCKLDDAKNFQKQKRKVARIHEKITNARTDYLQKISTKIIKNHDIIGIEDLQVSNMLKNHKLAKAISEVSWSQFRIMLEYKAKWSGKQVIAVSKTFASSQLCSCCGYQNKDVKNLKLREWDCPSCGAHHDRDINAGQNLRDEAIRILTVGTTGLA

SEQ ID NO: 33108 - protein, 383 aa, Archaeon sp.
MLATKYRMYPNKEQTKKLEFALDTCRQAYNMMLGELNNQIIIDRNMIQAMLPDLKICEPRFREVYSKTLQYECYKLFSNLSALKVLKGNHKKVGRLRFKGKGWFKTINYNQSGFSLENNKLHLSKIGNIKIKVHRDVNGNIKQIQIKKGIDRWYAIIITDEKKQIFCGNRIIGIDLGINNYLVDSKGNKTENPKILEQNLSKLKHLNKELSRKKKGSNNRKKARKRLSKLHLKITNQRTDFLHKITTNLVKECKTIVMEDLNIKQMSQQKYFNAKNRVDASWGKFTQLLNFKAESAGCQIVKVNPRNTSKTCSQCGRIQDMPLYKRTYECAECGFVIDRDYNSAINILNKLAGQELSGVEKSTSVPLEQVGSMKQEALSLEVG

SEQ ID NO: 33109 - protein, 510 aa, unknown
  TnpB Polypeptide
MKEQILSYELTLPQRIYPHLERLFSVFKNQVNSYIPKLWNEEGFKLLSQKSHAWGILKKEFPTPIGLPSRVFRNVLELTGQIIRSQIERKEVFEKLLRREEIKGYDKRFVLNVQRQIERLKKKGKEVNSYFDLPCPEFEGQVIVTSADDNLEKGQFRRVKIDGNFITIELKVPTPEGWKWIRVKKFLSDRIRKALRKVKDIQVPLIKKERLKSGYTIYKLVIPLTFEVEEPKKVERVLGLDLAPSEERLGIGVILDKEFVSKPIFFTTDLIRKTERIYKEISHLERKIDNIYKVITGTSSKKEKQRLLKRLNHLFGEQKRRLMKIREIRKQVLENFINLVVAYAKAYYCQAIAIEKLDFEKIPDWKDKKALRLFVQWFYSRFTKRLEEKARINGLKVIKVNPAYTSKICHKCGKEGELEGLVFKCSCGKYDRDYNASLNIAKRALHPTKPEAQGAEGIPGRIPSRLVRMEGSALLTMISLFKLLAWLKVVHTCYLKPQKLFKWIRSDKYG

SEQ ID NO: 33110 - protein, 520 aa, unknown
  TnpB Polypeptide
MKRAKTPTFLLELPLAADPGQARHLRAHFEAARCLYNALLGEALARLNRMRADPAWQAARALPKTQKQERAAAFSHLRQQYGFSEYALHEFAKEANCTWIADHIDAVTAQTLATRAYQAVNRVCLGKAKKVRFKSKGRGLDSVENKQEKSGLRFLLQPPEEGNQGWLVWGKDRLPAIIDWEDPVVKYGLDHPIKYARLVRRKASSPRAKGADCQGYRYYVQLALKGTPYQKKKNKPGHEVIGLDLGPSTIAIVPREGEARLVPLCEELRPDARKKRRLERKLDRQRRANNPQNYDEKGRTKKHGKHRLTWKNSKRYLATRRRLAHQERKLAAHRKSLHGRLVHEIIRVGNDIRIEKVSYKGWQKQFGKSVGLRAPGMLIDHLKRTVANTGGILHEFPTRSTKLSQYCHGCQTYVKKPLAQRFHDCTCGVGPVQRDLYSAFLAAYLDPPDFLPSSAQYCVYWEGAELRLRAALERLQQRAKEGQVVPRSVGITGAGARLPQSLVSFHQGLVYRRGRLEELE

SEQ ID NO: 33111 - protein, 424 aa, Ktedonobacteraceae sp.
MYLVEQYIIHRSDPRYAVLDAASFASKNLYNAALYEMRQAFIHHGKRLYYTAMDKRMQPHETYRALPAKVAQQVLRQLEQCWTGYFEACQAYREDPSKFTGRPKLPKYKDKVNGRNLLVYTEQAISKRALKEGLLHLSLLPVSFKTTRTQIQQVRIIPRNGFYMVEVVYNQEPLQAKVNPAYYAGIDIGLNSLVALASNKPGFVPLLVNGRPVKSVNQYYNKRRAELQQQLGRPGTTKHMQRLTNTRTRRIALYLHTASRRIIDRLVQEGIGTLVIGKNDGWKQEANLGARINQHFVQIPHARFIEMLMYKAELVGITVLLTEESYTSKASFLDRDPLPKKNLNKKAKELFSGKRVKRGLYRASENRFIHADVNAAYNIIRKVAPHAFVAKGVEDGGVVTPCVVHPVRIVVPLRSQRSKRSQDR

SEQ ID NO: 33112 - protein, 372 aa, unknown
  TnpB Polypeptide
VTKRAYKYRFYPTFEQENLLAQTFGCTRVVYNQILRWRTDSYYQKQEKINYKQASARLTEIKKLPELEWLNDVSCVPLQQCLRHQQTAFKNFFEGRAKYPTFKKKSHRQSIELTKSAFKYRNDSIYIAKSKEPLDVRWSRGLPSEPSTITISKDAAGRYFVSCLCDFEPEKLDVTPNMVGIDLGLNHLLITDSGKKVGNPRHTKKYETKLAKAQRRLSKKKLGSANRAKAKAKVARIHAKISDCRSDNLHKLSRKLINDNQVVCVETLKVKNMIKNPKLSKHIADASWGEFVRQLEYKAEWADRSLVKIDQFFPSSKRCSCCGYTNDSLPLDVRGWKCPECDTHHDRDINAAKNIKAVGLTVLALGENVSAA

SEQ ID NO: 33113 - protein, 519 aa, Tolypothrix sp.
LQAKFKVNKRWANSIYTEVQGIISNIDENRANHIKIIQGQIKSIKSALKKCEKPIKDFAKTEQKQKSSCAKKCKRFSDKNLKIKKACHLWARERQTTQLQDAKLGLHQKKRRLNLLENQLKHLTNTKPSYTLPENSAFVLVGSKDESSGNQSAQFDYVESSDKFVLSIRTPYALEERLGEQYIRIDGLNFQHGKHELIEAISPRCYQVKTKDKTLKWEVGYSAVTLRFYRKNDCWYVAATTDITLPEITSEYLAGYVGIDLNADSVGWAVCNAQGNLLEFGDRKIDLHSRSSHQREAILSDAATFIALKAKQYNLPIASEKLDFSGKKAQLREKGNKYARMLSSFAYSQWNDALDNACQKHGIYHRKVNPAYSSLIGLTKFMSMYGMNSASAAAFVIARRGRRFSERLPQHHLLPSKSAYPTRKHVWSHWSKVAGCVKGTPRHKYFTARLNRIRKVTPFCQLACLVSQHRQKGNPIQLELFEVGATPTGIGTVSVAVPPRRRQDKRRLPTFTQICLDFN

SEQ ID NO: 33114 - protein, 301 aa, unknown
  TnpB Polypeptide
MSLPGEPLRYRILLHVRVSQPIREYTAIQVDWTNRTVVFNNTPTPVKHEPTGRAVGIDRGCVHAAADSDGRFMDLPKDRLKAIDREIRKRQKSQARRIGNAGYSSEREYVASGKISRAYRKTRLETPSVEESAGMTDADWAKLGNDFMQRMGLMNHQYIIVKHSGTEKNSRQAHLHILANRVSLSGELYKDNWIGKRATEAANSIARERNLVQSKDIGKANREEIKQAMDGILARMQGFDLAEFSRELEKLGFRVREARASTGKLNGYYVTSRSGTEYKASEIGKGYTLAHIEKTQKKLKV

SEQ ID NO: 33115 - protein, 545 aa, Pseudoclostridium sp.
MAMRTITLKLHKPGARKRRIIDEAIYNYSRAYQYLLDKARKDIDNLRKNYKDEKGRYRTTVISKWVDKNTARELNRFDIEPFKDSLIMDFGMTMASYLALKELKSDAGFPVAYISPGRWEQEYEQIFSEFEKGQRSEAEFEKIVSKMAKKSETLKPLFFCRYDTKRDYCLLYDEMKNRYYVKLYLMNARSENRKEINCRKDRVLRYIFKGGKELESSRRKERYLLVPLSFGKWQEAYLKKALENPSILKTARLSKKGEEYYLSISVDIGDCEAVKTENYLGVSRGIKNVLNFAVVNREGEISDKGGIELEKTALKFCPKNGNALAEGGKISSGDLHKLANMIVEKALESKAQVIVESLIDRGDLIKWEDENGRLCPSAISCYAYNRIVEILDYKLPGAGLPPPVKVSPAGIFYTCPNCGLRSKDNRFSKDLLICIACGTAAAVEEAGSLNLSKKLIKYKKEMLKIKVKRMPEGMIFLNEDIGLEFAPTGTKDFLQEFKEEIRRMAEDLKTKKYVNRKDKGFRKKYSLIKKLEECENFSDIIELEI

SEQ ID NO: 33116 - protein, 235 aa, Okeania sp.
VGIDLGITSLLTTSDGEKVANPKNLQKLHKKLRLAQKSLDRKPDKKSNNYQKARLKVAKIHAKIKDSRLDYTHKLTTQLIKENQTIVVEDLAVRNMVKNHKLARAISDANWGEIVRQLEYKAEWYGRELIKIDRYFPSSKCCSNCGHIVEKLPLNIREWDCPECGCHHDRDINASINILAAGLAVSVCGATVRPSEIYSQKAGAMKQKALNSDVRESRAVSSEQRREDVNYLTKT

SEQ ID NO: 33117 - protein, 440 aa, unknown
  TnpB Polypeptide
MLTEKNDKIRNKGCETRNKRKAQTAKSFEIKLDKSKISKEKLNNLQRLFLEGKWFTNYIISKGITDSVPYKDYKVDKVNIKVKDKFEERELKVLSSQMKQYIIKRLQNNVKTLYELSKKGKKIGKIKYKKSLHSISLMQYGNTYKLDKETKTIHIQGIGDFKAIGLEQIPDNYDITTATLIERNGDYFLHVTVYIPKEEKVHNKKAIGIDLGVKDQITFSNGIKAKYSVKMSDKTKRLYKVFSRAQYNKETKESSKRRQKILVKIKKEFAYENNQKKDINNKIAHYVAANYEFVAYQNDPIYSWQRLFGKRIYQTSIGGFRDTLKRKVSTPLEVNRFTKTTGICIYCGYSLHLNLSERMFQCPSCGHVQDRDVSAANVSMKEGLSLWNVGETLVDDNTSTSSMLEYLKNIPHVKASISNETRSPKQMDVAYIEAPSVRVG

SEQ ID NO: 33118 - protein, 403 aa, unknown
  TnpB Polypeptide
VKHLYSYKFRLQPTTQQEVLLNKHFGCVRWVYNHFLNERIEEYKTNKRSLRRSDNEKELPILKTEYTWLKEVGSQSLQYSVECLQNAYNNFFRKCKQKVKGKKGFPRFKKRHGKQSFKIKQNIYLVEGKLAFPKFLDGIPIIQHREVEGEIQFATVSKNKAGQYHVSITVSREMPQLSLTDKMIGIDLNVMANVDSDGNAEPNPRPARQYQARLKLLHQRVSRKEKGSKNRSKAKKQLAKLYLKVTNKREDHLHKLSRRIINENQVICTEDLSVESMLAKVSPDERDEPRYKERKRHRDIQDCGCSSFLNKLKYKAEWYGREFIQVSRWFPSSQLCNHCNYQNKELEPNEKEWTCWNCWEHNDRDRNSAKNILEEGLRIRTVGTTGIAYCPDVRPAMSGLLVG

SEQ ID NO: 33119 - protein, 401 aa, Oscillatoriales sp.
MLVLEYKVKAKPSQYRAIDEAIQTVQFIRNKSIRYWMDASREDKIDRFALNKYSTKLRQEFAFVKELNAMAVQAAAERGWLSISRFYDNCKKKKPGKKGYPKFQRSNRSVEYKTSGWSLIPTKRRITFTDKKGIGELKLLGKWDIHTYPVVAIKRVRLVRRADGYYCQFCVDVECRDIQPLSGKEIGLDVGLESFYTDSNGYHEPNPKFLRKSEPDIKHAQRRIYKKQKGSNNRRQARARYSKKHLRVSRQRNEHAKRLARNVCKSNDLVAYEDLKISNMLKNHCLAKSIADASWYLFRMWIHYFATKFGKLAVAIPPHYTSAECSQCKRVVRKSLSARTHVCVCGCNLHRDTNAAINILLKAKSRGGHPQSNAGGVVTSTLLGATLVEQVATVNLESPHL

SEQ ID NO: 33120 - protein, 584 aa, Blautia sp.
  misc_feature (551)..(551): Xaa can be any naturally occurring amino acid
LKLFINIYEVRKINRAVKIRIYPNAEQRVQIEKTIGCSRFIYNCMLADKIEHYKKEKKMLRNTPASYKKEYPWLKEVDSLALANVQMHLESAFCKFFREPSAGFPRFKSKKSSRKSYTTNVVNGNIFLEGKYLKLPKMTAIRTKFRRPISEKWKLKSVTVSREASGKYFASLLFYCENQAVEKRPVEKFLGIDFAMHGMCVFSTGERAGYPMFYRNTEKKLAREQRKLSRCQRGSRNYEKQKKRVAEVRKINRAVKIRIYPNAEQRVQIEKTIGCSRFIYNCMLADKIEHYKKEKKMLRNTPASYKKEYPWLKEVDSLALANVQMHLESAFCKFFREPSAGFPRFKSKKSSRKSYTTNVVNGNIFLEGKYLKLPKMTAIRTKFRRPISEKWKLKSVTVSREASGKYFASLLFYCENQAVEKRPVEKFLGIDFAMHGMCVFSTGERAGYPMFYRNTEKKLAREQRKLSRCQRGSRNYEKQKKRVALCHEKIRNQRKDFQHKLSAGLAENYDAVCVEDLDLKGMAGGLHFGKGVHDNGYGLFLSMLEYKLEEXGEENKPGSKNKNLSKCRTTCADRKNNRLQSIYL

SEQ ID NO: 33121 - protein, 404 aa, unknown
  TnpB Polypeptide
MKVIRIEQQAITKRHQKWLFINEMCKHTKDLYNYANYLIRQEFVQNKKYIQYKELNFDLKSNELYKFCMSQPANCVLRRLDKNWKSFFKAIKDWKEHKEKYNAMPKLPKYLKKDGRFVWEIPNNACYVVGDELHFRIRKLQDIKWKTKAKGRLLQVRFVPRGNDYVMEVVTEVEIEDKPKREISRVIGMDLGVNNFVTITNNIGEQPIIINGKGLKSINQYFNKKRAYLMGRTIHRNKINWSNKLDRLTNKRFNKVKNFMHHASKFVIDYCRLNNIDTIICGLNNLWKQRVKLGSSTQSFIFIPYNMFIRQLTYKCEEAGINFITTDESYTSGTSFLDNEEPIKENYNKKRRIKRGLFKSNNGTLINSDVNGSLQIIKKVAPNAFADGVQGYLTPAIINVANAI

SEQ ID NO: 33122 - protein, 418 aa, unknown
  TnpB Polypeptide
MLLSKKTSIKVSREYANLIGHMCYAASKLWNVCNYERQHYKETGIEQYPDWYYQKKAHKEDLWYKQLPSQTAQEVCRLLDKAWKSFYALKRSGGIETPRPPRFKQESIPITYMQMGIVHERDTGRVRLSLPKALKKYMEETYQIHENFLYLENKIFRGMDQIKQLRIYPPEKGSCKIIVVYEVPDQEELPQNGHELSIDLGLHNLMTCYDSGNGKTFILGRKYLALERYFHKEIARVQAQWYGQQSGKGVKHPVTSKHIRKLYKRKQDSVTDYLHKVTRYLAEYCREQGITCVVAGDIRNIRREKDLGHRTNQKFHSLPYNRIYIMLEYKLKRYGIRFIKQEESYTSQCSPLSPKVGKRYAEPSKRKERGLYRDGNRTYNADAVGAYNILRKYHSVSGVKRELSVTGLKTPEIIKVAV

SEQ ID NO: 33123 - protein, 239 aa, Streptomyces sp.
VNLPLALSDGNHQDHGRPPRLPDGTADRDKWLNPDEKAKLLRLEQRAAHRKSFRKPKERSSNRLRNTYDQINQLRARATRRAVDWQHQTTTNLARTYGTVVVEQLNITNMVKSARGTIEEPGKNVAQKSGLNRSISQEAWGRTVTMLTYKTARHGGTLAKVPAPNTSLRCSTCGFITPGSREDQATFVCKNPDCGWEGNADHNAARNILHLYRMGHALIPAAGRAVVRRTRGAKPATAR

SEQ ID NO: 33124 - protein, 508 aa, Scytonema sp.
MPRSTKPSFVLELPLKVNSKQDSELQARFNGAMRLYNNVLSEAKARMELVRKSEVYQAAKKISRNQKKERSEAFNKAREAYRFTDYDLQSYANKAAKDSKWIAQKIDAQVQQKLATRAFKAVERVLFGKAKDVRFKVESRFRSVEGKTNKQGIRWKDNCIVWAGLELLAIIDFNNEVIRHGLSCPVKYCRIIRRTFGGKRRWFVQIVLEGTPYQKPQNYVSDGLIGLDLNISNIAFVADNHADLLPFADRVSTFSKEITKLQRQMQRSQRANNLDNFEPDFKARKGRKTVVKKGKVKKGKAQWKKSSNYLKTQAKKQELERRKAAYAKSQNRRVVNEILRHGKHIKTENISVKGWQKIYGKAISAKSPGFVQSELKLKAERAGGSFTKFSTQKTALSQTHLDGSRIKKSLSERVHRDVTGIAEHHRDLFSAFLSRSVNQNQLMLRDAKEQYLRLEPVLLEAHQRYLTRKQVSESQSRQSDSPSERVSNESLIASQIAESGEKLVEDVA

SEQ ID NO: 33125 - protein, 395 aa, unknown
  TnpB Polypeptide
MLKSYKYQLKPSKEQEELLEKHFGCVRFVYNLALEATKLAYQTGFNYGTYNLIKELPDLKKDLPWLKEVNSQSLQESILNLDKAFINFYKGRSNYPKFKSKKSRSIFQVPGYVSINFEENKIWIPKLKKVDFYPDKRRFNGKIKICKVFKTPTGKFFISILVDDFKKLPLKNTIKEETTIGIDLGINHFAILSNNEKIINPRFKTKKWGKIKRQQKSLRRKYVQGNEVQSNNYYKQKLKFLKTHEKITNQRKDFLHKLSTLIVKKYDSICIEDLNIKGMITPCKPKTDENGKFLPNGQARKRGLTNSILDAGWGLFTQMVTYKCEWYGKNLIKVNTFYPSSKTCSNCSFYYKNLKEQKTWVCESCNTLHDRDINAAINIKNFGLRTQPLFAKAEH

SEQ ID NO: 33126 - protein, 391 aa, unknown
  TnpB Polypeptide
MFKRIKVQIYPTKKQEVILQNHFDGYRFAYNLCLEYKKKMWGWYKVQLDDRDIEKELLKLRHELPFLKKCKSECIRQASIEVYNSYKQYYKNCGFPKFKKKESKQTFSSDQTLSIKNNKLKFFKSYYKFKTSDKYLEKLCKNKIKQCTFTKTSSGKYFASLLIEDSEIKILPQTNNIVGIDLGIKTFVTTSDNETFENLNLLKKQKYKLVKLYRKHSKTKFHGKNREKLRIKIAKTHEKIVNQRTHYYHQISNKLISDNQTIIIENLRVKNMVKNHKLAKSINDVSWSIFTEMLKYKSEWYGRELIRVDTFYPSSKLCSNCGNKKETLLLQTRIYNCDKCGFSLDRDLNAAINIRNQGINIKNSGIKIPEVSTEGVGYEPNEVESKHFINN

SEQ ID NO: 33127 - protein, 461 aa, Moorea sp.
MKSTIQYRVYLTQGQKIEANYWLRICRYWYNRQLGDRFDWWKNNRNYVNACPLICSLAELRDKPSRYSQPSDLPRLKKDLVKVIHSGELLDFTRLDSTVLQDVCKRADDAFKRYIYGDIKGLRSGKPRFKNQSSYRTMVFAMVKPKWIHLIRKDWLYIKLPKLGMLKVRMHRPIPAGAILKRVSLTKKADGWYINLTIEDPTVPEIKTEQVIPTWDNSLGLDAVLEGDNYIATSENQKYKSAKSLRKSLPRLKVVSEKKSSKRKGSRPRRKLAKRESRIHQKIARTRKDHRYNLAHELVKTGKKVFFPENLNLKGLTRRNKPKRSADGTYLPNGQSAKSGLNKSWQDAAFGEFLTTLDYIASKAGAVIIKQKPAYSSMILSYRNEIIFTDCSIREYYDPVEKVLVDRDVNAAINLKRLGLGVFPSIKRRSGKLVVSGDMDAIYHEANRVYPERRHEHFFAS

SEQ ID NO: 33128 - protein, 419 aa, Moorea sp.
MILTYCYRFKPSPEQIATMEWWLELLRRHWNYALGQRLNWLHRTRSPIDRCSLVSEPIGEIPEPVSYYTQQAALKETKRLFPEYKKIYAETQQVNLQRLNKAWDRWRKPDASGKRGGRPRFKKTGELRSFVFPRVNSSKAGAHLIDGVLKLSRIGSMPVIMHRPLPRGFTLKQCTIVRKADGWYCCLSMKDDTVPEILPIDSVKTAVGIDVGLEKFLTTSDGEAVSIPKFYRKAQDKLAQAQKVMSRRVKGTKNWKKAKHKVALLHLHLTRCRKEFHYQVAHWLCNKYDLIAHEDLNIKGLARTKLAKSIHDAAWGAFLEILQAVAVKRGLLVEEVNPRGTSIECFNCGSRVEKSLSERVHCCSSCQVKIDRDWNSGINILNRGLMAVGLPLNGCGKSIQDIEEQQVSYVSLRSPHHNL

SEQ ID NO: 33129 - protein, 492 aa, Moorea sp.
MPKQKKTGAAKKLSTQVVPVIGMTESVKTELLSTMKKLGVVRSESYNKLGSINYWGIDWKKSFREVRTFRNPESLGLPSKLMDWAVCDVAKAISAQQAACIEEVVKKIYRRFPGTENKSKRKELCKQLKTLAFLDSSLLHRWVRKEYQRGHSWVRNQIVYQSPGYKCKRLSRNTYQLELAGLNRGKRNKIVVKSNRKIKGQIRLIYNQLLQRFEVHFLVDHGTIEIPAERRSIGVDKGYTEAFYDSDGQAHGKGLGKVTTKKSDRICAKNRNRGKLWALHRKLEKIDPAKSARILKNNLTRKTENRRYRQNPTELAAIIGAASKSLFDGESLKVFAEDLTQPIKNKRQSKAMSRKLNSWMKGKMRDSLQKWANWTGSVVTEVQPSYTSQVDSVTGTLLGKRSGDNFTRFNGVVLQADHNAALNILARGTDKEITRHMTRGEVQAVLLRRTARYLEGMGLSLLDAVELDWLDPKHRKTQAFKQLLHVTGGTSR

SEQ ID NO: 33130 - protein, 410 aa, Anabaena sp.
MRLVERHIIKQNHIRFREIDKMSFFSKNLFNCAVYLCRQAFFSGQPIPTFNQIYHSLKNTDDYQALPSKVAQLVFKQVDKCFKSYQEAKKEYQLNPDKFLCEPKLPKYKHKLRGRNVLTFNNQAVSKKALKQGLISPSGLPISIKTKLTQIEEVRIIPKNNVYILEAVYEQEETTPEVNNRIAAIDIGLNNLATVSSNCLDFQPFIVCGQAIKSCNQFYNKVKASLQSQLPKNQKAQSQRTSRKIEALTLKRNNKVDYYLHTASRFIINQLVSQNITHLIIGKNENWKQNINLGSKTNQNFTNIPHARFIQQLEYKAKLVGIKVQIAEESYTSKCSFLDFEPIKKHEQYLGKRVKRGLFKSQSGKHYSADLNGSLNILRKVVGDSIFDRNSVERLVVSPVRCKPYQARNI

SEQ ID NO: 33131 - protein, 390 aa, Xenorhabdus sp.
MLYAIQIRLYPTAEQRNFFAKTFGCCRWVYNDALAFCQQQYDAGEKRPSGYDLVNRLPLLKNEHGWLAEADSQALQYACRCVDTAYKNFFRRVKNGETPGFPRFKSKHRGDATYTATAAAGIKLTERQLKLPKAGWVRCRGFRPFDGKIKRATVRQTPTGKYYATVLIDDGRDFPAQPTVDLQPIGIDVGCKTEGAVHQFAALSTGEIVHSPAAYKLIQKRLRRAQRKLARKQKGSANRLKQKRRVARLHERTTAVRRDFLHKFTNRLTRENQAVAVEDLNVKGMMARPKPKQDENGNYIPNGASRKSGLNRSLASVSLGEFFRQLEYKSMWRGVAFLKIDRWAPSSKTCSVCGNVNNELILSMRQWKCVCGAEHHRDINAAINIAAMAV

SEQ ID NO: 33132 - protein, 279 aa, Methanomicrobiales sp.
VPKRKPLAAIRYNQRVITVNLVHGLATIASVKGRIKATLPISEYHRQYLSWTVKSSALSYDRRTKVFSLHVSVEHPDVPPVPEGKVLGIDRGIVNIAVCSDNSFYNANRIKNVRAKYAHLRNELQSKGTRSAKRKLRKIAGRERRFVTDTNHCIAKQIVNSGFTAFALEDLNKIRVRKRRGTSFNRKFNSWAFYELEQFLRYKAEAQGKWVYRVDARYTSQKCSVCGHTYKGNREGSSFRCRKCGFQLHADLNAARNIAQAGISCLSRLSVNQPNVTHS

SEQ ID NO: 33133 - protein, 394 aa, Dielma sp.
LNKKLIQKTEKRMNRIGMKIREKETELEKVICEKEKMIRKTKLHGTTEKDYLYEATVIDPKIKNLKNQIKLLKYRLTGEKQKKERFMEKPKSVCFGGRKNLKHDMDTYRYNRRKRMLICGRRQGKYGNNLFKYHIDEGVLVYRGIRQEIRMPVVFHQHREHIERAVRMKHNTPGKAIAYELYDHGEYFIIKAIAEYPGEPVLPSGRGSIGMDINRDHIALAETDRKGNLVKAWRIPLKERGTRNQREYERYVAVKRIVEECAGKKKNLIMEDLEFERKKEESLYRDRNYNRMLGTFAYKRLEEKIERKCMEKGVYLRKVDPRHTTQIGKLKYAKRLGLSIHHSAAYVIARRGEGYRERIPNEYHEYREWKEVIRDLGKATLEECQRTPYLCLFR

SEQ ID NO: 33134 - protein, 543 aa, Streptomyces sp.
MNKKLRKLAAPFVVPGPSGVAIRTRLKRLTAADEEVLRRVGAHLGALAGRDLKARCHDGLEHDAQAWAVRKRDLTPLSSARWAGSITKATHDQWALARRGALAHLQNLQAGVQTLRHRLALPLGAKGSKKAPGGYRSRREWHAKARRLRVLEDRLARERADWQAGRVRVVRGGKRLSRMRHQLPAAQLTQAQWRARWEAARWFLRADGESGKRYGNETIRISPDGEVSIRLPAPLAGLANAPYGRYVLTGRAAFAHRGQEWADRVAANQAIAYRIHYDVDRARWYVTASWQTPASPAVPLAAALAHGVIGVDINADHLAAWHLDVHGNPTGNPRRFCYDLTGSAQYRDAQVRHALTRLLHWARTCGVKAIAVEDLDFTAEKTREKYGRNRQFRRLIAGLPTGRLRARLTSMADRTGITVIAVDPAYTSKWGAQHWQKPLTSTTRKTSRHDAAAVAIARRAQGYSLRRRTAPPRTHRSDGCGHRTVQAGLDTRGREEPRRRLPGPRTRSVPPDAERTRATRTPHTVRGVRSERERVQDSLPLTD

SEQ ID NO: 33135 - protein, 423 aa, unknown
  TnpB Polypeptide
MRLAYQYRLLPTAQQSAEMDRWLNMLRHAYNWLLADRFDWYEQNRCSINACPLVCSIAEPRDQPDYYSQKRGLVLLKRERPWYADINAQVLQDMVKRVKLAFDRYLKGDSNGSRSGKPRFKGQGRYRSFAYPQVEAICIQGNRINLSKIGTLKLIQHRPLPDGFDIKTAIISKKADGWYVTLTLEDKAVPEFASDLEPCWDNSVGIDVGLEKFASDSDGNFEPIPQHFRKSEEKLARLQQKVSTAKKGSRARKLLICKVAKLHQKVARQRKQFHFEAAGKILSKADVVFVENLKVKNMSRRAKPKQDETGKFLPNGQAAKSGLNKSIADAGWSQFIDILTFKAEKAGQRVVKVDPYGTSQHCAVCLNKVPKELSERWHSCPHCGNEMDRDTNAAILIKKVGLGIASLKNAQRASARREARAVS

SEQ ID NO: 33136 - protein, 394 aa, Gemmatimonas sp.
MIARRVKLRLNQAEEARLEAWFAVGTGVWNWAFGHYLRADRDWVRGCRLTPPPAWAPGAKSPQWVQAMPGGVGPSAFALHAQLNGVGARLGVNQHFLRGLVDDVAGAWADYRAGEKGRPKRKGQRNRLFSLPFKSGVKLLDAKHLRIPSFGVVRLHDQKDLPALCGLEVGVNRIKCARLMRVRRGWYLTLFIDAPPRTVTVVDHAVVGVDLGYSTLAMLSSGEKIPHPREYQRAERRIGQAARGLNLALLGALQQRLANARRHRNHEISRDLVARHATIYLSKDNLKGLQRTFGKSVLSAGHGELRGMLASKSRQAGRVYVEVSSKQSTRRCHCCGALSGPHGVAGLSVRVWECVACGARHDRDVNAACNALLTGIGSMPQPGAVLALETAGNG

SEQ ID NO: 33137 - protein, 408 aa, unknown
  TnpB Polypeptide
VSDVLSLCERHIIKPTNPLFLECDNLAFLAKNLYNSTLYYQRQSLFDSDFQNYYAVNREFTHTNQPDYRALPTKVSKQVQMLVDRNFKSYFALVKKKTAEGYSPKVKPPKYLDKTDGRFVVPYPKDALSLKVEGYVKLSKTSIMIKTNVPKEDIRGARIVPKGNHYVIEILYRVVSRPLRSELSKRVAFIDPGLNNLITVTSNCFNPILVNGRPLKAINQLANREIAKLKSKLSAQDLYMFPLLQSVYSKRERRITDMLHKITTQLVNHLDSYNIDTVIFGHNVGQKQDINLGKVTNQNFVQIPFTQLIAQLQYKCQLRGIKFILTEESHTSKCSFLDKESVEHHEKYKGKRVKRGLFKTSKGILINADVNGSLNIGRKYLTKLGFYTDELHYSLTQFMVNPKLVKFS

SEQ ID NO: 33138 - protein, 387 aa, unknown
  TnpB Polypeptide
MLVNKAYKFRIYPTIEQEILIAKTIGCSRFVFNYFLSAWNDTYRKTGKGFTYDACSSQLPKLKKEYEWLKEVDSIAVQTSVKYLSDSFRRFFKKQNKAPRFKSKKNPVQSYTTKQTNGNIAIINNKVKLPKLGLVKFAKSRDVEGRILSATVRRNATGKYFISILTETAVYDLSKTKSAVGIDVGLKDFAILSDGTVHKNPRFLRSLERKLEMEQRKLSRRYEQAKKDGKPLHEAKNYQKQKVKVARIHEKIKHARTDFLHKLSTDIVKNHDIIGIENLQVSNMIKNHKLARAISEVSWSEFRSMLEYKAKWYGKQVVPVVSLSAKTFPSSQLCSCCGYRNKDVKHLALREWKCPTCHTHHDRDLNASKNIEAEAIRLLTEGTSGIA

SEQ ID NO: 33139 - protein, 357 aa, unknown
  TnpB Polypeptide
MTSEYELVSMVRYHPCYTNFIAHSAQQTIKFLVKNWKAYLNAKKEYKKNPTKFLSPPRAPKYKNKRGFHTIFFTANQVRLKEEGWLYFPKRLGLKVKSRLEEGTKINHARLLPRGTCFILEIVYEQELETVKSHSSPKTTNIIAIDLGVNNLLTCVSNVLPPFLVNGRKLKAINQWYNKECSRLQSIYDLQGVDEYGQRMKKIIDKHYQRVEDYLHKASRIVINECLDHQIGTIVIGYSKKWKQKSKMGKRNNQSYVNIPFLNLVRKLLYKAEEVGIEILLTEEKYTSKCSFLDNEPIRKHSKYLGRRKKRGLFESKTGVLLNADCNSAGNIGRKVFPLVFTYGTVDAVSHPSCLTV

SEQ ID NO: 33140 - protein, 258 aa, unknown
  TnpB Polypeptide
LKNPVRDAKLVYRRDCREFYLHITVLMKIPEPSGSNPVGVDIGINKLLVASNGFSVNGKPIEHRRRHFRKLRSSLQSKGTSSAKRKLKRLAGRERRWVNTVLHQVSRAFVNSLVAGRDFVVMERVEGIRQRCKQRKEQRATFHSWAFRRLQQMIEYKCLERGIPVVYVEPNYTSQRCPRCGTIDKRNRRSQALFRCVSCGYQHNADYVASANPSVRARGGWAPVNVPNGGVPHWNPLQAPSIRGVVDEEANGSERLSF

SEQ ID NO: 33141 - protein, 402 aa, Escherichia sp.
VKRLQAFKFQLRPGGQQECEMRRFAGACRFVFNRALARQNENHEAGNKYIPYGKMASWLVEWKNATETQWLKDSPSQPLQQSLKDLERAYKNFFRKRAAFPRFKKRGQNDAFRYPQGVKLDQENSRIFLPKLGWMRYRNSRQVTGVVKNVTVSQSCGKWYISIQTESEVSTPAHPSASMVGLDAGVAKLATLSDGTVFEPVNSFQKNQKTLARLQRQLSRKVKFSNNWQKQKRKIQRLHSCIANIRRDYLHKVTTTVSKNHAMIVIEDLKVSNMSKSAAGTVSQPGRNVRAKSGLNRSILDQGWYEMRRQLEYKQLWSGGQVLAVPPAYTSQRCACCGHTAKENRLSQSKFRCQVCGYTANADVNGARNILAAGHAVLACGEMVQSGRPLKQEPTEMIQATA

SEQ ID NO: 33142 - protein, 464 aa, Halobiforma sp.
MPLPQRAPKARAGRGYSVPRTHRFLVCERDAKRLVNAARVSWTVLQQARRAHAIGSFMFLLQAVAGCHYQSCPRHRSVRRRRVDHALQLQVSTQLDRRTPRTVSVDCRYLPTGLQPLYPPTQPRGRHVGILRAVGSSRPQGLVDRPETSPLEGATEGRTAAVRQPLDAEGQKDNGYRVGERNWKAPKEYRSFKYSQTGFELKNTSGRAVLSLSKIGEIPMVYHRDVPDNATIKEVVVKQEPTGEWFAVLGIETEDDAPPRPKKLEDCVGIDVGIKKYAHDTNGTAVERPDLSDERDRLEREQRKLSRKEHGSANYRKQQRTVAKRHADLQRKRRDFLHKLSNHYAREYDLVAVEDLDAKGLMELPSNSRNRAGAAWGTFLRMLEYKCEREGTHSVAVDPAGTTKECPACGAESDRPLWVREHSCPSCGFTSDRDWNAAYNILVRGLKQVGTGCPESTSSESPNE

SEQ ID NO: 33143 - protein, 398 aa, unknown
  TnpB Polypeptide
MSRYRLLPMPAQEAVLRDHCGHARYVWNLAVEQHSHWRPGRPGAPGYLEQCRQLTQARAEYPWLAAGSQTVQQQALRDFSQAMAAFFDPGNPAGRPSWRKAGRDEGFRITGRRGRHWDVRRVSRKVGQVWVPKAGWVRFRWSRAVPPGAKSYRVTVDRAGRWHIAFAVIPDPVPAPGNGQAVGIDRGVVVSAALSTGELLHAPSLNARERIRLRRMQRRLARAKRGSNRRGRVQQAIARLRARETDRRKDWAEKASTGIVRRFDVIWVEDLKIKNMTRSAKGTRDNPGRNVRQKAGLNRGILRSGWGLLVRRLEDKAPGRVEKVRPAFTSQRCSACGQVDRDTRESQAVFRCTACGFACHADVNAAKNIAAGHAVTARGGDGVAWPVNREPQLLLPSA

SEQ ID NO: 33144 - protein, 424 aa, Brevibacterium sp.
VKKRYNYRVYPSPRQQRDLSRLFGCTRFIYNSVIADRQMIHETGLHEITDSRPTKKNPDCTVRSFDANRQSALITYERSRKSWLNQVSSVALIQSLRDAEQAFSNFFSSRSGKRKGPKVGFPRFKSRFSGKQSARFTSNGFRVDGDRVFIAKIGWLRFALSRELPSKPSSVTITCNPDSTYEVSFVVDVEPVNLAPAAERHAALDAGLDTFASVVYSDGTREKVGNPRFYRKQQSKLRKAQRALSRKQGPDRQTRQKPSNGWRKQQVKVARLHSEVGHARQDFARKLAHRFASENTTIAVESLNIRGLVRSGGHNAQGRGLRRSMHDVAWGAFFTALGHVAGDRLIAVNPAYTSQTCAVCGVAGGPKALSVRQWECQSCHAVLDRDWNAAMNIMLAAGQVERVKGLMQGLVTSNLACLQASLEG

SEQ ID NO: 33145 - protein, 564 aa, Streptomyces sp.
VVVPKLRRKRELRMIAAPFTVAAPSGARIRDRLPLTGEEAEVLRQVGEHNGRHQRADLAERIRIGKVKAKDTRRAERKKKLTAASSSRWAGAMTRASEDQYQLSMRVLFDERASLRRAIRTISKRLAVPCGQRKGKVRGYADQNERFQKQRRLQVLKARLARVEQRIDAGRPSIVVGGRRLARIRHNLEKAHLTAAEWGQRWEAERLFLTADGESGAPYGNYTITVDPADGSVTLVLPEPLRHLANAPRGRYKLSCAVFFHHRRQEWLDRVEAHCAVRYDFVHEPTRDRWYLDASWSADKAVLPCPEEIRQFGERMLGIDLNADHLAAYVLDQHGNPIGEPITIPLDLTGPASQRDGRLRAAISNLITIAKEHHCVGIAVENLGFDDARQVGRETMGRGRRGKKFRRTVAGIPTARFRERLRGMTFHAGLVVIAVDPAYTSKWGGQHWKTPLQDQNKTNVTRHHAAAVAIGRRGLGHRIRRRPGVTAHHQRMVERRATGQAVFVPRPRGTTSPPRTAGTPNGGGKTRPCRGDQLVLFPDLEDRSRGHRTTCPESCESANTGQHR

SEQ ID NO: 33146 - protein, 459 aa, Natrialba sp.
VDILIDQLTSYCDRHGTHPATYFELQDCPEYDSGVLPFSADDGPTSGQAVKYQYDADSETLTIRLKTPDTLSPETRGDWSWTEYERDGYEAFHDLLAHGDLSAPEFQPARRKTGDTYYELSFPVEVDHAETTDGTDCVLALDAGMRKDMTVVVATDDGEQRSTPQFIQFTDREKMRRLHRERTRLNDRLAALRRGARSHTDEFAHIHSEYERVNSKIQHKRDQLTHDVANQVLALALAYDVDAIVHEDLRSLSPPSDEGTLSWELSSWARRDIIKKIEYRAECAGLAVERVYPQGTSRSCPRCGSTGHTCKSPDHHEEHWWGGHFRCDNARCGFEGDRDYIGTLNVARVFFSETDELDHGFTSSYTGDSEIVLAGRSAGEQSDGLRSSSEASSDAGTRLTFGSGIVAYEPEQAAATTGGGSAVIAPAVALPESNADGSDGRGPVVQQCTRFLRCPTESY

SEQ ID NO: 33147 - protein, 429 aa, Natrialba sp.
MNYNYRYRLRPSDALEEQLAWTVDTCRQVYNHFLHRLNRTSDTSAYSEQKLLPSLKKWWSELKQVHSKVLQKVVQRLYDNLSTLRGRKENGYRVGTLKRKAPGEYRSFTYSQSGFKLKNTSGRTRLWLSKLGEIPLTFHRNLPDDAEVKTVTVKQEPTGKWYAILGVETPDDPPEKPENPERCVGIDVGILKYTHDTDGTAVESLDLSDERERLERAQRDLSRKEHGSNNWEKQRRVVAERHAVLKNKRRDFLHKLSNYYARECDLVAVEDLDAKGLVELPGNSRNRAGAAWGTFLRMLEYKCKQEGTHFVAVEPAGTTKECASCGVSTEKPLWVREHSCPSCGFEADRDANAAWNILSRGVKERLGAGRSESTSSESLCDSDGLRKSHSDFRTPVETAFPVDTPVSAKRVVETGSPALKERTASAVSE

SEQ ID NO: 33148 - protein, 435 aa, Natrialba sp.
MPEVTKTLELRLVDPNAHKERKLCETREAYQQALQAAFDADCTTQSATNDIVVEYDLSGYAKNALKQYVPQLCGGSYDTDELHDDHPVKFTNEGVQLDHKPQNSLEWYIKIPHHDDYHLWIPAHANPDQRDWLEAVYAGDVEMGESRLLERDGTWYLHITATRDVEEQSATSANERTPPDSSGEPCLVGLDRTPIGVDIGEASLVTVCHRDESGSPVRPKLWANDGKTVRRLRKTYFTAKRRLQRRGSERIAESYGESLWNRIDHVVHRVTREVVEYAESVENPVLVLEDLTYIRENMDYGAYMNRRLHGWGFAKLHAQIRYKAAEKGIPVETVNPRNTSKECHACGKVGSRPRQATFRCSNDDCWVTEYQADVNGAMNIADRYRSGESHRQSDRTSRQKAGDDDSATDGASLTGPQDSHADAEPQQVTHGTNAS

SEQ ID NO: 33149 - protein, 251 aa, unknown
  TnpB Polypeptide
MRTAYKVRVYPTAEQAAVLNRTFGCVRLVWNRVLAWRQARYRAECMRTSYAQTDRYLTELKRDGDHDFLYEVSSVPLQQALRHQHTAFVNFFAGRAKYPRFKPRHGRQSATYTRSAFRWRDGRLFLAKMGDPIAFVWSWPEVGPASIDPATVTISRRAGRRLVVIDRWFPSSKTCSACGHLLAALSLSTRHWTCPDCGTRHDRDVNAAKNILAAGRVVPACGADVSPQGSSLRRSAVKQEAQPVRAGIPVL

SEQ ID NO: 33150 - protein, 363 aa, unknown
  TnpB Polypeptide
LYPNNVQATYFSKACGVARFSYNWGLAEWKRRYEAGEKVNEGILRKELNAIKREQFPWMLEVTKCAAQLAIKNNLNNAFKNFFRGIKDGKQTGYPKFHKKGINDSFSLSNDQFEVKEKQIRIPNLGWVRLAEKLRFDGKIMGAAVSKKADKWYVSIQVELSEPIVWTSKLQAAGVDLGVKALAVLSDGTVITGAKASRKYKNQLKRLNQALSRKAGAKEGEKKSNNFVKTKRKISRLYAKMANLRNDETHKLTAMLTKTYNVIGIEDLNVKGMMSNHKLACSIADMSFFEFRRQLEYKSEATGTKIVVADKWFPSSRLCSSCGHKKAALLLKERAWTCENCGIHHDRDVNAAINLKNYAILNA

SEQ ID NO: 33151 - protein, 407 aa, unknown
  TnpB Polypeptide
MIIRKAYKFRLKTNVNIEESLTIFAGHSRFVWNYFWRVNKHRLDNKQRIMRYHEMNYWLTLLKQSDEYGFLSEAPAHILQQKLMDLDKAYRDAFDKKQPNKRMPRLKKKQFHNSFRYPQGLQFKIENNRFYAPKLGWVGFFKSRNIQGKAKNITISKEGKNWFCSIGSEVELNVAKKVPTSANSMGIDVGITKFAALSNGEYIEPISAFKKHEDKLAKVGRDLSKKQKFSNNWRKVLRRIQELHGKIKNVRLDFLHKATTKISENQALVVVEDLKINNMSRSAKGTITDPGKNVRAKSGLNKAILDQGWGMFRLQLEYKLAWNGGLLLKVPPHHTSQKCNQCGHTESQNRQTQESFCCVWCGHQDNADMNAARNILAAGLAVIACGEAALVASMKQESLGIGDLVPA

SEQ ID NO: 33152 - protein, 487 aa, Mycobacterium sp.
  misc_feature (135)..(174): Xaa can be any naturally occurring amino acid
  misc_feature (353)..(484): Xaa can be any naturally occurring amino acid
MARLKVPEGWCVQAFRFTLNPTQTQAASLARHFGARRKAFNWTVTALKADIKAWRADGTESAKPSLRVLRKRWNTVKDQVCVNAQTGQVWWPECSKEAYADGIAGAVDAYWNWQSCRAGKRAGKTVGVPRFKKKXXXXXXXXXXXXXXXXXXXXXXXXXXXXXXXXXXXXXXXXERLIAKGRARVLAITVRRNGTRLDASVRVLVQRPQQRRVALPDSRVGVDVGVRRLATVADAEGTVLEQVPNPRPLDAALRGLRRVSRARSRCTKGSRRYCERTTELSRLHRRVNDVRTHHLHVLTTRLAKTHGRIVVEGLDAAGMLRQKGLPGARARRRALSDAALATPRRHLSYKTGXXXXXXXXXXXXXXXXXXXXXXXXXXXXXXXXXXXXXXXXXXXXXXXXXXXXXXXXXXXXXXXXXXXXXXXXXXXXXXXXXXXXXXXXXXXXXXXXXXXXXXXXXXXXXXXXXXXXXXXXXXXXXXXXXXXXTAI

SEQ ID NO: 33153 - protein, 376 aa, unknown
  TnpB Polypeptide
LDETMKQFTESFNTVCRTGWEQHNSNAYTLHRLTYRDCKNALPSLVSDLHIQARQKAAEAVKSAIAREKKGLKTGCPQSMLCPPRYNLHTFTLNWEKGIVNLATTNGRIKVVFNLPQYATYAVGCATATADLLYRKNRFYLHVVISLPDIEFVSNGKAIGVDLGMTRPAVSSDNRFHGDKHMKEVVKRIFRLRRELQAKGTKSAKRHLRSLAGREQRFRRDCDHVISSSIVRDMDAGTTIVLENLTNIRNRVKVYHGEASRRLHSWSFLQLKSFIEYKAEAAGCAVAMIDPRKTSQRCSRCGNISRGNRRTQSSFICRECDFHLNADLNASRNIRDKLLVGWGISPSDALLSTSVSSHPSPTGLGRDKLAALAVSG

SEQ ID NO: 33154 - protein, 359 aa, unknown
  TnpB Polypeptide
LIAQVKLNPSGEQHQSLLKTLETVNDAANYISSHAWETKTFRQYDLHHLLYYDIRSRFALTAQIVVRVLAKVADAYKLDRKAPRKFNRHGSIAYDKRILSWKPTEVSIWTSNGRLKIAFAAGSKQAELLQYRSGEADLIYRNGDFYLHQVCEVEEPPANDPSEFLGVDLGIVNIAADSDGKTYSGNQVNGLRKRHAKLRSKLQAKGTKAATRLLKKRSSKEARFASHVNHVISKSVVAKAKDTNRGIALEDLIGIRDRTTVRRSQRRQHHSWAFNQLRQFIEYKAKLAGVLVALVDPLNTSRTCPECGSVDKANRKSQSLFSCVSCGYSAPADTVAAGNISRRALVNEPCFSPALVGAG

SEQ ID NO: 33155 - protein, 426 aa, unknown
  TnpB Polypeptide
VNLLGIGWSHSLSSNCLHGHVDLKGGPMLAAHRIRLDPNNAQASYLARAAGTARFAYNWALAEWKRQYEACKLDPSLPRPNEAALRRQLNAVKRQQFPWMLEVTKNAPQLAIMQLGEAFKNFFACRARYPQFRRKGQHERFTLTNDLFQVDGKKFRIPKLGWVRMREALRFQNRIVSATISRVANHWYASITVDIPNPFLPSAENQGAVGIDLGVSSLATLSTGEAIAGPRALRTLLQRLQRLSRALSRKVKGSHNRGKAKMKLARLHARIASIRRDGLHQLTTSITRRFHTIGIEDLNVKGMLANRRLSRAIADMGFYAFRRQLEYKAAWRGGQVIVADRWFPSSKQCSGCGHVVKELGMGVRHWCCPECGEYHDRDVNAAVNLKNMAVSSTASACGGEGAGLARKRETKPAPAKQESSAKVNDE

SEQ ID NO: 33156 - protein, 369 aa, unknown
  TnpB Polypeptide
MHFDKWLTRAKKDKINLILKEYASIVNYFIATYEDKIPKLTNFDLNYAKYTRVCAQKTKTWLTARMIKDAFSEGYGMVLAAKEKATEDVSYVRPTHRGKKAILSSTINTQSEGVSTVDFDFNVTLCSIGNKMKISIPLKKHRHWNKLNALGKRSKSIILTRKYIQFSFEIKTEPKKESGKLLGIDIGINELFAASDGSFFGKGYKLLLEKLLRKERCSKGYYRTKNEIITFINSTINDIFKDDLQLIVVEKLKGLKNKMKERRRLSKNNRRFVSVWVYRYILNRIEQVCEINRVSFRSVSAYNTSITCPRCNHADEGNRKTQEIFRCLNCGYAGNADFVASQNILVRFLTGPYCARFKPDDYLVYLSIV

SEQ ID NO: 33157 - protein, 378 aa, unknown
  TnpB Polypeptide
MPQMRTVVIRLYPNRTQEKALLNTLGRCCFLYNHLLETCKKAHEDGQKHPSEFDLDKHIVDFKKEHTELKEVYAQVLTNVSTRVSLAFDGFFRRVREKKEEAGYPRFRSFSRYDSFSYTQKGFSVTPDKLKLSKIGDIRISGFRKMCGTLKTCTVKREGNAPHYRWKASLVYSFDGISTSFIDSSRTPIGIDMGLKDTIVTSDDERFSNGHHYRQAEKRIADIQRKMSTFEKDSEEFAKYRQRLYHAFQRMKNVRRAERYDAVHKIIEDHDIIAVEDLSVSKIQDKALGKGMRKSYSDASWRMTLDTLCIKAAEAGCRVVRVPPAYTSQRCSGCGRLVPKELSERRHRCVCGLDIDRDLNAARNILRLGLQALQSESC

SEQ ID NO: 33158 - protein, 453 aa, Lentzea sp.
VSSVIQAYRFALDPAPVQEQALRSHCGARRRAFNWGLARIKANLDQRAAEMTYGLVEDELTPSVSWSAYSLRKDWNQAKDEVAPWWAENSKEAYSCGLANLATALGNWADSQRGKRNGRRFGFPRFKGRRSGLSCRFTTGAFGLADDRRHVKLPRIGLVRTHESTRRLARHVERGTARIRSATVSFRAGRWFVSFSVEITRTDPLPTRPGSVVGVDLGVKSLAVLSTGESIPNPRHLETALRELRRLQRQAARRTGPDRRIRRQPSARWRKTQARVTRLHTTVVNARRDGLHKLTTRLVRAHGAVVIEDLNVAGMTRNRRLARHVAGVGMAELRRQIEYKAQWAGARVHVADRWYPSSKTCSACGVVKAKLRLSERTLCCDACGLVLDRDLNAARNLAALVPRETSSPSCGATVNEPAGNPGKTRTARATGTATGRPAPVGAGQRRRRKATAV

SEQ ID NO: 33159 - protein, 337 aa, Escherichia sp.
  misc_feature (251)..(254): Xaa can be any naturally occurring amino acid
  misc_feature (315)..(317): Xaa can be any naturally occurring amino acid
VKRLQAFKFQLRPGGQQEREMRRFAGACRFVFNRALARQNENHEAGNKYIPYGKMASWLVEWKNATETQWLKDSPSQPLQQSLKDLERAYKNFFRKRAAFPRFKKRGQNDAFRYPQGVKLDQENSRIFLPKLGWMRYRNSRQVTGVVKNVTVSQSCGKWYISIQTESEVSTPVHPSASMVGLDAGVAKLATLSDGTVFEPVNSFQKNQKKLARLQRQLSRKVKFSNNWQKQERKIQRLHSRIANIRRDYLXXXXNWQKQKRKIQRLHSCIANIRRDYLHKVTTTVSKNHAMIVIEDLKVSNMSKSAAGTVSQPGXXXHKPAMRVLWSYSERKSPVTK

SEQ ID NO: 33160 - protein, 398 aa, Synechococcaceae sp.
MLNLTYTYRLRPNQQQIQLYEEWLEASRKVWNYALAERKDWYLSRSCQLDRCSLRGEYIIPAAAPRPTFASQCKALTQARKFFPELQAAHAQMLQQVLRRLEKAFVSMWEQGHGFPRFKKVGRMRSLLFPQLGKNPLQGDRLKLPGIGWVRMRMSRPIPDDFEIKQAQVVKRASGWYVMLTLQAEVEVPQAQPHGRALGIDVGLESYLATSDGKLVKAPKFFVNLQRKLRLLQQRASHKVKGSANWYKAQKQVAKLHEHIRNCRQDWFYKLAHRLCEGIGMVFAEQLNFKAWAKGMFSKHTLDAAHGEFLRILKWVCWKRGVLYLEVDANFTSQICPNCQTVTGKKDLSDRVHHCRECGYQTHRDVAAAQVVKQRGLAAVGCTVKMLSEGLKVASPTT

SEQ ID NO: 33161 - protein, 268 aa, Bacillus sp.
LNIEKETVQLPKLGKVKVRFSKKHRQRFRENGLKGKIKSATITYHSSGQYYVSLKLEEIVDLVNPLDFPLIPDDQIIGLDLGLNHFYIDSNGKKVDNPRYLKENLQKLAKLQRQLKNKKIGSSNYKKLQKKISKLHLHIGNQRKDFLHKKSRKLVDENQVIVLEDLNVKGMIRNRKLARSIADVGWGTFKTFITYKAVWANKTVVLVDRFFPSSRLCNGCHKKNTLLSLSDRVWVCPHCGTEHDRDENASKNIKEKGILILRSLPKSA

SEQ ID NO: 33162 - protein, 430 aa, unknown
  TnpB Polypeptide
LYFLQQVYIFSIFTLIYRIYSLLYKMILVEQHIISKNNLLWKQCDHLCFLSKNLYNSTLYRIKNHYQETGKFLRYNHLAKEFLQNDQQDFRALPSSTSQQILMVFDQNIKSFFKLIRKWKNNKKSLSGCPHLPNYKHKIKGRNIIIFTSQQSRVKDGFIHLPKKVDLAPIKTKVKEKIKQVRIVPKSSCYVIEVVYERQEKEHIQNDRYLSIDLGVNNLTTCFDSKNQSSFIINGRPLKSMNQYFNKKKGNIQSDLEKNHKKKTSKRLSKLTMKRNNKIKDYLHKSSGTIVDYCIKNNISNVVIGLNKEWKQGSNIGKKNNQNFVQIPFDKLIKMITYKGQLEGIKVVTHEESYTSKCSSLDLEMLCHHDTYLGKRMKRGIFLSKDWIKINADLNGAINILRKETGDKLINLETLTSRGQAVWPVKVNLN

SEQ ID NO: 33163 - protein, 430 aa, unknown; identical to SEQ ID NO: 33162
  TnpB Polypeptide

SEQ ID NO: 33164 - protein, 408 aa, Okeania sp.
MLKIKQQMVEKAYKFRFYPTPEQESLLRRTLGCVRLIYNRALAARTQAWYENKERVGYKQTSAMLTNWKKQEDLDFLSEVSSVPLQQGLRHLQTAFTNFFSGRAKYPNFKKKRNGGSAEFTKSAFKWRNGQVYLAKCLEPLSIRWSRQLPPDCVPTTITVKLDPSGRWSVSLRVNDTRDLTLKPATKLLGIDLGITSLITTSDGKKVANPKNLHKLHKKLRLAQKSLSRKTKGSNNYQKARLKVARIHAQIKDSRLDYTHKLTTQLIRENQTVVVEDLAVKNMVKNHKLAKAISDANWGELVRQLEYKADWYGRELIKIDRYFPSSKRCSNCGHIVEKLPLNIREWDCPECGSHHDRDINASVNILAAGLAVSVCGATVRPEGSKSWKAGALKQKAPNSDVKESRAVS

SEQ ID NO: 33165 - protein, 443 aa, unknown
  TnpB Polypeptide
MILTEEHRISRSRNKDLFSRMDSFCYLAKNLSNSVNYLLKQCYRIHRKLKEGEVPDSWEKGMIYRANCAIYRYNQQNPGRKPLRYIDENSSLPADPHFLSWYMKTWDVYRAMPYATCSQICIQERCRDWKAFFKSLKKYRKDPRGFSGRPKAPGYLDPVRGRGRIVITSQNFSVDQKGNVCLPDFLSGIRIRAEHPNIRQIRIQTDSEGIRVQLMYKKEEAVIPDRPHMMGIDMGVDNLMAVSFDSEKEPVLVNGRPLKSINQFYNKRKAFLQRTAIRSNQRCRTKAMDSLTRRRNRKVRDYMHKASRKIIELAEQENVGTIVIGRNAGWKQNVEMGKRTNQNFVSIPYHILIEMIQYKAALAGITVNIIGERYTSGTSYIDREYPDKKHYNKSRRIERGLFRSNTGICINADVNAAYQIMKAGGAADLPVKVREKVLRINAA

SEQ ID NO: 33166 - protein, 322 aa, unknown
  TnpB Polypeptide
VKKRKKRAKAGEPQTVTCAVTHIGLEALNPGKRTALDQLAEVYLALTQQYVTLFCTTEPPNGFRAPCFLTILSQRWHRAAIQQAAGITKSWRSNRANAYQDFLDAQTWYQEQKADGSLEEGAKEPEWREWNVPTLRQPCIQANGNVVKVENAADSTFDSWLKISTLDKGHPLLIPVKLADYHKEQLTDPKTGKRRKINSSVTLNKRDEVWWLTLTKRDEVWWLTLTYDETIAIQMEPDAPVIGIDVGIANFVTTSDGKQYGTFNGKLRERHRRDRKKRRRKAKLRSCLEKKGRPKETLPSTSSVTGQRLIRQVRQEITVSSD

SEQ ID NO: 33167 - protein, 411 aa, Okeania sp.
MIVYEFKVKGKLNQYQGIDEAIRTGQFVRNSCLRFWMDNPGAGRKELYRYNTELRAMYPFVKDLNSHACQASVKRCWSAIAQFFENSNRNIPGKKGYPQFKKNTRSVEYKTSGWKLQDPKHIEFTDRKGIGKLKLMGTWDLAFYPVEKIKRVQLVRRADGYYCQFCISVDIKVESEQTLHNVGLDVGLKEFYTDSEDNREPNPRFYRKSEKRMKFYQRRVSRKQKGSTNRQKAINKLGRVHLKISRQREEYAKRLARCVIRSNDVVAYEDLRIKNLVKNHCLAKSINDAGWYQFRKAMQRGLGGFPHERLHQEWLEYFGPKFGKVTVAVNPAYKTQKCSNCGTTVKKSLSTRTHICRCGCILDRDHNVAINILNSALSTMGHIGTWLNESNALGDSGTTEVGEILPQQLGS

SEQ ID NO: 33168 - protein, 418 aa, Donghicola sp.
MTGIMSATRSLSFKLYPSKSQAEALWRKHVMLKDLWNAALEERIGAWRKGVRIRRSDQEKALKHIRQDVEGWRGLIHTHEAQIVLKRLDLAFDGFFRRVKAGQTPGFPRFRSADRFRGWGYKEHGNGFKVEMRDGGRHGFVKLFGIGRMRMRGIARTPGSVLKADVTYSTRGWYLNVVVETGCAERARPTGGAIGLDWGLSEFATIAHEDGSFEALANPRHLDAEADDLRAEQRRLSAAARARKITGRALVRHRKALARRHAKVAARRKDFLHKASATLVARHRMIATEELNIRNMTRSARGSVEMPGRNVAQKAGLNRAILDTGPSAFLNMLRYKAEEAGIEFLEAPTRSLKPSQRCPDCGVLRKKTLSERQHSCSCGCSLGRDEAAARVMLQWGLDELHRLETINTAGTVVGWAHA

SEQ ID NO: 33169 - protein, 471 aa, Bacillus sp.
MAASKERTPSFTATIRLRTNAKEGKLLLMLSDCGRQLYNACLGESLKRIKAIQNTELYKETVRLSKTMETDLEKRRTNFKHLNATFGFTDYSIQSFGTQTKNASKFIAKHLGTHICQKLSTRAFKAVQKYAFKKAKKVRFKRKGEFVSLEGKNNKTFLTYSNGYVFIGKTLSLKCLIDPKDQWMQHALKHRIKYCRIIKKEVKGKNRFYVQLILEGFPYHKYELGKEEIGLDIGPSTIAIVGESKAELREFCEEVVVLDKEKRRINRKMDRQRRANNPNHYQSNGVMKKGKKKWVNSKGYINTRSEHRELERKIKEVRKQLHGRDTNQILQQASSIQTEKLSYKAFQKMFGKSIGRKAPSMFLNMLKRKVESQGGRFGEFPTYSTKLSQTCHCGAIKKKRLKDRWHCCDCGVRAQRDLYSAFLARYVTKSNQVDLQQAEKDWFQLSNVLNECISNLKNMKSHRKFISTFGV

SEQ ID NO: 33170 - protein, 388 aa, unknown
  TnpB Polypeptide
VRRLRLTPTPQLDALARAAGELYSRVVVDFWRTVRKRGVWLKPSSMMRWHTSYQLHAHSADAVVQSFYAALKSWRERRKTDPQAKPPYRRRRYFRVQWKSSAIRVREGNLILSNGRGNAPLVVPWAWETPVLVELGWTGTDYELRAVYSRPAADPVVEGGVAGVDLGEVHLAVVHDGAQTLIYNGRELRAKRQYQNKLKARLAAKLSRMRKGSRRWRKLQQSKRKQLRKIDHQIRDILHKQTTALVSTLHERGVQTVVIGDVRDLRKRVDYGPAANQRIHQMVTGMVRWMITYKAEQFGMRVVIQDEAYTSQECPRCGSRHKPRGREYTCSVCGFRFHRDGVGAINIRRKYLGQGPVVGVMASPTGVRWRPHLRARVARDKRERIPAL

SEQ ID NO: 33171 - protein, 373 aa, unknown
  TnpB Polypeptide
MANRAIIYAIYPNKIQEEQCRKTFGCCRFVHNQMLTIQQERYKNGEKHLSKFQANTYCNQHLKKEYPFLKEVDKFALTHAVYHLEDGYDRFFKHLSRFPRYKSKHKAKKSYTTNFTNGNIAVGDDYVKLPKLGGVKAKIHRKPEEDWKIKSATITQNRDGTYQVSILFEYIADTVSALAATEDTTIGLDYKSDGLYTDSNGETCGMPHYYRDSAKRLAKAQRKLKHKTVGSNNYKKQQKRIARLHRHVANQRKDFLQKGSTAIAKQYDHVCVEDLNMKAMSNKGFGNGKATLDNGYGMFLKMLDYKLEEKGGSLVKVSKWFPSSQTCSCCGALHPEMKDLSIRTMRCSCGCKIDRDYNAAINIKKEGLRLLSA

SEQ ID NO: 33172 - protein, 480 aa, Calothrix sp.
MALRSANLAVSASVPAVPTPAGKQATTGGTPARGCSSPKFVRRATFKLYPTKKVNAELHYHRKLHKDLYNAAVSNRITSYKKFGKSVSYFEQQNCLPDFKEVWYEYKVCNSQTLQATLKRVDYAFQRFFKGLGKYPKFKSIRHYSGWSYPSFTGWKVHSTGDNGYLELAKIGQIQMRGKARLWGHPKALDIVHRNGEWYASIILEIDDVVLKNSRPSEGKTVALDLGCNDAIAWSNGEENGLVPAPRFLRQAENKIKHLSKGKRRKRSPNFKKKVKASRRWKKSQKLVSKLNRKVANQRQNFVHQETTRIISCNSTVVTEKLEVKNMSAKAKKGKRKKQKAGLNKSILDVGMGMIKDALKAKLSDIGGLFVEVPTRKVKPSQTCPKCGHQEKKSLAQRTHVCNNCGYIQQRDIASAEVMLLWHSNSLQGLGTSLLDVDDSSSTSNTRKRKSTGSMTQLGRVKRQKSTLTGLDVETSPSTK

SEQ ID NO: 33173 - protein, 380 aa, unknown
  TnpB Polypeptide
MNTYKAYKLRIYPTNLQRELIEKTFGCTRYIYNNFLAERKNKYEESKIKINVYEQLKELTDLKREKEWLREIDSCALQACVYNLDDAFQKFFKGNGYPEFRAKGVHESFRTNNTPNTYKDKKYESIRIDFNKRVITLPKLKEVKFRGYRTTKEIVGKIKSATISKDAIKYFVSILVEVPFVKYSLNPTSIVGLDLGIKDFIVTSNGEKLKNEVKINEKRLKGLQKWLSRCKPGSKNRYKVKLKIQRLYLKIRNARKHMIYKLANNILKENDIVSIENLDVKSMYQVHKIAKHLKNIPIREFIRVLKYKSNWLGKKVVEINKYYPSSQCCNRCDYKNEEVKDLSVRKWTCPECGLIHDRDINASINIMFEGLKIYMKNYLI

SEQ ID NO: 33174 - protein, 394 aa, unknown
  TnpB Polypeptide
MYADYHTMGDEVTLTGTIEMTVRAEPLVQLIRNYTNALRFLVQEILANPSKYGKWRYVKKTRRIKWEQDLKTIHHEFYDLLKEKFELPPKFAIACEKETIAIVKSVLNNENNKDRKCVIRGYRARCDYQAYRIEIKDGKCYLKLRNFGEIEVTGFSKKWFERFKDWDYGDLILKIDKDRIKLLITVKKTVKIANASENAIAVDLNFNEVVVGNKDVEIRFRTPLQKIMHIKKNHIEKTQKKYNRQWLHVKGIRRAISKWWKRISNITDDFVKQVSRRIVVFAKELGYDTIVLEDLNGLRDKQAKQKKPWRERFTFFAYRGLQERIDWQAMKKGLAIVYVNPKDTSSICPECSSRLKHTENRTVKCEKCDTKFDRDSVAVRNLVNRWLNILRCAV

SEQ ID NO: 33175 - protein, 517 aa, unknown
  TnpB Polypeptide
MATLTLALKILSPTNIKRQILDDAIGRYNKALQYLLCHTRPLCREIEQQMKEGHTCSTRYIVSRLDKALLKELNAFGVQPFKDALKLDYAITLLTYLSLKKVQKHVRYPMVSLDDEDFQKEFSYLVEKESLDPRQISRLFDKYEAKTSLFFGRYSPVRDYCLLYNQASGRFYAKMYLMNVKDKNRRGNILRQNSQLQYLTKEGGYLEADNKHERYLVVPLSFGKHQLQLLRQGMENPEMFKTARLQKRKNGYYLNVNIEVKAPKGKKATNFMGVTRSLHHSVHYTICDKKKNILDTGWLTADLQSKNSFHQLANQLANLAQKYSAHVIAYRLNSKGDHLWVEDAYPQMSTGKYNKLISMLGYKLELKGQEAPTVVSPRGVFYTCPKCGKNTSRNRLTPQVFLCVRCGHSSALEPNGSYNLATRLLTYQNKKIKFKVEKIGDRVRIYNDILHLSFEGKQDENCLKQFYCYLEEKIEQLRGEKIALEQIETGEQKKYLSHLKRFLEINDVRKEVQVEAD

SEQ ID NO: 33176 - protein, 420 aa, Lactobacillus sp.
MGQTMAQLPYHYGVKVRIFPSNEQKRLIKRNSDASRFIYNEMNGMNRELYQLKRVKIPIGIVQQRIQTLEQRLKNPATGISNIHGWLNDNVLDSLMKANAIKNYRAAWKMFRKVHQSGTPVFHRKRTEQKYQTSCLYPGKVKAPNMINGSVRLLDHQYIQVPKLGRLRFRGMPAKLLARKQGIRIGTVTISMDATERYYVSLQLASEHSFVIQTVSKSQTAIGIDLNTANFLTDSNGNVVANPRYYRSVKGKLAKAQRKLSRRALRAKKEHRQLRNAKNYQKQRRIVADIQRKVANRRSNFLHLVSTTLIKNHDLVVAEELRSKNLLRNHALAMSISDVGWRTFLGMLTYKATLYGKKFETVNPRNTTQTCHDCGFIMGSRDTHKLTLADRAWTCPACRMQHVRDHNAAQNILAKGIIPR

SEQ ID NO: 33177 - protein, 409 aa, Anaerolineae sp.
VEVRQAFRFELDPNQKARMALAKHIGAARFAYNWGLARLKEALEQGRPLPSAVQLHKEWNRWKRKNAHWWVEVSKCAPQEAFRDLEKALKAWREGRANFPRFKRKKSLDDNKARLTGSIRVTPRHVKLPRIGKVRTKERTDKFLELLQAGKARILSATISREADRWFVSLTCVVERPDPEIREAGSPEDIVGIDLGLESFITLSDSTKVEAPKPLKKALGLLERRSRQLSRKQKFSQNFSKASLRLARLHRRIRNIRWDFLHKVTTWLAKTKPVIVVEDLNVRGMSQNGHLSQAIYDVSWGMFRRMLEYKCAWYGARLIVVPRDFPSTKACSHCGEVGPPLLLSQRVFRCEACGLEIDRDWNAALNLWHYGLAHLTSPTGSSLGSNACGEGKFPSWKQEAAGHLFHRKG

SEQ ID NO: 33178 - protein, 296 aa, unknown
  TnpB Polypeptide
MKKLIKGIKIMLVPNNKQNTLMFQNAGTARWAFNWALGREKENYANSGKFISDNDLRKELTQLKKTDEFCWLNNVSNNVPKQAIKDACGAYQRFFKGQAKFPKFKSRKKSSPKFYQDNIKIQFTATHVKFEGLAKSTKKNKQQLNWVRLAEHDRIPFGKGVKYINPRISHDGLNWFISVGIECPNSTETPLNEGIGIDLGIKDLAICSDNKTYGNINKTKKMRRLEKQKKRLQRQVSRKYEENRDGLKYIKTKNILKLELKIKSIQHKLNGVRDNYIQQTTTEIVKTNRLMYRWKI

SEQ ID NO: 33179 - protein, 500 aa, Escherichia sp.
  misc_feature (226)..(254): Xaa can be any naturally occurring amino acid
VKRLQAFKFQLRPGGQQECEMRRFAGACRFVFNRALARQNENHEAGNKYIPYGKMASWLVEWKNATETQWLKDSPSQPLQQSLKDLERAYKNFFRKRAAFPRFKKRGQNDAFRYPQGVKLDQENSRIFLPKLGWMRYRNSRQVTGVVKNVTVSQSCGKWYISIQTESEVSTPAHPSASMVGLDAGVAKLATLSDGTVFEPVNSFQKNQKTLARLQRQLSRKVKFSXXXXXXXXXXXXXXXXXXXXXXXXXXXXXGKWYISIQTESEVSTPAHPSASMVGLDAGVAKLATLSDGTVFEPVNSFQKNQKTLARLQRQLSRKVKFSNNWQKQKRKIQRLHSCIANIRRDYLHKVTTAVSKNHAMIVIEDLKVSNMSKSAAGTVSQPGRNVRAKSGLNRSILDQGWYEMHRQLEYKQLWRGGQVLAVPPAYTSQRCACCGHTAKENRLSQSKFRCQVCGYTANADVNGARNILAAGHAVLACGEMVQSGRPLKQEPTEMIQATA

SEQ ID NO: 33180 - protein, 361 aa, unknown
  TnpB Polypeptide
MKLVVNLKLKPTEEQLSLLKATLEMANDACNYLSERAWEAKIFGQYNIHKLAYYDTRKCFPITSEMVIRSIAKVADAYKLGRKIQRKFRKDSAQPYDSAIIRFTKNDVVSIWVLGGRQKIPFVMGERQRSLFPFRKGEIDLIRINGKFYLAVVCNIDDPELIKTTDVLGVDLGIVNIAVDSQGKTYSGGEININRCKFEHRRCNLQKKQTSSAKRKLKKISGQQARFQKDVNHCISKAIVADAKRTESAIAIEDLSGIRKRATARRHQRARLSNWGFSQLRAFITYKAVLSGIPLYLVDPRNTSRECPVCGHIDKANRKTRDDFVCVKCGLAGPADTIAAQNIRARALVNVPMVTGGCVVV

SEQ ID NO: 33181 - protein, 367 aa, Hungatella sp.
MLKAYKYRIYPNQEQKLQIAKTFGCCRFVYNQTLAYRKEKYENAKESVTKTDCNNYCNRQLKKEHEWLKQVDKFALTNAIYHMDSAYQKFFKEHAGYPKFKSKHDNHKSYTTNFTNANIEVNFEARKIKLPKLKKVKAKLHREFVGQIKSATISQVPSGKYFISILVETENKSSPRGTKNVGLDLGIKDLCITSDGKKYENPKIIKKYERNLIKLQRQLAHKGKGSSNYYKKKKQIARWHEKLANTRKDYLHKISHEIISENQVIVSENLQIRNMVKNHHLAKSINDVSWYELTRQLEYKAAWNGRRNIKIDTFYASSQICSVCGYQNANTKDLSVREWRCPVCGTEHDRDINAAKNILAEGLRQIA

SEQ ID NO: 33182 - protein, 424 aa, Nostoc sp.
MLTMNYTYRIYPSAIQQAELLEWLETCRGVYNYALRELKDWIASRKCPIDRCSLEKEYIIPANEPFPSYHRQQNNLPKAKKQFPHLGKVHSQVLQTTIRRLHDTWEAFQKRGHGFPRFKKFGQYKSFVFPQFKDNPVNGFTIRLPKIGEVPINLHRPIPDGFKVKQVRVLSRVRGTQWYVVVTIESSVSVPDAPVHGRAIGIDLGLERFLTASDGSFQERPKFFTFVQRKLKLLQRRAARKQKGSQNWEKAQIEVARMHHRIVNRRKDFHLKTAHKLCDQAQTIFAEDLNVKGLTRGMLRKDCVDAAFGQFLSLTEWVCWKRGVYFAKVNPNGTSQTCPNCLVTVGKELEIREHHCPECGYRTHRDHAAAEIVLHRGLEQVSSQGLWRNESACQIVGLSGVYDLDKWRGAGMPNCEVGKPALYP

SEQ ID NO: 33183 - protein, 409 aa, unknown
  TnpB Polypeptide
VNRYQKILLRPTKSQELLFRGSAGLSRFSWNWGLAIWRRYYSRFGKPIGAMRLNKFWNKIKKRKPGLNWVSGYSKHIAQDTFRNLESAFLRAAKSAKSGGRLGFPRFHKKGQKDSFQVVPSKQFGLSIYGKKIHIPKIGRVRFQGELRWPEGTQTVGRVKLHAGRWYLFLAYDLPDLPKLTDDRPSCGIDLGCKTFATIVSNGQLVQSVEPPKPYAKAKRKLGRLQRIVSRRKKGSKRREKAKLKVARLHKHIADIRSNFLHQLTSRIVKSYGTIVIEDLSVSGMAKGMLSGTVHDLGFAEFRHQLEYKSEAAGSAIVLADRFFPSSKTCSSCGEIKPNLGMHERAWVCTCGTHHDRDVNAAINLENIGKIPRSAGKSTTAESRGSTGSSARVPTQRSSNTKRAKAQMR

SEQ ID NO: 33184 - protein, 495 aa, Glycomyces sp.
  misc_feature (387)..(483): Xaa can be any naturally occurring amino acid
VLLRYRYRIYPTRPQRTALARAFGCARVVFNDAVAARKHAYTQGLPYPTQAVLSKALITEAKRTAERAWLGEVSSVVLQQALADADRAYKNFFASLSGKRSGPRMGPPRFKRRTGTQTVRFTRNAHFKVLDNDRLRLPKIGEVKVAWSRRLPAEPSSVTVIKTPTGKYYASFVVAVDGGTDLAEPIAYHEAETGIDLGLKDFAVLRGGKTIASPKFFRRMKRKLKKAQRALSRKQRGSKNRAKARLKVAKIHERIKVSRSDWVNKQVHRIVAENQGIYVEDLHVRGLGQGRAAKSVHDAALGMFLARLESKAHRAGRTFARVDRFFPSTRLCSACGALTGPKGLDGLRTRRWACGCGVVHDRDANAEINIRREGQRLASLAAGHTEXXXXXXXXXXXXXXXXXXXXXXXXXXXXXXXXXXXXXXXXXXXXXXXXXXXXXXXXXXXXXXXXXXXXXXXXXXXXXXXXXXXXXXXXXXXXXXXXXDPARPVEPGTHP

SEQ ID NO: 33185 - protein, 232 aa, Anaerostipes sp.
EYAWLNNISNNVTKQAIKDACEAYRDFFKGYTSFPRFKSKKHSAPKFYQDNVKIQFTDTHVKMEGFSTSRKKNKQKLNWIRLAEHSRIPTENVKYMNPRIKHDRLNWYITVGIEYESSTSLPSNEGIGIDLGIKYLAICSDEHKYLNINKTQRVKKLEKRKRRLQRSISRKYENNKEGGSYCKTSNIIKREKELLKLDRRLTNTRQNYLHQTTSEMVKQEPSFICIEDLKLS

SEQ ID NO: 33186 - protein, 553 aa, Nonomuraea sp.
MSETPKKRKKEQPRAIDAPFVALGPSGVAIRDRLKNLTIEDDKVLRLIGDHLGTLASLDLKVRCADGSDHSPEKWAARKQRLTCESSSRWAGSITKATHDQWALSRRCQLAHIETLEAGVRMLMHRLSQPLGDKGTKRAAGGYRSKGEWFHKSRRLHILRHRLDRARTDREDGRVHVVRGGRRLLGARHNLGKAQLTEHEWRQRWEAERWFLAADGESGKRFGNETIRLTPDGEVSIKLPAPLAHLANSEHGRYILASKVAFAHRGHEWRDRIDSNRAVAYRIHLDVERGRWYLTASWQRPVVTTVPLETARANGMIGVDTNADHFAAYRLDRHGNPVGEPHRFSYDLSGPADHRDAQIRHAITRLLHWAKSCGVAAIAIEDLDFTAAKTREKHGRKKRFRQLISGMPTGKLKARLISMAAEAGLSIVAVDPAYTSQWGGRHWQKPLVSPRRTMSRHDAAGIAIGRRALGHPIRRRTAPPPPGQSDRVGHRTVQAGPGIRGREETRPPVTERAHDARTRTGTTRGTRETSASKTVRDARNAGTWVQDPLLIID

SEQ ID NO: 33187 - protein, 426 aa, unknown
  TnpB Polypeptide
LRSIKSVRQKHQASDDLLRLLDEFRRMVNVCVAIGIEENISSRKTLSLASYHRLSRDILGYYRLGAIGIATGILRNYQKAVRKNPRTRIPYARRLMLTTCYGFKIQENLLRLPVKPREYVYLKLNEHTLQVISALNVRSVTLTPDWVSISYSKEMVEIEPEGYLGVDRNLDNVTTASVNGTARAFDLSKATRIKADYRSVMSRFKRNDIRIRTRVFSKYGEKQRNRVQPLLHGVSKRIVDEAKTLRYAIVIERLTGIRRLYHRGNGQSRHYRARMNSWSYGELQRQIEYKARWEGVKIIYVPARNTSKRCSICGYKTLESTQRQLWCPHCGAILDRDENAARNLAARGLRFSPDGPPGEAMVEEREPENTTLILKVDGGKLSLQQRPTTRTRTIQPTKSQQNLIRPLFLGRDSREAFLAGAFRIRL

SEQ ID NO: 33188 - protein, 383 aa, unknown
  TnpB Polypeptide
MLAVKTVRQKHQVSPELLRLLDDFRRMVNVCIAVGIEENVSSLKALSLRSYHRLSRNMLGYYRLGAISTATGILRNHRKANKKNPRTKLPYARKLMLTTCYGFKIKDGFLRFPVKPRQYVYVKLNGHTLKVISRFEVRSITLTPASLSMNYSKETTEIEPEGYVGIDRNLDNVTVASTDGTVKTFDLSKATGIKSTYRFVKSRFRRNDSRTRARVFSKYGEKQRNRVQPILHNVSKRIVEVAKTGRYGIVMERLTGMRRLYQKGNGQSRDYRARLNSWSYGELQRQIEYKAKWEGVRIVYVSARNTSKRCSICGYKTLESTHRRLWCPHCGAILDRDENAARNLAAGGLRFSPNGPPGEAMVEEREPKKATLILKVDGGKLSR

SEQ ID NO: 33189 - protein, 372 aa, unknown
  TnpB Polypeptide
MFTITAKIQILPSPEEVSLLQKTMQTYSDACNYVSGYIAQTHILVQAKLNKVLYNELRNIFGLRSQMAQSVMKTVIARYKTILENQGEWIRPNFKHPEYDLVWNRDYSLTEGLFSVNTLEGRVKLHYHSEAMEQYFDERNNWKFGTAKLVTKHGKWFLHIPMSKDIPQLDNFKVRHVVGVDLGVNFVATTYDSKGQVEFFHGRHIKHRRAKLKEVRRQLQHRGTPSARRRLKKIGSRENRWMSDINHQVSKALVEKHPSGTLFALEDLTGIRGATEKVRRKDRYVLVSWSFFDLRKKLEYKAWLNGSKVVAFNPAYTSQTCPKCGHTEKANRDKKNHRFVCKNCGYQSNDDRIGAMNLHRKGIEYLSAVAGE

SEQ ID NO: 33190 - protein, 274 aa, unknown
  TnpB Polypeptide
MNKVIKGIKLRLYPNQSQREQLWQMFGNDRFVWNQMLGMAKERYQNNPNSLFVNEYGMNYLLKQLKCEYAFLKESDSTSFLVVNHNLAQAFKMLFRHRGGYPHFKNRHSLRQSYTGRSTCKVLARRRMQLPKLGSIRTSRTGLVGDAKIKRYTVSYEPTGRYYLSLQVETEVNQLPETRQSVGLDMGLADLVISSDGVKYGTFNAEWLEKQAVRWQRKYARRRYLAQCEVWKWNHNRFDHLEELDDYPTGSVQGSIKPAARNGLPISAETTFIS

SEQ ID NO: 33191 - protein, 390 aa, unknown
  TnpB Polypeptide
MIKTIRVMLIPNNKQKIKLFQYANTSRFAYNWALGREKENYRNGGKFISDGDLRKEFTQLKKTDEYSWLNEISNNVTKQAIKDACNAYKRFFKGYSKFPKFKSRKFSIPSFYQDNVKIQFSATHVKIEGFTTSKKKNKQKINWIRLAEHNRIPIDCKYTNPRIKYDGLNWYLTVGVEYEDSTTVPSNEGIGIDLGIKDLAICSDGNKYQNINKTQKVKKLEKQKRRLQRSISRSYEKNKKGESYCKTNNVIKKEKLLLKLNHRLTNIRQDYLHQVTSEIVKRKPSFIVLEDLNVSGMMENRHLSKAVQQQKLYEFRRQIEYKSNWRNILVIIANRYFPSSKLCSCCGKIKKDLKLSERIYRCECGNVIDRDEQASLNLKQYGENVIKSVA

SEQ ID NO: 33192 - protein, 550 aa, unknown
  TnpB Polypeptide
MFYVEQRAKLMGSKHTEESKPSKKKTPTFLLELPLVAEAGQAARLRAHLEVGRQFYNAMLSAGQQRLRRMQADPAWQAARAIPRTHKQERRAAFSALRERYGFSEYAFHELAKELRVSWLADHLDAVLAQTLATRAYRALNRVCLGMAKRVRFKSKSRGLDSIENKRNDTGLRFVVQNPEEGHTGYLLWHDDQLRAIIDWNDPVVSHGLAHPIKYARLVRRRASSPRAQGADCQGERYYVQLILEGVPSQKPKHAVGSDIIGLDLGPASIAIVPREAEAHLVPLCAELRPDARAIRRLQRRMERQRRAANPEHYDEQGRPKKRGKRSAPWKQSRGYQVTRRRKATRERKLAAHRKSLHGRMVHEIVRVGNTVILEKISYKAWQKRYGRSAGLRAPGMLIDHLRRTVASTGGTLHEVPTRSTKLSQYCHGCGKTVKKPLWQRWHQCPCGVGPVQRDLYSAFLAAYLDPADSIPSCAQYVVPWEGAEARLRAAHERAQERAKEGQVVPRSFGISRAGARLPESQSEPTLEPVVLLRGGRLETWKERSEPPAL

SEQ ID NO: 33193 - protein, 431 aa, Zobellella sp.
MTKRAYKYRFYPTSKQEQLLARTFGCVRFVYNSVLRHRTDAFQQRKEKVGYLAANAFLTQLKKTPGAAFLNEVSSVPLQQCLRHQQAAFRHFFEGRANYPTFKRKRHRQSAEFTRSAFQYRDGRLFLAKCKQPLAIHWSRELPCEPSTVTVSRDSAGRYFVSCLCEFHPETLPITPRMVGIDLGLKDLFVTSDGHRTGNPRHTATYAARLVRAQRRLSKKKLGSRNRAKARQKVARLHAKIADCRMDGLHKLSRRLINENQVICVESLKVKNMLRHPRLAKSISDAGWGEFVRQLEYKAEWAGRKLVAIDQWYPSSKLCSCCGHVLDNLPLSVRAWSCPECATEHDRDVNAAVNIKAAGLAVLALGENVSGMGPVSVSVLGELGIPFFQEGEKSRGEGKCAEACKHLGFSGDRGAGRDHILMPMRPDGTAA

SEQ ID NO: 33194 - protein, 486 aa, unknown
  TnpB Polypeptide
MIRTYELKTEMNKSKKEKVLSVMEEYRKTASLIAKKQWELFYKEGAFNKNHPVREIPSKLSERYKQVIEYQVISIIDSFISNRQNDFIRIVTRSTISEEERIKLLYINKYNLWFKKEVSIQLFDGKGNKIKDTYEIIENETLKLARVIMRHILSLHRRPCYKYINMALDNKVAVISKKENNKAKEFDYWIRFSTVTKNKPVYLPLKSNPYFEEIKGKRKKFCQINIDRDGNIKINLIKDKEKSSDYLSHTPEIALDIGLNNLFATDRGDLFGREFKEKLIEYDKIITTLQSNLQKQQLKPLSSRRYRELIRKVRAHLKNEVCRIINKIITLYRPGRIIVEKLNFTSPNLSKRMNRILSKFGKREIENKFNSISEEFGIVITYINPAYTSQECSRCGYIDKGNRKNREKFICKLCALKLHADVNGARCCLKRSSIKEVSIYKSKKSVLCILTGRFLRDMERLGRLYSKAKVLTDKNPYFISETKGFL

SEQ ID NO: 33195 - protein, 292 aa, Escherichia sp.
  misc_feature (43)..(43): Xaa can be any naturally occurring amino acid
  misc_feature (271)..(271): Xaa can be any naturally occurring amino acid
VKRLQAFKFQLRPGGQQEREMRRFAGACRFVFNRALALQNENXLERAYKNFFRKRAAFPRFKKRGQNDAFRYPQGVKLDQENSRIFLPKLGWMRYLNSRQVTGVVKNVTVSQSCGKWYISIQTESEVSTPVHPSASMVGLDAGVAKLATLSDGTVFEPVNSFQKNQKKLARLQRQLSRKVKFSNNWQKQKRKIQRLHSCTANIRRDYLHKVTTTVSKNHAMIVIEDLKVSNMSKSAAGTVSQPGRNVRAKSGLNRSILDQGWYEMRRQLEXKTACHKVNSDARYVDIQRTPM

SEQ ID NO: 33196 - protein, 403 aa, Deinococcus sp.
MSDSTTSIKTFRYRLYPTRAQEAAMFETLRLTRTLYNAGLEQRREAYRKHGKTLSAYDQQKELTALKEACLEFSGVYSHVLQDVFDRLDKAYKAFFSRVKKGAKRAGFPRFKPATRWDSFKFKQCWNNAKNDWTACGKPVDDGRRISIPKIGNVKIKLHRPLEGKPKSLQIVLDVDQWYAVYTCEVPVQPLPTTGSSVGIDLGTTWFAVTSDGEFIENPRHLGRSLGKLRVQQRTVSRRKKGGNRRKKAVKQVAKTYRKVRRQRLDFQHKTARRLIHEHDLIAHENLQVGNMAQSNLARSILDAGWAGFLFQLAAKAESAGRRVIAVDPRYTSQRCHACGHTGKENRVNQASFRCVQCGHTANADHNAAKNILDRGTSTERGEPLGRAVPSGENGSGVSHAVA

SEQ ID NO: 33197 - protein, 409 aa, unknown
  TnpB Polypeptide
MAKTKDTTVIKTFEYRLRANKKFVAACERTLEQARFVYNCALEHRITHYRATGQSLSLFEQSRQLTEARNELPEVKACLRSIQTDALDKLDEAFKAFFKRAAKGQAGFPRFKGRDRYHTFSQQIEKQRGNPLTGDKLKVPGVGTCRVRLSRPIEGTVKQLRITRRASGWFALLVCELPKPAPLPKTGLSVGIDVGVKDFCTLSTGEVVANPRTLAKHAANLAKLQRRLSKKKKGSQRRAKAKQKVALAHLKVSNTRKDFHHKLSADLVNRFDVIAVEALNIKGMVKNPKLSKSILDVAWSQFFSITQSKAENAGRVFEKVPAAYTSQTCSECGHRQKMPLKIRVFDCENCSHIQDRDLNAAINISNTPERGGIKARGDAIAHLRSGNVMAETSAVPLGTERVAFSHLRR

SEQ ID NO: 33198 - protein, 192 aa, unknown
  TnpB Polypeptide
MRSDLIFLWQACMWHRMGNRGIIPVIIASPRKNWQEGSGNSAIVKRGAAVTKVARLHSHVVHQRKDFLHKASRKITNSYDIVCIEDLDMKEMGRGLHFGKSVADNGWGMFTGFLGYKLEREGKQLVRIGRWYPSSKTCSRCGKVKPSMGLEERIYDCTCGNHMDRDWNASINIRREGLRMIGIDLDRERTAF

SEQ ID NO: 33199 - protein, 626 aa, Nitrospirae sp.
MKIYRLNEFAKLIGKSVQTLQRWDREGIFKAYRNKLNRRYYIHDQYLEYIGQKASPEKKNIVYYRVSSSGQKGDLENQKKAIEQFCIAQGIAVSEWLSDIGSGLNYTRKNFLSLMEMVERGEVAQIIIAHKGRVVRFGYMKKTIKNYCFNATQSKLNELYEIALRYTSVKNEIFQRYGSISGLNYLSYPRQIRNEWVKTNYANKFGLQARYWKQAVDEVFSNIKSNWSNGFRKIKNNIYKNKNYTEVEKHYAFYLLKASILLYKAITFQSFDLPEIFKDKDIRRDKIHKYLKSRLRKYLRTKSYQNKNRSFQIDRNMYDIHKDNKGRTWIGIMGLTPRKRVRLQMTSSTESTGNLRIVLKGKHIEIHQAEDIQVNPIEGKDKRAIDKGFSEVITSSSGRKYGEQFNQLLKKESDRLSEKNKKRNKIRALTDKYEKKGDIVKSEIIKKNNLGKRKYFYQKEINLNEIKQFINLSLNRFITEERPAVMVTEDLRFTNWNKKLSKNVKRYFSSWLKGYLQERIDYKVMLNGVQQVVVNSAYGSQICHLCGRFGVRNGDKFYCEIHGVLDADHNAALNYLARMSDPDITIYTPYRKVKDILQERLRLSNQDSRYSVIKTGQWESERTDYV

SEQ ID NO: 33200 - protein, 372 aa, Proteobacteria sp.
MPRTASEWRTFGAACKEAARLWGDLVERHRRVRRRRLQWPSKGRWQQWAKGRYAGLSAQSTQQIIGEFCEAVHSTRQLRTKGHAEARYPWQKPRYRDVVYTNQDARLRAGRLTLPHGTSGRLCLPIPVPLPGRLMEVRLSLAAVRLVCEIPEVPTPQQCVIGVDLGGNTLLAATDGAKVLLVSGRAAKATIQYRNKRLASCSHAQSTKTKGARQWQRLQRRKARMLAKTHRRLRDLTHKATRKVAEAFPGATCYVGKPFNDAARHLRRRQAQQVSSACNARLIAQLDYKTCGAIAVDEHYTSQTCPVCGERNKGRRLYRCRTCGQTAPRDVIGSVNILHVGRHHVLVPGRSVPNAVQWVHPLKYPGPKPGSS

SEQ ID NO: 33201 - protein, 486 aa, Micromonospora sp.
VRPTVRSARCGRPCRSSDRRRHEARAGVRTLQAYRYALDLTPSQERAVLAHAGAARVAHNWALARVKAVMAQRAAERTYGVSDELLTPGLGWSLPALRKAWNAAKEDVAPWWRECSKEAFNTGLDALARALKNWSDSRGGQRAGRTVRFPRFKSRRRTTPSVRFTTGAIRVEPDRKHVVLPRLGPLKLHESARKLARRIDNGTARIMSASVRRDGERWHVSFTVQVERADRAPARPASVVGVDVGVKHLAVLSTGEMVPNPRHLVDAQQRLRRLGRALSRRTGPDRRTGQQPSNRWRRASARLGRAHARIANLRRDGLHKLTTRLAREHGTVVVEDLNVTGMLRNRRLARHIADASLGELRRQLAYKTEWNGGQLVVADRWYPSSKTCSDCGAVKTKLALSEREYRCQECGMVLDRDLNAARNLAALATEYDPAGSGPVAGRGADRKTLPAGLVAVKRQPGPAHAGQTGTVPPQGETADRVLAEAH

SEQ ID NO: 33202 - protein, 362 aa, unknown
  TnpB Polypeptide
MLKAYKYRIYPNKEQRIFLAKTFGCTRFIYNQMLADRIKSYQENKELDIKKIKYPTPALYKQKFPWLKEVDSLALANAQMNLDKSYKNFFRDKSVGFPKFKSKKTNYNSYTTNNQKGTVYIENSHVKVPKLKSMIKIKQHREFTGLIKSCTISQVPSGKYYISILVDSENFVLPVINKKIGVDVGLKEFAICSDGYREPNPKHLRKSEKRLIKFQRDLSRKQKGSNNRRKARLKVAKLHEKISNQRADFLHKLSIKLIRENQSIVIEDLRVNNMLKNHKLAKAISEASWSEFRRMLEYKANWYGREIIIAPSNYASSQLCSVCGYKNKEVKNLALREWICPQCGTHHDRDINASKNLLKLVI

SEQ ID NO: 33203 - protein, 156 aa, unknown
  TnpB Polypeptide
LVKLQRQLAHKEKRSQNYYKIKKKIALCHEKIVNARKDYLDRMSHEIISENQVIVSENLQIKNMVKNHHLAKSISDVSWYELTRQLEYKAKWNGRKYVKIDIFYANSQLCCVCRCQNAETKNLSVREWVCPVCGTKHDRDINAAKNILAEGLRKIA

SEQ ID NO: 33204 - protein, 399 aa, Pantoea sp.
MLIQKAFKFRLEPTDIQALRLRQLCGCARFVWNYGLAETKRLLDSGNKIPSYFDLSKLLTAWKKQEDMAFLAEGYTDNLQQKLKDLHTAWKRCFDKKLAANAPVFKKKSDGRDSIRFVNFNKYCELRARRVKMPSGLGWIKFRQSREIAGNVKNATITQKGEHWFISFQVEFEVASPKHPSTSMVGLDAGISKLATLSDGTVFTPVNSLKASQEKLAKLQRKLSRKVKFSSNWKKQKRKIQKLHTQIADTRRDYLQKVTTTISKNHAMIVIEDLKVSNLSKSAAGTTDKPGRNVAAKSGLNKAILDQGWYELRRQLEYKQSWRGGQVLAINPAYTSQKCACCGHTSKENRKSQSRFVCLACGYKENADINGARNILAAGHAVLACEVNGASMPSATGTR

SEQ ID NO: 33205 - protein, 366 aa, Sulfobacillus sp.
LVKIHRFCRRRHWLWPTETQLKAHFKQRFPLHSQTVQAIIEKFCATIDGVRTKRKHGDKQVRYPWRFRRYFNPIFKGQALKIQGQHLLLPSGRGREPIRVHLPEAMPTGRVVQAELGFGALYLTITHELAEPVLPESGKAGGLDIGVIHLGMVCDGEEAVAVSGRGLRSVKQGRAKVQATLRKKRARTKPGSRRRKRLNRARYRTSQKVKRVIRNALHHAANQIVEFCLAYGITILYVGDLGTLNDKKRHRRSRRTNQEVGTWEFGRFEQYLEYKLRRHGIQLIQISEAYTSQTCPHCGHLNKVAGRTYHCRACDYRAHRDGIGAVNILNKGMYSGEIRPGEFLVPQRITYRRPVPLKRALRRRCG

SEQ ID NO: 33206 - protein, 407 aa, unknown
  TnpB Polypeptide
MSYGVGLFSQLIEQRNMRVEHYGEFSRSDIAEIGKITKLQIAYVQECRDQALWLWRSYQTRHAEWEKRYKYAKGKWREKLARREPHKPFYRGMQSKIPVRIDKRMGSVEASEQMKLSSYVIRLSTLKKGCRVTIPLNPVEYHKNLLRQGRIVDFQLIKRDGRFYAHICVKYTTPDRPVHGVRAIDLGVRRAVATVLLTPNGPLRRRDFAMLSDGEERHRLNMLNRRFAKLQTARMWQLLKHLRHKRRHVADYTDRLIAKKVADMAERESAMVVVGYPKEVKYDNYRGNGKPGLRRTMHRHFRYGRRIRYILDECAERGIEAETVFEAWTSKRCHRCSSTNTRRISQALFWCLDCGLHYDADWNAAINIGQLVFAERLGRWATEGLAYAGDELTYKPASPEVRNMLMS

SEQ ID NO: 33207 - protein, 384 aa, Thermoflexales sp.
MKLIAQVKLDTKPEQADALKRTMKQTNKARSHLSERARDAGIFGQVNLHKLACHDTHATFPDLSLQIIARSISDVADACKLHRKGKRPFTPYAAITCDQRLLRWCADRQEVSIWTVAGRLHIPYQCGQQQRLMLTARQGQAYLVYRNGGFYLHQTCGVKPPDPDDPDGWLGVDLGKVNLAVAAAGETVSGAQLEAKRRWYAERRKELQSIGTKSAKRRLKQLSRRPASFQKDTNHSISKTLVAKARRHNLGIALEDLNGISKRATVGRAQRSRHHSGSFYPLPSFLSHKAELFGVPVRLVDPCYTSQADSICGHVSKAHRPTCDTFLCERCGFSGPADGVAAFNIAARAGVNQPMVLTEMPKGRLPIAASSEVRDKLSVETGSR

SEQ ID NO: 33208 - protein, 410 aa, Trebonia sp.
MKARCLPVRAIVAVRHASHTGGVQLRYSYRANLTPAGRSAAGRAFGCARVVWNDALAHRTAAHEAGEKYPTDAEMSARLTKSKETPDRAWLNEVSSVVLQQSLADLNKSYRAFSSSLSGKRKGRKAGAPRFKSRKDSRQSLRFTANSRFKILPNGRLRLPKIGDVEVRWSRPLPAAPTSVTLTRDAAGRYFVSFVVEVTPRPLPETDRECGIDLGLSHFAVMDDGTKVTAPKFWRRAERKLKTAQRDLSRKQKGSKNREKARVRVARAHAHVADARRDFHHKLSTQVIRETQAVTVEDLAVRGLARTRLAKSVYDAGWSAFVSMLEYKATLYGRQFRKTGRFEPTSQVCSACGVKDGPKPLGVREWQCAACGMVHDRDVNAARNIAALGRREAQRPWRPGKTSGNAGAGR

SEQ ID NO: 33209 - protein, 453 aa, unknown
  TnpB Polypeptide
MEIPVTMNMAQKYAVSRDNPEEVFQFFLKNFGCARKVYNLSVDNYYKHLEAAGYTSGDKIPKVASLKASELKKEYPYLKEADSLGIANSLMDFSEAVRRFRGQGSHREYTKRALRRDRSGTEPLSFRGLKGIPKFHAKALGDFSYRTAAQYPVGKNGVRPTIRLEGDILYLPKLKGGVRILLHRDFPKDARIGSVTVSMDTDGTFYVSIGYTRDIRVEMSLQQAAMDGTGMPEGLAFLGLDYSQSDFYVDNEGRKANYPKYYRQSEERLARLQKSLARKEKDSLAYKKVLGQIQKLNTKIRNQRKDFLQKESTLLVSEYDAIVVEDIDLRGMGGALTLGKNLYDNGFGMFRQMLSYKLRRKGSCLVKIDRWYPSSKTCCRCGNVLETLDLKTRTYQCPHCGMVMDRDWNAAANICAEGMRIFPEYLRSVVEAEQEAALKAAANRQRRRCRKAS

SEQ ID NO: 33210 - protein, 385 aa, unknown
  TnpB Polypeptide
LKILINGKEDWNAQHAHLRSAGQNYLHPVRNTRRHLLRLPRLLQHGQQNSVEIQDVKSENPQPARLPQAPRRIPCRSANGAILHHPRHRQLSDNQRDAWNPLGDQPAGIPFPRIRPCMEQGLQHPKRRTVEREHARRANQIPYRLDAHAGAISSWKIRHGPTIARNGKWLLLIPSTIELPHPSQPQQVVGVDLGIRFLTTTYDSDGHTDFYNGKEVKNKREHYKRLRTTLQKKETRSARRRLRNIGNRENRWMRDVNHQVSKALVNRQSKPTLFALENLEGIRHATEKVRRQDRYTQVSWAFHQLRQMIEYKALKAGHSTIAVDPHYTSQTCPKCGMIRKANRNKRLHEYQCSNCGYMSNDDRVAAMNIQRLGYQSLVESHSDKL

SEQ ID NO: 33211 - protein, 421 aa, Nocardiopsis sp.
MLTGYRYRLTLTPEQDEQCRTYGDICRAVWNTALDQRRQAVKRWERGQSNPFPGYAYQCGQLKEATTEEEWLKTVPAQTLQQTLKDLDAACARHGTFKVHWRTKHRWKPSFRFPDGKNIQMERLGRRWGRLKLPKLGWVRFRWSRAPRGAVRSATVRCESGHWIVSLLCEDGTAAPEVHAAPTTSVGIDRGVTVAVATSDGDLFDRQFQTSKEAERERRLRQRLSRQRMGSASRARTRAQLSRLTGRVRDRRADFQAQTAKPLCAKNAVVVLEALNTSGMVRSVKGTVSAPGRGVRAKAGLNRTILAKGWHAFEVALANAARRTGTTIVEVDPAYTSQTCHGCGHVEPGNRESQAVFRCKSCGHTENADVNAAKNVNAAGLAVSACGDLAVGRSVKQEPPSRLAPGSGWNPGPLKAGRTSK

SEQ ID NO: 33212 - protein, 394 aa, Nocardiopsis sp.
MVTPVKIVVSVKLQPTPEVASALRDELTACNEGANYVSEVAYEHYGLKVHEYALRKLVYAELRERGIKSAAAQQLIKKVVDAYATLRANIKAGNLGPEKSKRRRKAESKPIVFRAEAAQAYDHRNMGWDIDARTVAITTRQGRMKGVRFVCAPEALKTLAAYRKGEADLICRDGSWFLIATCDVPEAQTYEPDGFIGVDLGIQNIATTSTGCQTAGRKLNRYRKRQLFIRKKLQKKGTKSAKRLLKKRSRKEARCSKDINHCVSKAIVTEAERTGCGISLEELKGIRNRVRLPKPQRVALHSWAFAQLGDFIVYKAKRAGVPLVFVDPAYTSQMCCECQHIDNRNRVHQGLFICRGCGVVAHADRNASRNIAQRGETVWNAGRESRVPAAQPTG

SEQ ID NO: 33213 - protein, 460 aa, Nocardiopsis sp.
VKHNRGHKARLYPEPEQAAQLEDQGHVARAVWNLLHDWWTMASENRRVSLKDADTAIRQARKEIGWLSVLPAQAAQQVLRTYFKAWRNCWEGRAEEPKFKTRFRSRMAIDVPQGEGLGVPRITRRWGIVKVPKVGAIRFRWTTDLPVGKRADADNKVTGARLVKEPDGWYVVFRVRTEVKEPSPHTGPGIGIDRGVNKPLALSDGSFREHGPWLGRAEAERLRRLEKKAARQKRARKSGGKTSNRLKRTYDQIAGVRARAKRRALDWQHKTTTALAETFGVVTVEDLDISNMTRSARGSVEAPGKHVRQKAGLNRAVASEAWGRTVTMLAYKLADRGGHLVKVPAANTSKRCHACRTITEGSRESRERFVCKNPGCGWAGDADTNAACNVAEDAKEQAPQDIAGARTWSPRGCPGDEASTISCGQVPSAESSHLRVGEDVNARCATPLQRSTGLSAGRRC

SEQ ID NO: 33214 - protein, 393 aa, Nocardiopsis sp.
VESTPITFRQDAAQPYDDRSLSWNHDAQTVSMWTVRGRMKAVRFACSPEAGKMLRESRQGESDLVLRDGTFYLVATCDVPDPNVYEPDGFIGVDLGIANIATTSTGYLAAGRKLNRYRRRQQRLRAKLQAKGTKSAKRLLKKRARREQRHAKDTNHVISKRIVTEAERTSAGIALEGLTGIRQRVRLRKPQRVALHSWAFARLGQFITYKARRAGVPLVFVDPAYTSQTCAECGHVDKRNRVDQGTFICRGCRVVAHADRNASHNISHRGEAVWNAGRKSHVPPANPLGSQAKRGELLTASGDVHLQARSFRAEKLTLPPAEIAVHPTESLESHEFYFMCDDVEATMRELTAKGVDFTQPITDAGWGRLTRFRLPGGGEIGMYEPRHERAIDL

SEQ ID NO: 33215 - protein, 288 aa, Nocardiopsis sp.
RVESTPITFRQDAAQPYDDRSLSWNHDAQTVSMWTVRGRMKAVRFACSPEAGKMLRESRQGESDLVLRDGTFYLVATCDVPDPNVYEPDGFIGVDLGIANIATTSTGYLAAGRKLNRYRRRQQRLRAKLQAKGTKSAKRLLKKRARREQRHAKDTNHVISKRIVTEAERTSAGIALEGLTGIRQRVRLRKPQRVALHSWAFARLGQFITYKARRAGVPLVFVDPAYTSQTCAECGHVDKRNRVDQGTFICRGCRVVAHADRNASHNISHRGEAVWNAGRKSHVPPANP

SEQ ID NO: 33216 - protein, 384 aa, unknown
  TnpB Polypeptide
MTQVLTISCKLKVSDSQAAKLDGTLDAFAQALNWVNQNTPEKIVNAIKLQSLCYREIRTRFGLSSNLAQQVCRRLAGARKIAQQKNRPVKAFKGGFVTYDARIFSFREKNWTVSLTTVDGRERFELAIGNYQRGNLAGSNPKSATLVKRKDGSYYIQICVESQPPEQQNTAKVIGVDLGRTDIAHTSEGDNWNGQQLTKVRDHYSKLRAVLHKKASKGTRSSRRRCRGLLQRLSGRERRFQTWVNHSISKIIVSRAKATCSTIAFEDLTGIRERVNQQPRSKTERRRSNSWAFYQLRTFISYKALKEGVRIVLVPPAYTSQTCHKCLHIHPDLNQSYRSGKRFTCGHCHWDGDADFNAANVTALLGLTVNQPRGSWLACQLQGY

SEQ ID NO: 33217 - protein, 437 aa, unknown
  TnpB Polypeptide
VHHFVETKKSRLEASIRPLHCFLCGAEILSACYREERRTFLRINLPIILLDDIVMHVKLVAQIKLLPDSEQFDALKTTLFSANAACNYVSEQAWQTKTFKQYDLHHLCYKDIRTRFGLSAQVAVRVISKVTDSYKLDKKCIRTFKPTGSIAYDDRILSWDFPGSTVSIWTTAGRIRILFVCGSKQKALLRSRMGETDLSLRKGKFYLSATCDIEEPTLIKTSDALGVDLGIKNIAVDSDGAVHSSSKVNNVRHRHRRLRTKLQSKGTRSSTRKLKELSGKESRFAKDVNHCISKKIVAKAKGTKQALALEDLTGIRMRITVSRSQRAILSSWSFGQLRAFTEYKAVREGVPVIFVDPRNTSRTCPTCGHIDRNNRRNQRIFSCVVCGFAGLADHIAAINIRRAAVNPPIVARDDAKAKSSELRRSAVTNPVSLLRGD

SEQ ID NO: 33218 - protein, 389 aa, unknown
  TnpB Polypeptide
MLRTYKYLLRPNIEQIKQLDYLLWQSRLSYNSALEQRITIYQETGRGINYGAQWTYFRDLRRENPDTLGKINASSLQHLLRRLDKSFSAFFRRLKAGEKPGFPRFKSRNRFHSIEYTYGDGCKLRQNEHGRRSFYIQSVGEIRMCYHRAIPDEAKIKHVVIKQVGERWYACLMLDLPEPRARQNPTGQQVGIDVGLKNLAAFSTGELIENPRWLRESLNKLRRLQRHASRQVKGSNRQRETYCLIARLHERVSNQRTDFLHKVSNNLVEENDLIAIEDLSLGFMNRNGRLSLSSHDAGFGLFRQMLEYKAESAGIQVIAVNPSNTTQACSGCGNIIQKNLSVRIHECHNCGLVLDRDVNAARNILTFAKYDPLGRGGQPVTWAIAPSVG

SEQ ID NO: 33219 - protein, 412 aa, unknown
  TnpB Polypeptide
MRSQKLRLKPTKEQERLMWWYSKVFRNYWNLLVDIDKRNNKGEFDEILSRNGNKTYYSKFYDREAYRLSQMNYLNLAKVVVAKNYEEDNETWSWYYKPNQTFIYNFLARELVKIRRQNKGKLNFRDSNKVQPNFNVRCDTFPNKTRLSRIYLKDNGKLQIPTLGDMKFGSFRGDFDLSCKKQVANVSFDGKYWYLSYVEDIEVQVTDLPEYTDGVGIDLGIKPLATVSDGTTIPNIKTFRRVRILEKRLKRLQRKVSRKYLINKCNKHNKTKNIIKLERQIKLIHRSIRNIRINHIRKFVSELVKTQPDFIAVEDLNIKGMMKNKHLAKDIANCSFYTIREHLIRKAKERHIAVRLVDRFYPSSKTCSYCGSYKKDLKLKQRVYRCNNCQEKIDRDLNAAINLAQTDNYVLA

SEQ ID NO: 33220 - protein, 379 aa, Frankia sp.
VVKRAYRYRFYPTPDQVEQLAKTFGCVRYVYNRALSERRRAWVGKRRRISHAETDRMLTGWKRDPGTAWLAEPSKGPLQATLRHLQAAFVNFWEKRDGPPSFKKKGRALDAATCFRNCFSFRDGQVRLAKQEQPLDVVWSRPLPEGAVPSQVTVSRDARGQYHVSILVEETVAGLPVSSGQVGIDAGITSLVTFSTGEKVTNPRHEKADRARLARAQRVLSRKEKSSANRAKARARVSRIHGRIADRRRDHLHRLSTRIIRENQTVVIEDLSVRSMVRNHSLARAISDASWSELRRMLEYKADWYGRTVIAIDRFYPSSKTCSVCGSRVGKLPLDVREWACHRCGTVHDRDVNAATNILAAGLAVAACGEGVRPPRSQE

SEQ ID NO: 33221 - protein, 521 aa, Haloterrigena sp.
VSSYLSLPLRLPDEERERYSRLTTLTTRTANTLLGQYWTPDHLIEINESSYQAWKYFDEQEAFDELDIYLPSRYKRCLLQKVGETLRSHVDKREAFQTIKPLLPDHKIRRIHSRRIKEKLWGSDEYLSSGYIELLIGQLNAYYDVHGEYPDTYFDFQDCPEYSSGVLPYSADDGPTSGQVVKYQYNESTQQLTVELKTPDTLEPDTYGDWTWTEYTLDGYEAFHELVDYGDLSAPEFHPNTSKRGDDYYELSFPVEVEHADTPDNVDTVLAIDGGLRKDATAVVVDNDGEQLATPYFIQNTERKRMRNLNRERSQLTAKLAYLRRQGRNHTDYFKHVQSEYERVNNKIRHKREQLVHDVANQVLALALVYDVDGIVHEDLRSLSPPRGEGQLSWELSSWARREIIEKIEYRADLAGIHVERVYSGNTSRTCPRCGSTGHTTKSPDHYCEVWHGSHFRCDNSRCGFQADRDYVGAVNVARVFYAESSKLDSGFTSSYTGDCEIELAGRSVGSRPVFGTSLIT

SEQ ID NO: 33222 - protein, 611 aa, Streptomyces sp.
MGKRGRGAKKREPRPRRALSAPFVVAPPSGCRIRTRLHLSPADVVVLRAVGAHLGALAGVDLAARVRIGNVPAARNRRAERKKALTGRSSSRWAGSITRTSEDQYQLARRALNARIGSLRQAIATITARLAIAPGSRERRGRRWVRGYADNAERRAKQQRLQILEGELRRAVRERESGRVRITRGGRRLLHSRHHLYDSATSPKPLSEADWRAQVEGWGEVWSARRMFLTADGEAGAPFGNYTLSINPADGQVAMVLPDPLRPAYANAPRGRYVLDAAATFSHRGEAWADRIASGASVRYDITYDPTRGRWYLDASWSATAKGQKVTVPALETLRRHRVLAVDVNADHLAAWIIDPHGNPVATPHTIPLQLSGLPATTRDARLREAISQLLHLAQHHECAALVIENLDFADARATGREKLGRGRRGKAFRRTVAGIPTGKFRDRLAGMAHHAGLSVIAVDPAYSSRWGAQHWLNPLKEQQTSSGSTTVTGHHAAAVVVGRRGLGCTARRRNDGPRQTPATTASRRAEAGAVRPEDRTGTTAPVASSHHSTGRTERTAPARTSRSTLVVRQTRARPPGKHPPHGPTTVRGPSIHDQLTLFGMPDTANIGQST

SEQ ID NO: 33223 - protein, 333 aa, Desulfotomaculum sp.
MRSFKQGNGLPKFRAWKKKWFSLLYDEPNKGFRINGRELKLSLGTNKEGKRLYITLALEDAPASPESTIKNLRITKDHKAYYAVFCIEKPDKKPAKRLKWIALDPNHKNLMVGINQDGVSYEFKNLTQIKYWDKVIDRLKSKRDVCLRKAKFIETYEGRGYWQPSKRWLRINKALDKAYNARREQIKQGLYAIANRLAKTYDLVLMGDYTPTLETAKYDNMHRSMLNQTAIAKARKIIAWVMEKSGKHFKEVAEEGTTKTCSFCGHEEKKDPTVRVFTCPNCQTTLSRDINSAINIAKKENLLPCLGYVEDLSRTTYTVAWDYTRCNLMVQMN

SEQ ID NO: 33224 - protein, 362 aa, Desulfotomaculum sp.
MQITYRFAIHPTNKQQRKMFHTLKLCRKLYNWALSERQRVYKETGKGLNYTQQQNIIPIYKKSHQEYKGIQSQVLQDVLHRLDFAYQRFFAKEAGYPRFKDRNHYTSFTYPQVDEVKKTFSKPGYIYLSKIGFVKMTAHREFIPSLISRANVKFHGGKWYVNLTAEVEAPPIKNTIGNSVGIDVGLEFFAVLSDGTFIETPKHYRKVEKKLAKLQRQLSRKVKGSNNRGKAKAKVAKLHAKVANQRKDFLHKTSLSIVKRYKYIFVEDLKVKNMAKNKKLAKSIHDAGWSMFGSFLEYKAIQKGKVFLKVPPQGTSQECLCGASVPKDLSVRIHQCHVCGLVQPRDLVSAKLIERRGLAMIA

SEQ ID NO: 33225 - protein, 360 aa, Desulfotomaculum sp.
MEQTITLKIKLYQPTQAKKQMYQEMADRTTEFANNYLKLDKKDRPKTSKEAKEYSKPLPSAVLAQAIRDIKSKKKVKRFKRLWPNFNNQNFKVEKEVSKDGGAVWKASFPTLERRVGVPIVAQSYQEKYLNLLLSGEVKQGSARLIRCGKDWYIHLSIVLTVEQTKRTEKNMGIDLGLIDLLVASVNGQTLFFSGGELAYIRRHYAELRRKLQKAGAHKALVKLGDKEHRWVTDINHKISHAVIEFAKLHGVTKIRLEDLTGVRWTKSQRKGQRKDRGRSLHSWAYYQLWQFIEYKAALAGIQVELVNPDLTSLTCSRCGHVHKSRPKGRWFTCKRCKKIKHIDVNGADNIAQAISGLAG

SEQ ID NO: 33226 - protein, 457 aa, unknown
  TnpB Polypeptide
MLVFCTAIRYSFKRLLEEKKIGDLEKEVSGKYKLNIRQAKDAVENARQTMKSQRELVKMNYDNYKNKVSKIEKLLNSKDKKLSDRKQNALMSKLDKRKRKLQYYKKFLDTNTIPPVIFGTKEIFLRRCKGLITDEEWKDCRNNRIYSRGDKTKNGNPNLRVVTLNSMTFLEISALEKTQNNRAIKIQVPLYLPQKLSKKTGKVNGINYREMFLNHMKTGEAYGVELIKKDNKYYVHITFELPKTALIYRIHNGIVGIDTNPDGFAITMIDNKGNLIGHNILKQHELLYARSNRRKNLCGELVKQVVLIAKKYNFSIAAEDLRFKDDTDVTRKFARVKHQFIYKTLLTMLESACIRECIELSYVKPQFTSKIGLYKYCHQYGISVHNGAAMVIARRAYGYKEKVPKILKDRLIFDKETFDKKNEWLKWTIINKIIMKKGGNKPDLWLRDRKQILGLVS

SEQ ID NO: 33227 - protein, 603 aa, Salipiger sp.
MCTTARSRIEPSRRESRDLRDGGWAGAEPVPAKKKKDKIKRADVFEVPANACKIEAVEQLWVNWQKGLRAEALVARRDVMSGRGLREKLLAAEEAREPEIVASKARLGAAEQQMVRAQAVGTIKSWISNRENEIAEMIERRYTPKRWRGKARRRFEALPDDGRRALEDEFAELKADLRAINDQQMWMVSPDATILRKKGGQPVSAKAQWIARKMFLGLAARRSWPKFRNMAMRLDSRAGAGNRWLEPEQDGLFTWWINLKTPSGRVALPVRGWRRGKNKTGKGANREGALGKTINLVGNEDGTLRVALDRDMTEVFAASRDAYEPKIDVLGLDFGLRTLFATSEGDLLGQGYLGNIMPLVERADRIAAREQRNGRKPRDCAAYRDAITRIRGLIETEVNRALNLAVELHKPRVIAVERLDFRGSNLSKRMNRILSSCGRGVVREKLKDLTDRHGIEIHEVDPAYTSKTCSSCGYVDGRQRNGEKFHCRHCGKKIHADVNGARNIAAAAGSAEDAGGCSAQRGVKPCRHRRRPRVPLSVSRTRSATLREIVRRFDGQYPNLAAVSRPKRGKEGTRESACDPRETNPYFKQHSLREEYPMCAVST

SEQ ID NO: 33228 - protein, 382 aa, unknown
  TnpB Polypeptide
MVVRAIKTVRQSCEPTKEMLDLMETFRLMVNRCIQIGLENNITSLRALSSKSYRQLTAFKTPSYYKLCAISHSVGILRNFRKALRRGRKVRIPFAKQPMLTTCYGFKILDCRLRLPLGNQQSVWIPLNQHTQEVLSDPSLTVRSICLIARTVSISFSKEIAEVEPAGLIGMDRNLDNVSTVSSDGSIRAYDLSKATEIKAKYRAIKTHLKRNDARVRKQVFGKYGRKQRNRITQLLHLTSKDIVRQAKANQFGIVMEKLTGIRRLYQRGNGQGRNYRFRLNSWSYAELQRQVEYKAKWEGIRVIYVSPQKTSSTCAICGSHATECTERRVWCPKCRTLVDRDVNASRNILGRGMRFVPIAPPSEAMVEEPPMAQSSKSMGVS

SEQ ID NO: 33229 - protein, 362 aa, unknown
  TnpB Polypeptide
VRTVCIALEVDADASEKMHQTRRLYGQACNLLVPIVVSDTDRKKRLWQRYNLHKAAYPMVRTKMSVLGAQLACNVMRSVSSMYQSWISNHPNFSKDKKMVLPSISFRNPVVHLDKNTIRFFNNYTEASVYTVNGRVGVRLRPGKFQLSQLAGFLAEELAGTSKENRIYRLGECNLVWKCGIKGTPSRWELHIAIEKKLKEVSLDNLSLNQVMGVDVGENNAAALSTGRIFKAGKMKDDRDKYLSSRARFQRNGSRSARQALRKASGREKRHVEQINDEISKSIIEDAAERNIRLIVLEDLTNIRERIKAGLKVRARLHRWPFRELQQKVVDKACRAGIEVIFADPRYTSQTCPHCNAIGRSA

SEQ ID NO: 33230 - protein, 383 aa, Okeania sp.
VITLTYQYKLKTTKQQEAEINQILDVCKTVYNYALRERKDWLSSRKSLINSCSIISEYIIPVDAPYPNYNCQAKSLTVAKKTNSRLKSVNAQVLQQTLKTLDRAFVDMKSLGRGFPRFKKRMRSFVFPAMLKNCLGNNRFKLPKLGWIKLRQSRPYPENMVAKQARIVKKASGYYLMVSFQSSELVPDNPVGKKSLGIDAGIENFVATSTGKLFTSPKFLLGQLRELKLLQRRLKNQTKGSSNGLKLQNKIASLHERIANTRRDWHFKLAHQLCDLADNTFVEDINFTSWSKGIVRKQSLDSGIGKFINEILPYVFWKRGKYYAKVDKNYTSQECPNCGYLNKKKLAERKHNCSNCGCQVNRDVAAAKVIRNRGLRAVGHTVK

SEQ ID NO: 33231 - protein, 487 aa, Mycolicibacterium sp.
VARFEIPEGWTVQAYRFALDPTPVQLRALASHAGAARFAHNHMLALVKSVMDQRAAERSYGIPEDQLTPALRWSLPALRKVWNARKDQVAPWWAQNSKEAYNSGLDGLARGLDAWSKSRTGRRAGKPVGFPRFKTARARRSVRFTTGVIRVEADRRHVSLPRLGAIRTHESTRKLARRIELGTARILSATVGQDSAGRWYCALQAIVAAKTRPAHARRSMHPVVGVDVGVKADALLVVASPDGIEVDRIRAPKSLSAAQSRLRVLGRRAARQHGPYDPVTKTRQTPSKRWRKTAARIGRTHARAAAVRRDVLHKATTRLAQQHQIVVVETLNAAGMRATGGARKRGLNRALADAALAEIRRMLGYKSRWYGSTLVEADRFFPSSKTCVACGRRKPNLTLADRTFICDDCDAPPIDRDLGAAINLARLGEPRTRGEQSPAGSGPAAGRGATRETETAPAGAAAGCEASTPHHQLVDQTGTASPQGEAA

SEQ ID NO: 33232 - protein, 366 aa, unknown
  TnpB Polypeptide
MLILSQIYFYLGSFHIKTFQFRIKDSNKTKQLSALASKVNFVWNYCREQQLWAISRGRKLLYTSDFEKLTAGASKELGLNSAVIQAIVKQFVKSSTQHRKTAKWRSYKHNLGWIPMKNTAIAVNNDTFKFNGIKFNFWKSREILGNIKSASISQDSQNKWYINITTDYQPELYSGDGIVGGDLGSKDLLTLSNGVKYANPKYYREYQRKLANAQRYKKSKLVRKFHKKIANSRKDYLHKITTQIANDNKIIVLGDITSKNIAKNHRLSKSVYDAGWFMLKTLLGYKAIERGSVFLLVNEYNTTRLCNVCKVVDANSPKGISELNIREWKCKGCGTTHDRDVNASLNILAIGLNSLANKTTSIQKLS

SEQ ID NO: 33233 - protein, 396 aa, Cyanobacteria sp.
MPVRRVTFRLYPNKKQEQVLRYHRKLHKDLYNAAVCNRFTQYQKFGHAVDYFEQQNSLPAFKEVWIEYKECNCMTLQATLKRVDFAFGRWFKGLGKRPKYKSIRHYGGWSYPSKTGWKVHTTGDNGYLELAKIGSIQMRGKARTWGKPTTCTIVYRNSKWYASITIEVEKIARATGIGAIGIDFGCKVALAVTNGETHSFVEAPKFLRKAEAKIKHLSKGKRRQTAPNRKKKQKASSRWKKAQAKISKVTRKVANYRQNWVHQVAAELVSSNSFVATEKLEVSKMTRQAKKGKRKKQKAGLSKSILDVGFGMLRSAIKYKVTEAGGVFVEVPTKTVKPSQTCPNCGNQHQKTLDERVHQCKLCGFTLDRECDSFWRNPQREDSRLLSSNRKGRVRT

SEQ ID NO: 33234 - protein, 402 aa, Streptomyces sp.
VIRAYKFLLRPTARQAVALGEMLREHCSLYNAARQERRDAYRHSSKMSIKYGEQSAQFKEIRAFEPDRQGRWSFSSQQATLRRLDKAFAAFFRRVKAGQKPGYPRFKGVGHFDTVVFPKDGDGCRWDSTPHDMQTRVRLQGIGHVRVHQHRSIQGRVKTISIKRDGSRWYVVLSCDDVPAEPLPATGAVVGIDMGVSHFLTTSDGAHVANPKFLDAAADELADAQRHLATFPKRTRQRTKRHRAPARKVAKLHAKIRRQRLDFHHKTANALIRDHDLIAHERLNTAGMTKAPAPKPDLSTPGAFLPNGAAAKTGLNRSILDAGWGQFLVILANKAESAGRLTIPVDARNTSRTCFECGHVAKEKRVTQAEFQCTACGFTANADHVGATNVLNRAGLALCDVA

SEQ ID NO: 33235 - protein, 227 aa, Streptomyces sp.
VRVVKKAVDAYATLKANLRAGNLGVSTSKRYRRAIGSPVSFRPDAAQPFDDRCLSWQYDARTVSIWTVDGRMKGIRLACSPDQLKTLVAYRKGERDLVQRGGKWFLIATCEIPDPQVYEPVDFIGVDRGIVNLATTSDGSNYQGRHLSRYRRRQARKRAELQSRQTRSATRRLARRALKEKRHATHVNHRISKEIVSVAMGAPPARAKPSVGEHRSRHRRRGTGRDP

SEQ ID NO: 33236 - protein, 504 aa, Salmonella sp.
MKPSLSTAGPQARPGPETSIYRRAGGSGGQASSAVSPCEPKACQTRFVTIERAYRLRVYPTRAQAAQLARLGGACRWVWNWALARRSEAYKADGTRLNWVALSREFTALRAAPETAWLGDLPREPFKQVLRDQEQAFANFFAKRARYPNFKRRCLQMALRFMLDQRKEQVERGTGRWAWVKLPGLGRVKLRRTEPLVGRLRNVTFSRDAAGHWYACMAADGVPAPEAPTPMLDAVGVDLGVGSVAVLSDGRKFAASRELEAQQRRLRRYQRRFARQRDAAARAAGLDPSKPLPKGTRLDLSNRAKRQQQRIGRLHVRVAATRNDQLHKVSTAIVREAAVIAVEDLNVKALARSGYYRAFRRRFGSAAIGELRRQLDYKGAWHGRAVVEVDRFFPSSKTCSACGHRQAAMPLSVRRWTCPACGTDHDRDVNAAVNLCTEGLRLLASPEGAATAGTAGSHARGVSRALRASSTGGKAGTLKREAARKRSCGCSRATHQCELHMLCV

SEQ ID NO: 33237 - protein, 456 aa, Nonomuraea sp.
LISAVGVEEVGVRRSFKFLLRPTAGQVAALTACLDDHRDLYNAALEHRRTAYRKAGVTVRYGEQSGELKHIRADDPGGQGRWSFSSQQATLRRLDKAFRAFFSRVKTGSKAGLPRFKGRGWFDTVEWPKDGDGCRWDCQPEHPAATFVRLQGIGHVRVHRHRQVLGTVKTISVKREGSRWFVVLSCDDVPAETLPATGVVAGIDMGVASLVATSDGVHVANPRHLAATATRLAAAQRDLARKRRGSRRRRTAVARVAALHAKVRRGRLDAAHKAALALVRDYDVIVHEDLKIANMTRSAGTIDRPGRNVAAKSGLNRSVLDAGWGVFLQVLAYKAESAGRELIAVDPQKRRSRADRSRSPQHLPHVRPLRALRQGEPRHPSRVRLSGVRTHRARRHQRGNQHPQGRACPSPGCGSGLARSRLLQETEESRLPVCAAWRRVGPVPGGPGVRSRTTGR

SEQ ID NO: 33238 - protein, 404 aa, Escherichia sp.
VKRLQAFKFQLRPGGQQECEMRRFAGACRFVFNRALARQNENHEAGNKYIPYGKMASWLVEWKNATETQWLKDSPSQPLQQSLKDLERAYKNFFQNRAAFPRFKKRGQNDAFRYPQGVKLDQENSRIFLPKLGWMRYRNSRQVTGVVKNVTVSQSSGKWYISIQTESEVSTPVHPSASMVGLDAGVAKLATLSDGTVFEPVNSLQKNQKKLARLQRQLSRKVKFSNNWQKQKCKIQRLHSRIANIRRDYLHKVTTTVSKNHAMIVIEDLKVSNMSKSAAGTVSQPGRNVRAKSGLNSSILGQGWYEMRRQLEYKQLWSGGQVLAVPPAYTSQRCACCGHTAKENRLSQSKFRCQVCGYTANADVNVNGARNILAAGHAVLACGEMVQSGRPLKQEPTEMIQATA

SEQ ID NO: 33239 - protein, 397 aa, unknown
  TnpB Polypeptide
MISQTSYNDISKYFFIDKMLIQKSYQYELIPNGEQVRRLKQFCGCCRFVFNKGLEEVKKYYETTDHFLNYVQLAAFLPKWKQDCDWLKDCNAQVLQQSMKNLSRALMNFSAKRAGFPKFKTKGRKDSCRFPQDVKSDQNNNHIYLPKIGWVRYRNSRTIIGTIKNVTVTAKCGKWYVSIQTEYEQEKPVHSGSDIGIDMGIVRFATLSDGRYFEPINAFHSLKGKLAKLQRQLKRKTKGSNNWKKLVAKIGKLHHRIVNIRKNFLHQISNTISKNHANVYIEDLKVGNMSKSAKGTVENPGKNIRQKSGLNRAILDQAWYEFRRQLEYKLRWRGGQLILVAPQYTSQCCPACGHTAKENRTTQALFACMQCGYSNNADVVGAMNVLQRGRALLGAAG

SEQ ID NO: 33240 - protein, 404 aa, unknown
  TnpB Polypeptide
MRNTTHKLFHDKQLRHLHDDLNIIGVVRNHFIALSMRYYRRYGKELSHAKMSKHLTKLKKLEKYAFWNIPYSWALQNMLKRLAQSFREIRTLGRGHPQFKSCKKHKGMTFDGVQAPLEKVLDKQKHKRNHPTYRIRLNGRWYRFALHREIQGEITGVQVTRDALGDVYITLTEDYSEIKYEPKTGKAEGFDFGITADFLIGSNGKTYPSPMFYKRNAKQLVAAQKVYSRKVKGSNNQERERKNVARIHKKTANQRTDHHWKLAIDLCRDFDILFFEDLNLEGMKRLWGKQVSDLAFGEFLRKLKHQSQKRIRSVLKIGRWTPTTKCCCVCGHKNENLTLADRAWTCRECNTHLDRDQNAAMNILKEGIASFGLGEVNPIVLFNKIVGISVASSYPLLNSTNASA

SEQ ID NO: 33241 - protein, 406 aa, unknown
  TnpB Polypeptide
MRLVEQHIIKSNSVYYNELIDLLHKCKNLYNKGLYVVRQHYFQYKDDNTVKYKYLNYYSLEKQLKDTDDVDYRSLPNPVAQQVLMMVDRNFKSFFNLISKKNRGEYSERIRIPRYLNKDGLFTAVFTTLAFSQKWIKTGVIKLPKQFKFTTRTNKTNIQQLRFVPKNGYIVLEVIYNKKEKPRSEDNGKYLGVDIGLNNLASCVSNTGSCFIINGKPLKSINQYYNKRLAYLKSKLENNKQVSKQIRLLTTKRNNKIKDYLHKASRMLINHVVSNGINTIIIGHNKCWKQEINIGGVNNQNFVSIPFNDFIHMVSYKGELEGINVEITEESYTSKCSFLDNEVISKHSEYKGRRSKRGLFRSSTGKLINADINGAFNIIRKKKEAFDVSKLPEGRGFWWNPIRISV

SEQ ID NO: 33242 - protein, 370 aa, unknown
  TnpB Polypeptide
MEYRAYKFRLYPNKEQEERIIRIFGSCRYVYNHFLGELKKQYETTGYIHVNIPSRNLEELRAKVPWLKETNQNCQENAISDMKVAVRKFLSLKKRGSDSKFPRFRAKRGKHQSYKSINQRNSVEIIDGAVKLPMLGPVKCRISKTVKGDILSATVSRNGSGKYFVSLLCKSVPLPHLPTTGAAIGIDVGLKTYAVTSDGVEYHNPQFLERSERKLKRLKRQLSRKPKGSKRRNKVRVRYAKQWEHVHNQRDDFLNKLSTQLIRENDIICVEDLNIQSMVKDSQRAQAISDVSWGKFRRQLQYKAEWYGKKVVPVSRYFPSSQLCSNCGAKWPGAKNLSVREWTCPECGTVHDRDINAAKNILKEGLRQLA

SEQ ID NO: 33243 - protein, 469 aa, unknown
  TnpB Polypeptide
MKYSPRFRLFPTTQQRELLEENVDIVRQLYNDRLKRFNEIPDASGTLTERVRMARDELPDMKQWWEDLNKVYSTVLQTATMRIRDNKRGLQELQANGYDAGGLKWKPPREFRSFTYNLRGFELDKNSGPTGRGLLTLKKVAGETIDVPIRLHRDLPDGEVKQLTIKQEPTGAWYASFTIQTDQPEKPDVTDIDPDDCVGIDLGIQSFIHDSDGRAIGRLYLDDDRERLEREQRSLSRKQHGSNNWEEQRQQVAEVHADMSNKKHDFKHKLAHFYTAEYDAVFLEDLDVRGMLEADKNARNKHEVGWHDMISIFEHHGRKNGCHVGTVDPAGTTKECAQCGAEMDKPVWVRTHDCPRCGLEADRDLNAAYNVLERGLDELGVVHSEATSSESQSDSDGRTRASLSLTSPEREAFWCANESQSDSLTPVETATAVSADGSGYSATNVVDASRVVEAGSPALKERTASAVSE

SEQ ID NO: 33244 - protein, 382 aa, Gemmatimonadetes sp.
MLKSFKYRLRPTKKQEKILLAHIEECRLLYNQLVCARVQAWEKNKESLSRYEQQATLPMLKQQRQSFSLVYSQVLQQVCQRVDWAFKGFFRRLKERAKTGEKTGFPRYKGQNRYDSITYPQFTNGCRLDDKGLRLSKIGCIRVVQHRPLEGMPKSCTLRRTATGKWFVTISCDIGDTSKKIDIDSAVGIDVGLDNFAMFSDREKIANPRFFRKEEKVLAKAQRKWDKVKKASPKKREEARKTVARVHERIRNRRNDFVHQEARKVVNKYGFIATEKLNAKKMQKNRRLSKSISDVAWSLFRHCLEYKAEEAGIGFKAVDPEYTSQDCSACGHREKKTLSDRVHHCKACGYKTDRDHNAAINILTLGLQSQAACLSESARRQA

SEQ ID NO: 33245 - protein, 182 aa, Okeania sp.
VINGRPLKSINQYYNKVKSCLQSQLQENKTSKRLKKLMLKREFKINDYLHKSSRLIINTLINQKIGTLIIGHNEEWKQKINLGKRNNQNFVSVPYNRLIEMLSYKAKMVGIDVIITEESYTSKASFIDNDFIPVYKEGENNHFTFSGKRIKRGLYFTTSIGLINELRERFFEHYEKSSPKCL

SEQ ID NO: 33246 - protein, 445 aa, Streptomyces sp.
MNSSQDCSDVQFIVQLIHEANFRRILGVQLRYNYRAYPDAAQRRALASAFGCARVVWNDCLRDRKEAHAAGLPYVTSAELSRLRITQAKRTAERAWLADVSAVVLQQSLRDLDTAYGNFFDSVKGRRQGRKVGPPRTVYVAKVGNLKVKWSRRLPAAPTSLTVTKDSCGRYFLSFVVDTEPDILPEVEPETGIDLGLSAFAVLSDGRKIDSPRFMRRAEKKLKRLQRELSRKQKGSKNRAKARIKVARQHAKVTDRRRDWHPKASTQIIRDNQAVYVEDLAVSGLGRTRLAKSLYDAGWSAFVGMLEYKAALHGRTFAKVNRAFPSSQVCSACGFRDGPKPLHVRQWTCTTCGAVHDRDHNAARNVLFEGRRIVAAGRAETPNACGAPVRRAHVPAQRGEAGSPRKGQPTQAGIPALQAREHVKRPCRRPGPDPDDGVLGVVRDG

SEQ ID NO: 33247 - protein, 518 aa, Streptomyces sp.
MDVEVLRQVGAHLGALASRDLKARCRDGLGHDAGAWAARKRELTPVSSARWAGAITKASHDQWALARRGAHAHIQSLEAGVRTLRHRLSLPVGEKGSKRAPGGYRSRREWHAKTRRLHDLEDRLARASADWEAGRVGVVRGGKRLARTRHHLAAAGLTEAGWRERWEAARWFVQADGESGKRFGNETIRISPDGEVSIRLPAPLAHLANAGHGRYVLTGRIRFAHRGQEWADRVAAHRAVAYRIHHDTTRGRWYLTASWQKPATRTVPMAAALAEGVIGVDMNADHLAAWRLDTQGNPVGDPRRFSYDLTGPADHRDAQVRHALTRLLYWARTCGVKAIAVEDLDFTAEKTREKHGQQKRFRQLISGMPTGRLRTRLTSMAEATGITIIAVDPAYTSRWGAQHWQTPLTTPTRRTTRHDAASIAVGRRAQGFPIRRRTAPPRTHQSDGCGHRTVQAGPETPGREGPRPRIPGPRTRSVPPDTARTRATRTPNTVRGARSEQEWVQDSLLLTEWERSVL

SEQ ID NO: 33248 - protein, 636 aa, unknown
  TnpB Polypeptide
MLQKLSGRKCNNLDLEVLSQSLANYRKAVNLILEKVFSDTSYAVSLGEMLEQSRGMAYLVLRKERCFKWKPDNEFGELVYERLHRNALETAARIVYAHYTRRILVNSLLDLLVSDDAQLLRLMANRRIPSDLVRRVKETIERKSNGSYHYALSACRQVRSVLRTKVREAYPLEEGERRRSTRELLETTSPERLQTQTLIINQVRKWKKEGFPFTTPTFRRNTLDFSASTENATGQGYWFKPDPEREDEIILYIKTPPGILGHELDTDSPYKSQTVRLRFLNWFPRKAKRARRKAQQARAKGHIQRAFQLDYRAARFEDMGEQLKNTIKLQQFTRELARERVQPEKNRVQIDDLKTAINALKKSRRSAPPLIKVVGKQVTLSIPFVPPSDEMLKDTLTSSVARKRRAGVDRGLRHSMVVSVKNGDDAYEERLIGRQELYEKRERLRQQTRVLMSQVALKRNNWEKKHARQQPPAIILKKERELESVWRKVRRLDKEISHQVAAETVWLCEHHGVKTIYFEDLRSFQGAGVMRRHSWNLSTNLWGMMIEGVRYRREALGHRDGGVWLVKPAWTSQTCHVCGERGVRVEDEMSTSERRGGEYFYCEKCDEYFHADVNAARNIMHVKQPMKPTAVGGWTA

SEQ ID NO: 33249 - protein, 381 aa, unknown
  TnpB Polypeptide
MKQTLVVKLDTNKEQHSAILETMHRFNEACNYIADIAFELKTANKRELQKVVYYDVRDKFKLSAQLTIRAIAKVCESYKRDKTIKPTFKPTGAIVYDQRILSFRKLEAISILTNSGRLAVPIRMGEYQKVRLDRIRGQADLILRNGIFYLMVVVEAPEASKVDAVGTLGVDLGIVYLATDNDGETFSGKQVDKVREKNAALRTDLQEANTPSAMRHLKRLSDREARFHRDINHIISRKIVAKAKDTRQAIALEDLKGIRKSVTVRRTQRSRLHSWAFCQLRSFIEYKATIAGIPVVLVNPRGTSHICPECGHNERANRPNRDTFRCVQCGFSGNADHIAAINIAARAVEVNQRIVACNEVKAITGIEMEHSYKPPVSTGGN

SEQ ID NO: 33250 - protein, 404 aa, Trichocoleus sp.
MQHQAAKVRLYPTIEQQEILAQHFGCSRWWWNHALNLCIETYKATGKGLTQVALNKFLPRLKKEKETEWLSECYSQVLQATTLNLVTAYKNFFEGRAKYPRFKAKKNRQSIQYPQSVKIVDGCFKFPGRVGIVKAKLHRQIEGKIKTVTVSMTPSGKYYASVLMELDGDNPVVSTDGKVAGIDLGLKDFAIVHDGEKTSKYANPKHLAKHERNLKRKQQKLARKEKGSKSRDKARKLVARVYERVNNVRQDYLHKLSRKLVDDNQVIVVENLHVKGMVRNHKLAKAISDVGWGMFVNFLHYKLDREGKVLVEINRWFPSSKLCSNCHYQISEMPLDVRAWTCPNCGTHHDRDGNAAINIRAEGIRILSVLGTRTAADGGDVSRKQGRKSKLTQSPVKSEAHAIA

SEQ ID NO: 33251 - protein, 310 aa, Enterococcus sp.
VLKAYKFRIYPTNEQKEFLIQTFGCVRFTYNTLLKHHQQSGGGKSKKLTPASLKKEFLFLKVTDSLALANAQQNLKRAFQNYYQGRSGYPKLKLKKSVWQSYTTNNQKQTIWLKDDLLKVPKLKQPIAVHCHRPVTGQIKSATIMAKNGQQFFVSLLCEEQITPLPKTNVTTTLHFSPDQLVSGSDLVFFRTLCQKNVENKLTKAKRKLEIKAKSAQQRGVKLSAAQNYQKQKVKVQQLYHHKQQQKKAWMDELSLHLIKKYDFLYIKVPHNIQEGVFTLTDWQHFLVKLQYKATWYDKKVIFAAAEKVI

SEQ ID NO: 33252 - protein, 409 aa, unknown
  TnpB Polypeptide
LLKAYKYRIYPTKEQIELIEKHFGSARFLYNYFLDYRQKEYAKGNKIGYMQTQSELAKMKKLEYYKWLNECGSQSLQMALRALNNGFTKFFKKQGSYPKFKSKKHTHQSFTVPQNIKVANNRIYLPKFTKDGIKVKLHRELPKEAILKQATISRVNNQYFISILIEDTQEAPNKVKAKSAIGIDMGLENFIITSDGLKYLNKRYFVKSQKKLKKLQKRLSKKRKGSNNREKAKLKVQRVHTKISNQRRDYLQKISNEITNHYDIICLESLNVKGMVRNRKLAKSIADVAWGEFIRQLEYKSLWRGKTVVKIDKWFPSSQLCSLCGANTGKKTLNIRKFDCPNCGVKNIDRDINASINIRNYGLGQLDNRYTAGTVEIKACGVSSNGAIFDNIASYDIMKQEAKSSLAIW

SEQ ID NO: 33253 - protein, 316 aa, Caldivirga sp.
LEPINGGEGYLVLKDWNLRIKYAGRIKWAGKQGTLVIRFEDGRWFAYVPVSVGEKPARSNPRGYVKGIYEKIQIEKPKGGNKAFIDVGLNNLFAVVFNHSDTAILIKGSTIKAEYYYWKREVGTYQAIRDWLRNRGFKTWRKYHAYYLHAEYKQHERLRHYYRTAIRFLAKTLWQMSIDEVFVGYPYMVNKSNSNEYNVNIWWFNKIVNWLGDVLEEYGIRLNMVNEYGTSRQCSICSMKHENGRVMRGLYICPVTGIKINADLNAARNIAKRVGYEVPIPKKILSYIVTTNGVKPLTPMEGVTIETPKINPTSPR

SEQ ID NO: 33254 - protein, 414 aa, unknown
  TnpB Polypeptide
MEKRRTVPVKLDVGSDDTALLQDTVDEFLWAANSVTRHAFEGEYVTTSKTTLHDDTYEDVRNETGLHSNHVQAARNKAADACKSVVEKWNRGKKASLPHFTSPHLVYDHRTATFHDKYVSLATVDGRIEVDYVLPDTERDTPHAEYVFSDEYETTGAELHYSNGNWMLHIHCKKDVESGTPEQATPENSTVLGVDLGVNNLAVASTGTFWTGDEFDHWRQEDENRRGNFQECGTRWAHENMQAVERKEDGRFKLTLHRIANELVDEARDHDCSVIAFEDLTDIRDRTGASWGHKWAFNRLYEYVEYKAEACGIDVEQVDPENTSRRCSTCGFTHPDNRESESFECLKCGYENHADYNAAKNIGLRYLRRNQTGGDGGAPVGVRLNSGTVNANGEYDPPADDSARAGVHAESPRL

SEQ ID NO: 33255 - protein, 341 aa, unknown
  TnpB Polypeptide
LYDFDWDENRSTLAFGVGDVLEDKYDFVHNEQVTLEVRGNPQWDGDDSRLELIYDDTADVFRVTHPVRIQPDKLKQQRLDEFTHTLDPENTTHSAAIDVGANNTLALVTSTGETMVYHARPEFERFQQYTERIASLQSALAEGSYSSHQIRRLYAERTRKRDHSRNAAVKHAAEWLLEQNVDSVYVGDLSDVLESHWSSTVNEKTHSFWSHGQLTDRLKLTLGDVGISVTEVSEAGSSSECPECDSRHIYRDGDEFRCTECGLEAHSEIVGAWNLLQEEVGPMARPAAQRAERRRDASQSSSGEGAYWEWNEHDWILDDCEELSDSRDQTNVSKPVSSQPR

SEQ ID NO: 33256 - protein, 346 aa, unknown
  TnpB Polypeptide
  misc_feature (346)..(346): Xaa can be any naturally occurring amino acid
MVGANRTVILPLETPSSDEDERFHQTVDKYQYCRDRASEYCWHNPTQPDDIVTSKRAVEDALYHDLREETDGLHANLVQKALKDVTSAMDSVTNAWKRGERISKPTWDPSDSWVMTYDTRAGTFSKHDATFATTGSTVTLEYQTPASLEENPYTNYVLSSEWELTTSKLVYRHGQYWLHLGIKRDVSDQHWTTQADTEVSNAPPEDTSRVLGVDLNVKGWTAVTSAGGFHGNADYLNHRRTQDEQLRGELQQTGTRSAYLRLQERSGTESAWFDEYAHSVSNTLIEDARDTRATHIAFEKLDGIRTRMSNLPTYQQWMFGRVQEYVEYKAAEHGISVVSGTHRTRX

SEQ ID NO: 33257 - protein, 409 aa, unknown
  TnpB Polypeptide
  misc_feature (346)..(379): Xaa can be any naturally occurring amino acid
MVGANRTVILPLETPSSDEDERFHQTVDKYQYCRDRASEYCWHNPTQPDDIVTSKRAVEDALYHDLREETDGLHANLVQKALKDVTSAMDSVTNAWKRGERISKPTWDPSDSWVMTYDTRAGTFSKHDATFATTGSTVTLEYQTPASLEENPYTNYVLSSEWELTTSKLVYRHGQYWLHLGIKRDVSDQHWTTQADTEVSNAPPEDTSRVLGVDLNVKGWTAVTSAGGFHGNADYLNHRRTQDEQLRGELQQTGTRSAYLRLQERSGTESAWFDEYAHSVSNTLIEDARDTRATHIAFEKLDGIRTRMSNLPTYQQWMFGRVQEYVEYKAAEHGISVVSGTHRTRXXXXXXXXXXXXXXXXXXXXXXXXXXXXXXXXXXPRWRRRLQLNESQGSSEQMPVFTGTSKIVR

SEQ ID NO: 33258 - protein, 368 aa, Actinomadura sp.
VKLVVQVKLLPTPEQVAALAVTLHTVNVAANWVSARAYESQVFSRAKLQKAVYAELKAAGLSAQPTLHVIRKVADAYKTLHALLDAGLLGKEGSKRRRKAVSKPIAFRPNAAHPFDDRCLSWQYDARTVSIWTTAGRMQGIAFTGSAAQLKTLAEHRKGESDLVLRDGMWFLHTTCEVPEQPLNSDPADWLGVDRGIENLATTSDGDNFQGKALKRYRRAQARRRAELQKKKAAGSRSAARRLAKRTQRESRHATNTNHIISKQIVADAQRTGRGIAIEQLDGIRDRVRLKRHQRATLSNWPFHQLGTFLAYKALRAGVPFQQVDPHYTSQSCPNPWCGHISRKSAPPGAPFCASRAGSLAWPTTSPP

SEQ ID NO: 33259 - protein, 535 aa, unknown
  TnpB Polypeptide
MKKSTTPTFLLELPLAVDPGQTRRLRAHFEAARCLYNALLGEALARLHRMWADPAWQAARAIPKTQKRERAAAFSQLRRAYGFSEYALHDYAKRANCAWIADHIDAMLAQTLATRAYQAVNRICLGKAKKVRFKSKGRSLNSVENKWEKSGLRFVLQPPEEGNQGWLVWGKDCLLALIDWEDPVVKYGLDHHIKYARLVRRKASSPKAQGADCQGYRYYVQLALVGTPYQKKKNTPGQDVIGLDLGPSTLAIVPREGEARLVPLCAELRPDARKKRRLERKLDRQRRANNPQNYDEKGRVKKHGKRRLAWKNSKGYLATRRRLAHQGRKLAAHRKSLHGRLVNEMIRTGNDIRIEKVSYKGWQKQYGKSVGMRAPGMLIEHLRRTVAKTGGILHEFPTRTTKLSQYCHGCKTHAKKSLAQRFHNCACGIGPVQRDLYSAFLAAYLDPPDYLPSSAQYHTYWEGADLRLQAALERLYQRANEGQVLPRSVGITGARARLPKSPSTPQQELVYRRGRLAALGQEQEPSAKRERVSIH

SEQ ID NO: 33260 - protein, 369 aa, Thiorhodospira sp.
MQRLQAYRFALKPNGKQRRLMRRFAGSCRFVYNKALALQQDRREAGEKKLGYAALCKALTEWKAQPQTCWLNETPSQALQQALKNLERAYQNFFEKRADFPRFKKKGVSDRFRYPQGIKLDQGNSRIFLPKLGWLRYRNSRDVLGEIKNATVSQTGGKWFVSIQTEREVEPPVPHGGAIGIDMGIARFATLSDGTVFKPLNSFKKHQHRLARYQRRMSRKVKFSSNWKKAKARVQRIHTRIANARRDYLHKATTTISKNHAMVCIEDLQVRNMSRSAAGSTEKPGRNVWAKSGLNKSILDQGWFEFRRQLDTSWRGTAAGSSPCRRSTPVRHARAAATSLRTTGRRRRSFYASSVALRKTPMWSARSMF

SEQ ID NO: 33261 - protein, 510 aa, unknown
  TnpB Polypeptide
VRFYDTVTRHRFTTDDKVDVDSVSADLAQMVFWMAEAEREVIARQEFHDLALKVLQGDRPIGSLNSWGRKRFSRYDFSFQKHNMNEILVSNVVGALELYAMSVGLFQVMSTHPKETKPEKILSCYRDAYPDAPQPTSGMIRAHLRRYHVKGERKASLPGVSARLNLAVCDTYFAPKTFRDEKDPLNVIVQVKTPSRGVTKIHLRLPDNTKRFSEGKVCRPTIRLNNKGQVVFDIAVEHEVDTRQTKKIIGVDLGKIEPFVATVVDPRTKYRSAPYHVNYKKRLGSLVKAEKKRRDLSAHLYEQADLCERYNRTNHADVLRTEAKRVRAKTTRIKHEISQYVASQVVKIADQNNTHIAVENLSWLDAQGGRWPHAEIQHRIENMAKRYGLKTIKVSAKNTSKTCSRCGAKVSNNSKSRVGTCSVCGFSLNRDVSASREIALRATSPSSRSRERMRSLLRQRALERSSAVTRQSKPVTVLAGIQGHTGTSERKTEATLMMVRETLDSRGSPT

SEQ ID NO: 33262 - protein, 384 aa, unknown
  TnpB Polypeptide
MAKSKTLGIRKNENVDVLCYRFAALPTNEQIIQLNKTIGCCRYLWNRMLGDHNTLYQEIGVVPNNTPADYKSLEECLWLKEVDSLVLANVQLNLNQAFQKFFNGEASHPRFKKKKVCKDSFTTNNVSGNVRMEGKGIRLPKLGILTLIRHRKVKAGGKLKSVTVCHEKDGKWYCSISFEYPKTEPVYPEPSEDMKHIGLDMSAPHLYVDSNGELADFEKPYKKLQEKLAREQRKLSHRQKDSKNYEKQRKVVARLHAKIKHQRKDRLHKLSEQLTREYDLISIEDLDMSALKQTLNLGKSYSDNGWGMFVTMLLYKGKRNGCYIIKIDKWFPSSKTCSQCGYVHKELQLSDRTYVCPVCGNLIDRDEQAAINIDLEGLRILLSA

SEQ ID NO: 33263 - protein, 309 aa, unknown
  TnpB Polypeptide
MCVDSCYKQLEQARYTSGDDLPDISFPKVAALKKDYPYLKEADGLGLANSVLDFQKACKTFRDQKDRSTYRKSALRRDRSGKELLSFRGLKGIPRFHAKSAGYFSYRTACQYPKEGNALKRPTIRLEGSILYLPKLKQGVKLIIHRKLPEDAHILNVTVFMDTDGTYRVSICYSYTFLMEMDYREAATQEQPLPKETRFLGLDYSQKDLYVDSEGRKANYPKYYKRSEQKLARLQKSICRKEKNGKNYQKSMRKIQKLHVKIKHQRHDYLQKLSTELVSRYDVIVVEDINLRAMGRCLSLGKNLHDNGF

SEQ ID NO: 33264 - protein, 586 aa, Hydrocoleum sp.
MSDPKKQPPSLELQSQVSDDGKKKAKLKQSKPRQGTGGTQSKKSNKQQVCPGQLPLFVMRESQAIPNETILRDKLNYCSQDSQNQRSYQKLAADLILSGSDSSPFWTEFAQVISNALSLPTQTDLLDSDLNWLSGYANVMDANSWFSMKANNLQNKNSFKICCPSSTVSVRGFMGCEDTKKKSATKYGKNPYKKSQKVQPNSVFKVPVWPSIELHKIWKQWLAAYRWVYNQCVEFFNRQRTLPKGKSLDQVIQSKQTLLENEWTKCLGKTRQEAVCEAELAYKQAQAANNSPNFQLRYRSCRNKSQVIQFKNDAYRNGTWFPKKVKGMLFCTAIGYQVPRNCDYGTELVYQRGQWFACFPQYIEPTTTGSDQVIALDPGNRAFLTGYDGENVLEIGKGDIGRINRLCSHLDNLLSRAALSKNKRQHYQMRKAATRMRNRIQYLVKDLHNKVASVLVNSYKLIFLPTYETSQMVLKSTRKINRKSVRNMLSWSHGKFADYLQHKAARSCVLVVRCNEAYTSKTCTNCGHVHKNLGGSKIYKCPQCGHIIARDINGARNIMLRALQATAFTVVNDSIVVSDAIPTGAL

SEQ ID NO: 33265 - protein, 378 aa, Bacillus sp.
MEVKGMMINKAYKFRIYPNQAQTTLINKTIGCSRFVFNHFLSLWDNVYKETGKGLTYGACSAKLPAMKKEFVWLKEVDSIAIQSSVRNLADAYTRFFKKQTSAPRFKSKKNNVQSYTTKQTNENIAIVGKKIKLPKLGLVRFAKSREVKGRILNATVRKNPSGRYFVSLLVETEVQELPKTQSYIGMDVGLKDFVILSDGTTYKNPKFFRLLEEKLVKAQRVLSRRMKGSSRWNKQRVQVARIHEYMANARKDYLDKISTEIIKNHDVIGIEDLQVSNMLKNHKLAKAISEVSWSQFRTMLEYKAKWYGKQVIVVSKTFASSQLCSCCGYQNKDVKNLNLRKWDCPSCRTHHDRDINASINLKNEAIRLLTARTAGLA

SEQ ID NO: 33266 - protein, 275 aa, unknown
  TnpB Polypeptide
LPEGAVIKQVWVTLKADGWYATFALEVPDEAVRKPLLKTEKAVGINVGLENLLALSDGTLIDNPKWFKATEEKIALKQRILSKKVKGSKRWRRMCRQIAKLHLKVARQRRDFYFKLAGWLVREFDLIAVEDLNTKGLAQGICSKGVHDASWGIFLNQILPYKAWSAGKAVVKVSPNGTSQYCAMCGACVPKDLSERQHCCPHCGFVTHRDINSAILILKMGLERARKGAGFTLASCLQEAVGFSRQWLTVEEDDVTRKVEKLLKAIDALLRRLQS

SEQ ID NO: 33267 - protein, 464 aa, unknown
  TnpB Polypeptide
MMRGIRFKAHPTHKQQETLSQWMGCARQIWNAKCNEERYYTTFARKYYPLGTYAPIDQKTAQFKNKELTPWLFKCPSQVIRNAAVNWYVTFKRFIKGQCGKPKHKPKTDKGSIHLTRELFRFDRDTNGTLRLFIGTKTNNIGYLSFKAHRKFQIPNSIYIKKECGHYSVSFCYDNRENDHVWLTDAEHLDYLKNQTADYLNDHVIGIDRGVVVPAQSNDQSFDFTIGQKKNKAKAERYIKRLQRKLARQTHIASHRWVKTKKRIANHYAKCRHIRQDFCHQTSHALVESKAKVFIFEDLKVSVMIKVPKAKQDVNGRFISNKAKQKAGLNKAILDKGWHQLEAFTRYKAHQVNKVVFKVSASYTSQECANCSHIHPDNRKSQAHFQCGYCGHVDHADRNASLVIKKRAINLILDTGTVLSAKGVLTSADIGRGAKSQSNKSMLLSVSGNESSKKKRIAATKVAA

SEQ ID NO: 33268 - protein, 372 aa, Micromonospora sp.
VSAGFPRRRRGLVPVRWHHGTFVLDGRRVRIPVGRGAAPLWVRLAREVPYPLEQVRSITLLCEGGRLFLDLSAEIPIATYPVGAGPDPGRVAGVDLGIIHPYAVTGPDGAGLLVSGRAIRAEHRMHLADTKARRRAVARRAPKPGQRGSRRWRKYRRRARMVEGRHRRRVRQAQHEAARSVVSWAVEQRIGELRVGDPRGVLDIEAGRRHNLRLRLRLRQWQVGRLLQVLTDKATLSGITLCLVNERGTSSTCPACQRRVPKPRGRTLSCPHCRFSGHRDLVAAATIATRSPGGGPTTPTAVVLSEVLTHRRAGRHLPGAGQSRRDPRRPRVARGSVGPRWPAPPLGGESLAHKARIHNDHRTPGERSWTPH

SEQ ID NO: 33269 - protein, 400 aa, Rickettsiales sp.
MVKNKWIPKLGTKFKNIDTHSWFDICETFRNKYSKRIKTDIHNDTTLIRSRANRLYPSEEQSEILRKWFNLTRKIYNATTRFIRKNIYTDNKIDKKKVAEFVNFRKLRTNYLKNIKNDLSIDRINSHILDQAIQRCVSMYKSCLTKYKKNNIFEFRIRTIKRTKRYHSFDIEKILFSKVKNGFCTNVLGELKSDKSIIAPEKGCVLVYDRYLSKYVLHMPYEVNVKSMEINDLNCGIDPGIRTFLTVYSRDDVLEIGKNINYEKYFSKIDSLNKSMKYKKAIGKVYDKINNKTKDMHFKVGKLLCSKVIFTRSVNMNLRNILRTFLMNIRVANIIKKSQNVKDILFFVKNKIFVVISFQRKEIIQNKKIKLGKISILFITSRKRLVINNLGGVYSTVPLD

SEQ ID NO: 33270 - protein, 411 aa, unknown
  TnpB Polypeptide
MVIVKDEMLVKGVVFCLESDLPGEAMLLLEDFRLAVNNAVRAGLHARITSRNALNKLAYKDFREQHPRMYAQHLVSAFEVAGGTLKNHRKLVRKGVTGRVPYVKRLMMKAENQAYKLDRKTGIIDLPIRAGCHVELKLVVSQYHRKYLDDTALSLGSLTVLPDRVIVAFRKYAPKPYTPESVISMDTNERSLDGVFVEGDGAKAVKAVFPDIAMIQQLHYDRRRRLQKKKAHDRRTMRRLCRMEGTREHRRIDYRLHQVANSVLKFAEERKSAIVLEDLKGFKSKTSKELNRRLSLWPRRKLHQIIEYKAQWKGVPVIKVDPRNSSRTCPICRRIKYSRMGAEFKCECGWCLDRHINASINLLQTAISKGMAGGLRFNPGAFQHDVMMILYEPAMAARSEPNGTSSIAGVT

SEQ ID NO: 33271 - protein, 367 aa, Paraburkholderia sp.
MAARKKPDPTLSTRTLRMRMKDRHAPELRESAFHVNQVWNFSNELSFKVWERERRFISSNEIDGYTKGATKEGLPLHSQTVQAVSQELVARRIQHKKVKLRWRVSKGSRRSLGWIPFKASALRYRNGQVFLSGFDKPLSLWDSYNLSKYELGSGNISEDARGRWYLNVTVKLKKTPKASLGAVEKSVGIDLNLKEFAALSDGYVVELEKNYRKLESELAKAQRARKKARVKAIHAKIRNRRKDQLHKLSTALVEEYGAIFIGNVNASALAKTRMAKSVLDAGWSTFRTMLQYKSDDAGVWFDEVDEAFSTQTCSCCNTRTGPKGLEGLRIREWACSHCGAYHHRDINAATNILAAGRRRLAVGIPVL

SEQ ID NO: 33272 - protein, 393 aa, unknown
  TnpB Polypeptide
MRDHIAVKFRAYPTMSQARLIDRTIGCARLVYNLMLETRIAHYQTFWEGCNPTPAMFKDAFPFLREVDSFALCNAQLALSRAFKRFFEDKDAGYPKYKSKHYGRKTYTTNLSHDNIRLDGKARRLKLPKLGWLAVRQHKRIPESWNLKSVTVEHCPSGRYVATVLFERDTQTPERTEPANIVGLDYASHGLYVSSDGERADYPGFYRNMEARLSREQRKLSRMVKGSANWRKQCERVARIYEKISNQRHDYQHKKANVLAGTYDAVAVESLNLKGMAGKPKPKPDPDHPGAYLRNGRKAKSGLAKSLMDNGYGMFCTLLEYKLARQCKPLVRVDRCFPSSQLCHECGYRNPQVKDLSIREWTCPSCGAWHDRDVNAAKNIRDEGRRLIERHDS

SEQ ID NO: 33273 - protein, 413 aa, unknown
  TnpB Polypeptide
MSIPLGGKPDMRSDRQVRLECSWLSAIPAMVLQSPNRIENTDWWSANKRRKTLKKKHRNPGMTPRFKKRRDDLYFVCWHNKGANANYRQLNRHHGEVVITGQNPGAYRLDGQPCRYSIHIRVRVSQPIRDYTSVGVNWTKRTLVFVNDPLPIQREASRSIVGLDRGCTHTLATSDGRFIDLPKHRLECIDREIRRRQKSQAHRINMSGKNVREYAKQPSRTYRKVQREISRLYAKAHRIIDDWQHKTTSMLVREYDLIVLEDLNLQGMSRKAKAKPDPDRQGVFLPNGQSAKRGLNRSLRSAALGGIADKLEYKTKIAGDSLLILVNPAYTSQTCSKCGHCERNNRESQAVFRCKKCGMRMNADLNAAQNILDRGWRQLSGSDGAGHATMTQDVHPAYRGVDAAIGACGTSAS

SEQ ID NO: 33274 - protein, 395 aa, unknown
  TnpB Polypeptide
MRLVERHIVKDNRFEDVCFKSGLLYNYVLYNVRQGIFNEEYLKEYEFSTKLCKENQFDFRNLPIAISQQVVSQVFSNIKGWIKAKKEFEKNPFKFRSKPKLPNYKKGKKQNTVVFTTSACRLKKDGYIYFVKNIVPPIKTKIGDNKLCQVRIVPQATCYVVEVIYEKKEQDLNLNKDNVLSVDLGLNNLCTCINNVEKQPFIVNGRIMKSFNQWYNKRRAKLMSFAGDKGTSKRLRRLNNYRNFWIEDYIHKISRFIINYCVDNNIGSLVVGLNKGWKQEINLGKKTNQKFVEIPFLRLIDKISYKCKLVGISFYLSEESYTSKVDHLAFEELGKHDAYLGKRKKRGLFQSSVNKLINADINGAIGIGRKVFGDSYVSRIIDSGLAFNPIRVNIL

SEQ ID NO: 33275 - protein, 319 aa, unknown
  TnpB Polypeptide
MDSAFTKFFREHTGFPKFKSKHHSKPSFKNINSVRIDFDNSRVKLPIVGWVNFYKNRSFEGKIGTVTVSKSITGKYYVSILVEDENPLPEKFPITSTTSVGIDVGLKDFAVLSNGQVFQNPKYLEKSSQRLSCLQRRLSRKKKGSNRYKRAKLAVAICHERIRNRRSDFLHKVSKKIISENQTIIIEDLNVEGMLKNHCLAKGIASASWSEFFRMLQYKSEWNGVNLIRIGRFDPSSKMCSCGYIYKDLKLSDRTWTCPECGSKNDRDLLAAQNIKKFGLEKQNLLTQENINKTPVVNREGDVELSAVAGVVKRQIVLV

SEQ ID NO: 33276 - protein, 381 aa, Gammaproteobacteria sp.
MLIAHKIALAPNNKQATYFFKASGVARFAYNWALAEWQKQYESWKIDNTKVRPSQVALRRQLNAIKRVQFPWMLEVTKNAPQMAIIQLGQAFKHFFAGRNAYPTYRKKGIDDRFSMTNDQFQLDGSRIRIPNLGWVRMRETLRFTGKIMSATISRVANRWFVSITVDTQDLSHLPQAENQGVVGVDLGISALATLSTGEPPVPGPKAHKMLLKRLQRLSKGLSRKQKGSRNRQKAKSKLANLHARISHIRKDALHKLTSDLTRRFDTIGIEDLNVRGMMSNRHLARSIADMSFYEFRRQLEYKAFMRGGIVIVADRWFASSKLCSFCGEKNTSLTLSIRQWTCCQCGTTHDRDINAARNIMNYAPEFHGVSLWRERLWPKS

SEQ ID NO: 33277 - protein, 503 aa, Variovorax sp.
LLPTSKVRAKRTSYPKHDVTYEVREGVLEVSPALGARLHGTLDVLCELREHLRREREHDRALGRAARATGGSHRYLAKADQYQTVRALAARDHRFAGVHSQVLQNVADRLDHATKAWLKGERGAPTAVPRKNYRSLTFTQYGFAVKIQGGRLHMSRLGEARLIGLRKLPGRVKSVTLVFKQGRWFAQFTCEVQVQHCERRRRHASPEVALLPDSGLDTGLARIATLADGTTHTPAKPLKQMLPRLKAEQRKMSRQFEARKRELAAYRKAFRALGLHGPLPERDHRPLSNRLKRQIRRVAILHSRIECVRRDQLRKVARQLEQKYRLIAVEEHGVEFMKRNRRTSRSVSDVAPAMFKGLLKHALGERYVPVASRRPGIGGNSQTCLCGASVPKTLSERWHVCAACGLSADRDAVSANIAMDIAFGYSNLGAVKPPEPGQGLVRRGEGKCQAGRPVKASRKATEPPVKRPSSTGRRLACTAGAQATAGVKNPQLLPGALAPNLSG

SEQ ID NO: 33278 - protein, 380 aa, unknown
  TnpB Polypeptide
VVEKRKEDKIQKMIKQKAYKFRLLPNLEQRIFFEKTFGCSRFIWNQMLADRIAHYEKTGTSLKNSPAQYNKKYPWLKEVDSLALSNVKLNLNAAYKSFFQSGFGFPNFKSKKTAQSYKTNNQKGTIAILDGKVKLPKVGWVKLKLHRQPRGVIKSATISKTATGKYFISILCEEEIMPLPKTDSALGIDLGLESFAILSTGEKIGNPKFLTSLSKKLAKEQKVLSRRGLLAKKKGIKLSESSNYQKQKLKVARLHEKIAHQRKDFLHKLSTNLIKNHDVICIEDLASRNLMKNHHLARAIGDASWNEFVRQLHYKADWYGKKIVTISRWFPSSQLCSTCGENSGKKALSIREWTCESCGTHHDRDINASLNILKEGLSLA

SEQ ID NO: 33279 - protein, 258 aa, unknown
  TnpB Polypeptide
LKEVDSLALANVQMHLEKAYKNFFRNPKIGFPKFKSKHRSRKSYTTNVVNGNIQVEDHRIKLPKLKWIRMKKHREIAEKYCLKSVTISMEPSGKYYASLLYEKSDCENQAEEFDYEDAKILGIDYAMHGMAVFSEDIQKENEGYFRKSEERLAREQRKLSHCVKGSNNYYRQKKRVALCHEKIRNQRKDFLHKLSYEMAEAYDVVAVEDIDMKAMGQCLHFGKSVMDNSYGKFRELLEYKLTWRGKKLVRVDRFFPFQ

SEQ ID NO: 33280 - protein, 402 aa, Escherichia sp.
VKRLQAFKFQLRPGGQQECEMRRFAGACRFVFNRALARQNENHEAGNKYIPYGKMASWLVEWKNATETQWLKDSPSQPLQQSLKDLERAYKNFFRKRAAFPRFKKRGQNDAFRYPQGVKLDQENSRIFLPKLGWMRYRNSRQVTGVVKNVTVSQSCGKWYISIQTESEVSTPAHPSASMVGLDAGVAKLATLSDGTVFEPVNSFQKNQKTLARLQRQLSRKVKFSNNWQKQKRKIQRLHSCIANIRRDYLHKVTTTVSKNHAMIVIEDLKVSNMSKSAAGTVSQPGRNVRAKLGLNRSILDQGWYEMRRQLEYKQLWRGGQVLAVPPAYTSQRCAYCGHTAKENRLSQSKFRCQVCGYTANADVNGARNILAAGHAVLACGEMVQSGRPLKQEPTEMIQATA

SEQ ID NO: 33281 - protein, 389 aa, Chloroflexi sp.
MLPCTKRRKEVPDVKRSHVIRLHPTPEQEVYFRKACGVARHAYNWALARWKDSRAEGKWAKIKDLKAEYNRIKGEQFPWCSEVTKCAPEQEFRHLGQAFDNYWRMKKEGTLPKLKHPRKDGEEGGFPRFKSKKRDRLSFYLANDKFSVAGQTIRIPKLGAVNMTEALRLQGKIMSAVISSRAGWWFVSIAVEVEHDVPTHNGGAVGIDLGIKTLATCSDGAVFENQKHYRQSLGRIKSLSKGLSRKGEGSQNWGKHARKLAKAHYRIACQRQDTLHKMTTSLARRYALVGLEDLNTKGMLSNHCLAQAVSDASFFEVKRQLLYKAEQYGGYVQLVSQWYPSSKTCHACGWIKEDFVASSGQKFACGAESAGSRCVESETFCDEAGTRML

SEQ ID NO: 33282 - protein, 313 aa, Mycobacterium sp.
MGEKFTVPGGWVLQAYQYALDPSAAQAAALESHAGGARFAYNTMLRAVKANLGQREAERSYGVADVDLTPTLSWSFQSLRNDFNRRKHTVAVREDGTPWWPENSKEVYANAVKNLSLALKNWGDSRAGVRKGPRMGFPAFKSKRSTRAFAFTTGTIRIEADRHHVTLPRLGRLRTHESTRKLARRLETGTARILKATVRHERGRWLVSLTCVVQRTTQRPAHAKPLAPVIGVDLGVKDLIVGATPDGRELLRQHAPRELRHASRQLRALQRKASRQLGPRDPGSQVQREPSNAWRRTTTAHRRAAHAGGQPAP

SEQ ID NO: 33283 - protein, 386 aa, unknown
  TnpB Polypeptide
  misc_feature (27)..(27): Xaa can be any naturally occurring amino acid
  misc_feature (29)..(29): Xaa can be any naturally occurring amino acid
VVDAGFRYRFYPSAEQQDYLARTFGCXRXVYNRALDARKKHYTETGKRLSYGKTSARLTAWKKIDRYPWLREVSSVPLQQTLRHLNAAYQRFFEKKAGYPRYKSRHDKQSATFVKSGFRLTGDWRRPHVHLPKMAEPLCIRWSRDLPSEPTSFVISKDRAGRYFISFRVRLCPQELPPRTKAVGLDLGLAHAVITSDGQKIDNPRYYRRNLDRLRHEQRRLSRKQKGSRNRRKQQRKVARIHGRIADMRRDWCHKLTTDLVRRYDVICIETLNVKGMLRNHCLAQSIADVAWGEIKRQLRYKAAWYGCRLVEISQWEATSKTCHQCGEKRPSLPLSVRAWVCDGCGVEHDRDVNASLNVLAAGLAVLASGLNGSPVTALSVAGVSG

SEQ ID NO: 33284 - protein, 344 aa, unknown
  TnpB Polypeptide
MLEAVMVALDPTPAQERLLLSHAGAARFAYNAGLAHVRAAIEAKEKPEWSLYGLRRWWNANKDTLAVNADGTPWWRENSKEAYSSGLESLANALSNWSKSRKGERKGRRVGFPTFKAKDRQRPRFAYTTGSFGLIEGDLKALRLPRIGRVHCMENVTGRVRGAKVARIHARIASRRRDLLDKLTTWLAGTYSDISIEDLNVAGMVRNHRLAKAVNDASFAELRRQLEYKTARTGARLHVVDRWYPSSKMCSRCGRVKAKLSLTERTYRCEHCGVTMDRDLNAAINIKVAGSAPETLNAHRGTARRNDLSGRATLDPVKCEPSRGDNRVRLGADGRKTVLQATTN

SEQ ID NO: 33285 - protein, 406 aa, unknown
  TnpB Polypeptide
MIRTFVRSVRLKHSQHRRLDALLHQLTDLWNAALQERIECYRRTGESISYYDQCKSLTVIRGDDESFAAFPVLAQRTPLDRLDRAFKAFFRRVKAGEKPGFPRFKSRHRGIHSFDLGTPAIRRKGKWHALSVKGIGDIRFAAMPAGHVRQARIVRSALRTSVHLVVELPDAESAAPSMPVGIDVGIRSRCVLSTGEAHRGIRIDRRRARRAQRLLSRARIGLGNRSKKRKALAKAHERVQISERNALHRLTSAIVRRHNRIAVEDLRIPNMVQNGRLSRSIHEQQWGRLVTQLTYKAESAGGSVVRVDPKRTSMTCSSCGHVQAMPLGTREFRCKDCGLATDRDVNAARNILSRGITAAGWDVEAVETPLRPGASGDIRDRHVAGLPGQDAEPFIEQSAAAIPSGS

SEQ ID NO: 33286 - protein, 339 aa, Blautia sp.
VVRYDTGTKTLFYDSMTRIPVKTKNRKAKKEAVLRAVTYEIDRVVFPYGQDLVNEAVDNTDRNAVAWRFEDAGNRILVKCMVSIDQRLSRKNEYYADGCIAFDTNVDHLAVAETDRHGNLIYHKVIPFDLTGKTSEQREQILSLALEKVYKRARERYKPVAMENLKDIKNESMYGNKEVNRKLSEFAYTQITRLAESKSYKYGIGLCRVTPAFTSQIGKIKYMRHYGISIHTAAALAIGRRAMGFKERPPKDIRHLIPQANKDRHHWSQWRFLARYLKDQSPYKFYRKIPYSEFECITDMNKYMKEEFCNGQDRNCFLKKLTVILDQMAARKQGNATTI

SEQ ID NO: 33287 - protein, 236 aa, unknown
  TnpB Polypeptide
LSKVVYLWVDVSRLLEAVDVGLLSYLATSDGFVEPGRKFFKTEQRRLKVLQRRLAKKKKRSKNYEKARKKVEKQHNHIALQRKDYQYKLAHKLCDMADTIFVEDIDFRIMAKGFLGKQTIDAGFGQFRSILKWVGKKRGVFVGEVDCRGTSQTCPNCRITVRKELSERIHSCPECKYEVDRDIASAQEICNRGIETYPGTLEKQEIGSQVEVSGAMCLDNWRRGAMPNREVGKPTA

SEQ ID NO: 33288 - protein, 176 aa, Vibrio sp.
MRVGASSKQPLNIRWSRELPSEPTTVTISKDTAGRYFVSMLCRFEPKPMSVTAKTVGIDLGLNNLFITDSGEKVDNPRHTKRHQNKLAYLQRQLAKKKKGSNNRAKVRQKVARLHAKIADSRLDHLHKLSRKLINENQVVCVESLQVKNMLRNPKLAKHIADASWGEFVYTSCLAN

SEQ ID NO: 33289 - protein, 438 aa, unknown
  TnpB Polypeptide
MERGLAVVPIPEGRKRPIVPAWQALRIRPAELDDYRKRGKKARHFSGWDEFPHTDSRFCAKFKSMRKTFRFRLYPTPAQQRKMVQTLRECRGLYNTLLAERRDAYTETGKSPSLYTQQGRFPELKEMNPALREVHSQVLQNVAVRIDLAFKAFFRRVKAGEKPGYPRFRGANRYDSFTYPQSGFRVESGRVFLSKIGFVGAVIHRPIEGTIKTATVRKSATGKWFVCFSCEVSEATEPLPESMESVGVDVGLKDIIATSDGEGVPAPKFLRKEEKELARTQRRLSEAPKGSRECRERRKIVAKVHERIKNKRTNFAHQQSRRLVNRYGFIAVEDLSVNRMNKNHCLAKSIMDAAWTDLTGKLTYKAEWAGRTVVRVNPAYTTQDCSCCGHRQLMPLSKRVYDCPHCGLSVDRDTNAAKNILRLGLQSQRRQAPRSPLL

SEQ ID NO: 33290 - protein, 445 aa, Synechococcales sp.
MARYQKSKDKIIVTRIANLGNLKLNVCKSNELDLIAFRLGKLRKEIWQEFGSLKAWGISEYEIDKTLRPNNKKYQLPAKLWEATLYDVIGDIHLAQASCIEKVLAKLDISYQKFKAKKSPTQITLEGRDWLKDSYLSRIVRDFWYRGHTNVNNQIVIKQYDCLTDKDGIVWLKFGGLTKGKPLKIPTTLPLEIKGQIRLIKRNEKWYIHYTTEMPILPKKETGLTIGVDRGYSEVYVTSSNDDTRFIGSDFGKIQTQESDYRKEKGVKRNKIRDLARKAKKKGNHAKADRIKSNNLGRKKWNKREQKFKGRVKTLVFTATKELMREEIKTVAYEDLTQQFTSKKRRSKCMKRNLNSWCKGIVRDALLQVSARVGCTVAEVNACYTSQLDSRFGILLGVRKGDQLIGHDGVVLQADINAADNVLARLSDAEITLFTKHTVAKEILL

SEQ ID NO: 33291 - protein, 378 aa, unknown
  TnpB Polypeptide
MLIRKAFKFEIMPNGEQLRKMKQFCGCARFVFNRALAWQKERYEQDNNHKFSYTKIANLLPQWKKELTWLKDCHAQVLQQSLKDLESAFKYFFEKHAAYPKFKRKGEKDSFRYPQGIKLEQHNSRIYLPKIGWVRYRNSRDVVGEVKNVTVSQKCGKWFVAIQTEFEQNIPTHKGGEIGIDMGVVRFATLSNGQYYAPCNAFNRLKGKLAKLQRQLKNKLKFSRNWQKLNAKISKLHYRIANVRRDFLHKISTDICKNHAMIYVEDLQVLNMAKSAKGTAEQHGKNVKQKSGLNRAILDQSWSEFRRQLDYKTQWLGGFLLAVPPQNTSRTCPCCGYTAKENRQTQANFECVECGYTENADVVGALNILARGRAIVQA

SEQ ID NO: 33292 - protein, 413 aa, unknown
  TnpB Polypeptide
MILKTYRYRIYPDVEQKKFLERHFGSCRFVYNHFLALRSSAWKERRESIGWMQSQAMLPKLKADNPWLKEINSQSLQCSLQNLEKAYKMFFKKLAEYPRFHKKQGRQSFTVPQHFLVLNNWLKIPKLKSGIRVRMHRPPLGKAKTLTIIKETSGKYYVSIVCECEPVMLPPTTNTVGVDLGLNDIAVLSSGEKINHPRWFYKIERRLARKQRQLSRRKKGSKNRQRARLQVALLHEKIKNQRQDFLHKLSHRLIIENQEVSIEGLRVRNMTKNRHLAKAISDSGWAELARQLQYKANWYGRTVKVIDTFAPSSKKCSVCGFINRELKLSQRIWECPNCKTVHDRDINAAVNIEQIGRDTPELTPVERRASTVSTFSIKQALSKKQETLASNKDARELIPVSMSQMGQNRLFRE

SEQ ID NO: 33293 - protein, 423 aa, unknown
  TnpB Polypeptide
VARRKKPENDIPMQTLTTRAKITNLSDQDALLLGLLGFFATKLWNTANHHRRVRWNDTGKIPSFAEQCRELKTNHWYKLLPSQSSQEVLGEQDDSYRSWFSHRKNGNSLAKPPGFRKKDTISTVTFKQNAFEMLPDNCVRLKLPKTYTRREIMLKYQLPPDTALGRVQQVKLFHETRTGIWYLHIIHKVEVKYREFGNIMSLDLGIVNIMAGVITNGYSFTVPGGELLALDRYFQKEKSKCTKSTSRRCVELNIKWGRQRRHYLHTLTKWLVELAVANDVSTIVVGELKGIRQDKNWGKAGNQKLHAWPFSKVEELLTYKAALAGISVIKVSEKNTSTTCPVCGKRTKKARRHRGLFVHCSKALNADLVGAYNILQRYLRETGLTKSDWSGVVGVLARPAVNLFVWRKATSKGRGQGTFKQAA

SEQ ID NO: 33294 - protein, 364 aa, Actinomadura sp.
VGYTDLLRFAADVFASLGTPPERARAAARALCYGDLKACGLGAQAAQHVIKRVVDAYTTLRAGIRNGNLGGPASKRRRKAEAKPIVFRADAAHTFDDRCLSWQLDAGTVSIWTVAGRCKNLRFACSPDQAKTLSAHRKGESDLVRRDGKWFLLATCDVPEPPVYEPVDWVGVDRGIVNLATTFDGDNHQGRRLDRYRRWQARKRAELQAKRTRAAVRLLKKRARREARHATHVNHSIAKQVVAVAARTGRGIALEELSGIRGRVTVPRDQRARLSSWLFHQLGEFIAYKARLHGVPFLEVDPAYTSQRCPRCGHSERANRRTRDLFSCRWCGLAGPADVVAGVNVRDRARSAWVFVNMPQPAPG

SEQ ID NO: 33295 - protein, 390 aa, Clostridium sp.
VIKAIKVRLYPTKKQEELMFKSAGIARFSYNWGLAYLNNYYKENKKSLSIGKLRKIFTELRKSNQYEWLKEVSSEIPQQALKDLGEAFKKFFKKESNYPKFKKKGKCEISFYHLGNKLTVEDNYIRLEKIGYVKMKDEGRLPVGKYKKDKIKVLNPRVKHNGHYWYLSVGVECKNNDVNLLTTESIGVDLGIKDLAIVSNIDKPFKNINKSKEVKRLNKKLKRLQRKVSRKYDMLKNSKTFEKGQKLKKTNNIIKLERQIRLVHKRIADIRLNYIHQTTNSIVKTKPYRVVVEDLNVNGLLKNKHLSKAIQEQCFNKFIAILKYKCKWDGIEFVKADRFFPSSKMCSCCGTIKKDLRLKDRTYICPNKKCDLVLDRDKNASINLANYKLA

SEQ ID NO: 33296 - protein, 599 aa, unknown
  TnpB Polypeptide
MVIMAVETAHRGGVTHPDLPDGYEHGTVRAYSHCRPSCDACRAANSAAAASRRAARLAEGMPEKAHGTPSGYTFWSCRCRRCNKVARARSKARTRAARVKPDLGVMPDEDHGTRRGYNRWNCPCAPCRAAGTEMRADARARKRGKHDGPVAVRRYSYRIYPELEAAENLRRVFGSCRFVYNSYIALARERYAEGGKHPTGYGAAKTLVTEARRSPDTAWLAEVSHKALSAAVHDAADAYQRFFDSAAGEIKGRRVGRPRFKSRRTARKSARFAEDSFTIRGGWQNTSRGGGALHLAKIDQDIRVNWHRPLPGYPSAVTVREDPDGEFWVSFIVRVPVEAPKQPTRRPRAAGIDVGLNDYAAISYSDGTREKIANPRHYRQAEDRLRRADKNLSRKTPGSTNYAKAKRARARAHRRLANLRENHARQLASKLSRENQTVVIETLNIAGMASTNMAKSINDAGWGQFFSFLEEACARKGVDLVKAPRFFASTQICSVCGESGGKKPLDVRAWQCDSCGVSLDRDYNAATNILAAGPAVYACGRDVRLQLAGAVPDEAGSHRSEASTGVSRRRKRAVGRRVQASSDPRKLKGLRGAVENRGA

SEQ ID NO: 33297 - protein, 348 aa, Chloroflexi sp.
MDMIFVGLQCQECQALSITAFLYQPFGLFLYLTAENAAAIFGNPYQVIRNRVVGISGFTHLQTTLIHASIILMNTVKIYQLHVGLEAPQADEAPGTVQATVDLGEIHLAAVTTNTGKAMIVTGRGIRSIKRQRTKQLGKIAKKQSRCKKYSRRWKRLQYAKNKQCRRAERRIRDLRHKATRKVIDFCVEQQVGPLFIGNPHGVRNENKGRHHNQRMALWEYGKDIDYLTHKSQAAHIMSFTGSERGTSSRCPRCGHKHKPKGRNWVCRKCQFSGHRDLVGSVNMHQLAYGSDQVRFPRSFTYLRPSGLVARPSSSRADTPQRCLSKKLAQPRTSGMVSSETGQTSDVA

SEQ ID NO: 33298 - protein, 160 aa, unknown
  TnpB Polypeptide
MQKLVREQRRLSRKQKGSHNRNRQRIRVARVHEKVTNQRNDFLQKQSTMLVRENQTICIEDLHVKGMIRNHKLAKSIASVSWAKFFKMLEYKASWYGNEIHRVPTMYPSSQTCSCCGNRNPRIKNLSIRIWECPKCHAVHDRDTNAGINILKKALQMQSA

SEQ ID NO: 33299 - protein, 405 aa, unknown
  TnpB Polypeptide
MVDRGYRFELKPNDVQRTLFAKCAGVARFAWNWALAERQCLYRERQGNERFTNAIEQHRRLNALKRTDFPWMYEVSKCIPQEALRNLDNAYGLCRMAKKAGRKARLPKFKKKGKARDAFAFTTGAIRAEGAHVVLPRIGRVRVKEGAVFEGRILRTTVSRDADRWFVSFTVEQEVPDPQPPSGSAVGVDLGVSRLATLSDGRVFENPKPLQSRLRKLRRLAKELHRRRKGSNNREKTADRLAKAYWYIGNIRKDALHKATTQLAKSHGEIVLEELNVQGMVRNRHLARAISDVGLGEFRRQLEYKCRWYGSRLAVAPRFYPSTKRCSSCGHVKDEMPLSIRVYECEHCGLVLDRDLNAALNLVAVSSTETLNACGDLASTVPARALRAGSLKQEVNAAVPRGTGG

SEQ ID NO: 33300 - protein, 460 aa, Desulfurococcales sp.
MEIRKTLKLKLIPLTKRDKAEVVKLFKEYRVLVKDALQIIMASDARSRKRTHDLCYRVLREKYPHIHNKFVEEAYKRALAMYKSYRRLLRRWERGKLRGKPSQPTVNELRVVDLHIDTFRIEQNGHIYVFRVSRGSGQSIRFIMLMYNYALNQLWGARIGNSKLLFDGGEIYLLLTIVKDVETRLARNKFYIDVNEDSVAALLIDFDRGFATLFSIRYNVSRIRISYRNIRRGIQKKVDDPYVRNRLLAKYGAEERNKVEDRLKKTVHTLGEVAENFDANLVREGLRDLRNNGRRKRKSKNKKLNYRLETFPYSKFSTYLDTELVERKLTVEEVDARGTSITCPICRYSDKRNRVDRETFRCGKCGFTLNAHYVACLNLFSRHNDGMVAISGGRIMLITHEAGQVVPVYEASYDPTKNEWVLRGKPVLIISKITQTTKITQLMSTGNHILSLFSDLETRS

SEQ ID NO: 33301 - protein, 389 aa, unknown
  TnpB Polypeptide
VEHPMLKAYQYRIYPNQEQKELLEKTFGCCRFVYNFCRAEQKKEEDRWTTVKEMQQQGYPLQDYKSKFFHKFDHVNAIKELKQHYAFLKEVDSIALQSSVEHLATAYEKYYKKQGKKPRFKSKKRNDVTSYTTKCVNQNIEVMGNAIKLPKLKKVKAKIHRSFCGKIKKATLSKTRTNKYYVSLTVETNDVMPLEKTNQKVGVDLGLVDFVILSTGERIPNQRFLEKQHKKLEKAQQELSRKTIGSSNFIKVKRKIAKIHEKIAHQRKDYIHKITDYLVKAYDTICMEDLAVSEMKETDSAKRNLRVSDVGWYELKRELEYKCKWYGKRLSVIDRYYPSSQICARCGHREGKKEVSIRRWICPRCQANLDRDINASRNILKEGLRILEI

SEQ ID NO: 33302 - protein, 391 aa, unknown
  TnpB Polypeptide
MQRVERHIIIGNEQLDRLCFLSKNLYNYVNYLVRQEFTKNGKMPSEYELTTLLTWEKQVDYVALPAQTSQQVVALLFKNWKSFFKLCKCKDKLKARPKLPKYKHKTKGRNIVVFTSQQCKLKDGYIYFPKKANIQPLRTKVTNLRQVRIIPQCSCHIIEVVYEKDSIETSGLEPDSYLSIDVGLNNLATSYDSLHHKSFIINGRTLKSMNQYFNKKKAKLMSFIGGKGMSRRIGKLTLKRNCKVNDYLHKASRFIVNYCMENHIETIVIGNNKDWKQHCNMGKRNNQNFVGIPFEKLISQIQYKADELGIKVVTTEESYTSKIDHYAGEEMCHHETYLGKRIQRGLFRSSTGKVLNADLNGAIGILRKVVGESISQVVNRGGVETPTRLLV

SEQ ID NO: 33303 - protein, 416 aa, unknown
  TnpB Polypeptide
LFGCQQVLIKANEGSQAIFEYLCSESNKVYNCSLYYARQLYFKTQRFASRAAICEEMARSKNRHFGAMYVSSAQQTCNSVAEALRSFRELLKLWKRGELAEKPKLPNYRQSGLFTVSYPKRWLKLTDDGVRIPLGNQVKAWFGLEEIYLPMPSNLDWRQIKEVRLLPRNGCFYAEFVYPVEHQTVSVNPAKVLGIDHGINNWLTCVSNIGTSFIVDGKHLKALNQWYNKRVATLRENQPQGFWSKQLAAITEKRNRQMRDAVNKAARLVLNHCLKHGIGRIVFGWNQRQKDGANMGRKMNQKFVQIPTARLKTRIAQLCEQYGIELIEYEEANTSAASFLDGDSLPAHGEKPEGWKASGRRVKRGLYRTAQNWYINADCNGAANVTRKVAAILGLDLSGVSRGALTTPLRVRLWNS

SEQ ID NO: 33304 - protein, 368 aa, Methanococcoides sp.
MLKAYKYRIYPNKNQKEIFDKHFGACRFIYNWGLNHKLVTYEKDKRSLSEFDINNMIPGLKKIHVWLNEVNSQSLQRSIGNMDSAFKKFFKEKTGFPKFKSRKNPVQSFQIPQHYTVNFDNNMIKLPKIKEPIKARLHRMFDGKMKIATVSKTTTGKYYISILVENGQEVPKKVDIDNVMGIDVGLNHFAILSNGEKIDNEKYLKMSIQYLQVLQQRLSRKQKGSNNWNKQKLQVAKLHEKIVNQRNDFQHKLSLRLISENQAIAIESLNIKGMVKNHCLAQAISDVSWGSFIEKLQYKADWYGKTVIQIGQFEPSSKLCHVCGYKNIGLKLHHRKWTCSDCNTVHDRDINAAINIKNIAFNTVGTTA

SEQ ID NO: 33305 - protein, 149 aa, Bacillus sp.
MNREGIRFVKTSNIIKLEKKIQPLHRRLTNVRDNHIHQVTTAIVKTKPCRIVMEMLNIKGIMKNKHLSKAIAQQKLYVFKIKIQYKCEKYGIEYMKVDKWFSSSKMCSSCREIKKTLRLSERIYTCDCGHEIDRDLNASINLSCYQLAK

SEQ ID NO: 33306 - protein, 479 aa, unknown
  TnpB Polypeptide
MQIGNRFRFYPTEFQIQILLQWIGCQRFIYNSKVSEDRYFRRFARQSLAHAGQFAPIDQQYSHFKTELTPWLGEVPSQILRNGAVLWKHAYGRYFSKLSGRPGIHRKTGEQSVWITSELFSFKPVVDKSTGEITSYALHIGTPKFSLGQIKFTAHKKFKPAASLHISINAGRWHVSFNYDDGVPEPSVQETTEYLMQFNENELRFATVGLDRGVNLPLAGSDGQKFGFTVVQDKRILDQERHKKRWQRRQARRTKGSQNWVKAKRKVARYHRYGADVRRDVAHKTSFNLASNPRYKLFVFEALKVQNMTKRAKPKQDENGRWIRNGAAAKSGLNKAILASTWGKTKEFLSYKARRSGKLVIEVPAFYSSQECAACGHTHSDNRVSQSEFVCQSCNHTDHADHNAAAVIAKRGVRLVLSGACIPKKSKKCGILKNKVGEVISEPVASLPSTLGETEVSRLGGNTPALWSLTQETPAIALA

SEQ ID NO: 33307 - protein, 404 aa, Streptomyces sp.
MQLRYSFRLYPNGPQRSALARAFGCARVVYNDALRTREDARAAGLPFVSSAVLSTAVTAAKSTPQRAWLAEVSAVVLQQSLRDLDTAYRNFFDGLKGKRPRMGAPRFKSRKDSRHTVRFTANARWKITPGGDLSLPKIGDVRVKWSRALPSAPSTVTVVEDASGRYFASFVVETDPEILPAMDNVVGIDLGLTHFAALSDGTKIDSPRFLRRAEKKLKRAQRDLSRKAKGSANRVKARIKVARAHARTADARREFHHRLSTKIIRENQSVAVEDLAVKGLARTRMAKSVHDAGWSAFVTMLEYKAAKFGRTFHRIARFEPTSQVCSVCGVKDGPKPLGIRVWTCTACGAVLDRDINAAVNVAKAAGLAVTACRARVRPGRVPAQRGEAGTHRDGQMAVVGIPSL

SEQ ID NO: 33308 - protein, 428 aa, Streptomyces sp.
MSRFRMYPTVAQEQRMLLHCAHARYVWNLAVEQHAHGKPGRRSAPGFAEQCRQLTEARRDNDWLRAGNADVQQQALKDFAKAKNARFASGFGEPAWRRKHRHEGFRVMGTDRVPEWEADGTPKLNSQGRQVMGRSVVVQKLNRHWARVKVPGCGWVRFRLTRTGLPAAKTFRVTFRNQQWHIAFAIIPDPVEAPGTDTIVGIDRGVTITAALSDGQKLNCPRLTTRERARVRKHQRRAARAPKGSEAKAVEHAKVARIKAREAARRKDWCEKTSTMLARTYRLIRFEKLNITNMTASAKGTIEQPGTRVRQKAGLNRAILAQGWGLLRRRTGEKAPGRVEDVPAPFTSLRCSACGWIEKDSRKSQAEFVCVSCDFTCNADENAAVNVAAGQGGIPRPRRAAGAGGVTAATGRSSAREPRPTRVGIPLL

SEQ ID NO: 33309 - protein, 481 aa, Streptomyces sp.
VSPPGRDDHHGGSRPPPPTPGSAPGVAARCRDGARAHRAGDRGGDRDPRVRVRRTASADGLRLPVSVPGQDVRPRLRDPLREGVDRGRIAHPGLPRRCRRRPDGVRLPRLGRGGMGRLAVHARSARHSDRPARRHRSVARRGRRQRHDGSDVGRGVAAGPASVGRVTEHVDESVRRLPPDLRRRPGRPRRRGRRRHLGSGQGLGTAALRRPQPLAAVTPRSHRTGHPAHRGWGAPRPRLRRPRAVRLRHGGRDVGVTVPIALSNGETYEHGAWLTPKEKTRLLHLEQRAARRKRHRKSGERTSPRLHRTYDRIAGLRAKAKRRALDWQHKATTTIARTCNAVVVEALTITNMVKSAKGTVEEPGKNVAQKSGLNRSISGEAWGRTVTLLTYKTARYGGALVKVPAPGTSMRCSACGFTTSGSRESQAVFVCKNPDCGWSGNADHNAARNILHLYRTGLALVPAAGRAVVRRAKRVKPATAR

SEQ ID NO: 33310 - protein, 542 aa, Streptomyces sp.
MADLRPIGVPFVAPGPTGVAIRDRLGHLTTEDEQVLRLIGAHLGSLAARDLAARCRDGLGHCTDTWAARKRELTAASSSRWGGAITKATHDQWALSWRCQLTHIQSLEAGIKTIRHRLSQPLGHKGTRRAPGGYRSKKEWFQKTRRLHVLEERLERERADREAGVVHVVRGGRRLARHRHNLGAAQLTESQWRERWEAERWFLAADGESGKRYGNETIRVTPDGEVSIKLPAPLAGLANARHGRYVLAAKVSFPHRGEQWADRVEANRAVAYRIHLDVERGRWYLTASWQIPPARTIPIDAALAEGVIGVDTNADHLAAWRLDVHGNPIGRPRHFPYRLGGSAEHRDAQVRHALSRLLNWAKSCHVAAVAIEDLDFAADKTREKHGRKKRFRQLISGMPTGRLRARLTSMADQTGISIIAVDPAYTSKWGAQHWQKPLTGKNRKATRHDAASIAIGRRAQGHPIRRRTTPPPAHRSDEQGHRTVQARPDAPGREGPRPRTPGPRTRSVPPDAASTRATRTPKTVRDVRSDRVWVQDSLLLTG

SEQ ID NO: 33311 - protein, 527 aa, Streptomyces sp.
VTVRTRLKQLTAADEEVLRQVGAHLGTLACRDLKARCHDGLGHDAKAWAARKRELTPLSSARWAGAITKATHEQWALARRGALAHLQNLESGVRTLRHRLALPLDQKGSKKAPGGYRSRREWHAKDRRLHVLEDRLARERADWEAGTVHVVRGGKRLARMRHQLPAARLTETQWRERWEAARWFLRADGESGKQYGNETIRIAPDGEVSIRLPAPLKQLANAPHGRYVLTGRVAFAHREQEWTDRVAANRAVAYRIHHDVTRARWYVTASWQKPITRTIPLAAALADGVIGVDTNADHLAAWRLDMHGNPTGSPRRFSYDLTGPAGHRDAQLRHALTRLLHWARTCGVRALAVEDLDFTAEKTREKHGGRKRFRQLVSGLPTGRLHARLVSMADAMGLTVIAVDPAYTSRWGAQHWQKPLTSKNRRTTRHDAASIAIGRRAQGHPLRRRTTPPRAHRSDVHGPWIAQAGGDAPGREGPRRRVPGPRTRSVPPDAERTRATRTPTTVRGVRSEREWVQDPLLLTHQER

SEQ ID NO: 33312 - protein, 318 aa, Symploca sp.
MKAGYKYRIYPTPKQQMALAKLFGCVRVVWNDALAFCINQYKTGEKKLKNAELQKQFITQAKRRLERSWLSEVSCVPLQQSLNDLEQAYQNFFKSCKGQRKGRPFKPPRFKRRHAKQSARFTQRGFSLSNDCLKIAKIGKVKIPWSRSLPAKPTSATVIKDTAGKYFVSFVVEIVPEILPKIENSVGIDLGIASFATLDDGSKIDAPKPLKKRINRLRRLDKNLSRRNRGSKRYELARRRKAKLQAKLKDTRTDFLHKLSTQIIRENQTIVLEDLNVAAMMKNRKLSRAISDLGWRQFRNYLEGKAQKYGRQLRVNQQ

SEQ ID NO: 33313 - protein, 408 aa, Arsenophonus sp.
MLILKAYKFRLEPTEKQSQRLRQLCGCARFIWNYGLAETQRIIESGGKLPSAFELNRMLTEWKKKPEHSFLQEAYTDNLQQKLKDLHGAWKRCFDKKLAAKAPVFKRKNDGRDSVRFVNFDKYCQLDNGRVRLPSGLVWVKFRQSQKLYGKIKNATVSQHAGHWYISFQVELEMDIQPHSSATMIGLDAGVTRLATLSDGTVFEPVNSFKTNQKKLAKFQRQLSCKVKFSNNWKKQKRKIQRLHSHITNIRKDYLHKVTSEISKNHAMIVIEDLKVSNMSKSAKGTQEQHGRNVRAKSGLNRSILDQGWYEMRRQLEYKQLWRGGQVLAVPPAYTSQRCACCGHTAKENRQSQSRFECLECGYTENADINGARNILAAGHAVLACEVNGAVMPSAAGTRLLSDQIVSD

SEQ ID NO: 33314 - protein, 401 aa, unknown
  TnpB Polypeptide
MLLCKKIKLEVSDQDAATLEFMQGKCRGLYNWWIGKLRDGEKWPGWKKAKGTLQESKSYDPELCHVYSKLLHEVYFRADKAMQAFFRRLKAGEKPGFPRFSPRHEFFTLCYPAMYIKREGKKLILPTGGKGEKNKQYPNIVATLTETPPLVYREVAISRDARGAYHASFVYEQAEETPRGEVAQVVAFDLGIKTLATGVNEQGRFYHVGGFKGARWYNKQLDKIRSKRDRCKKHSKRYKHLSKVYSRVSERKRNKQRDSLHKASHLISHKLVESTVVVGDLSQRQMVMKQHQDRNKHLNRAVYNEWGLYTFLQMLSYKCQLYGKDLQFLDERNTSKMCSGCGHLQAMPLWKRTYCCTECALVMDRDNNSAVNILNRYVARLEPHTGDPVRCADVFTAIEHV

SEQ ID NO: 33315 - protein, 387 aa, Lentibacillus sp.
MLVRMNYKYEVFPNKEQIQTLDSWLSICRQQYNSALLDKQRFYQKNKTGLSRTQLQKQQKADKQKIPLLKTVPSQPLQEVFFRLERAYKNFFEGRARYPKIKKYKDYNSLTFTQFGVEKRHVKKKTGEVKVSAVRHAASLDENNHLLISKLGTVYVNFHRPLEGKVKQVTIKRQGHRWFAIFSVERHVNETVEFPVQSTGIDVGIQKFAVLSDGTTVENPKFLLKEEKKLQRAQKKLSRMKKGSNNWKKQLQKVQQLHIKIANQRRDFLHKLSFRLSKTYQFVFVEDLMIRNMVKNRHLAKSIHDAGWGAFGNMLAYKCNNNGGKLVSIKPHYTSQDCSGCDERVKKSLSVRTHVCKSCGAILDRDHNAAINIEKAGLAFLGLCPTA

SEQ ID NO: 33316 - protein, 402 aa, Thermosipho sp.
VLVTYKFRIYPTKEQEEKLNKHFGHTRFVYNFFLNYATIIYKVMGRSTNYNEWANILVKLKKMDKYSWLNEVNSQSLQQSLKHLEQAFKNFYKKRAGYPQFKKKKFSRQTFCVPQHIQLYFKEGNPKYGYIFVPKFKEGIKVRVHRKFPTEFKIKNVTFERTATNKYYVSIVLEITDTKITNTSDAIIGIDLGIKDTLTLSTGDKYSLPDLSKYEKKLKRLHRQLSRKQKGSKNREKARLRLAKVYEKITNIKNDWIHKVTHKIVNENQVGKIVVEDINIKGMMKNSKLSKYIHMQSWGKFITILTYKAKNLGIEVIKANRFFPSSQTCSVCGYVNKEVKDLKIRKWVCPICGTEHDRDINAAKNLAKYGLTIPVGREPSEFTPVDSALAAEPEKGLRAITG

SEQ ID NO: 33317 - protein, 440 aa, Moorea sp.
MRIAYQYRLKPTKQQKAKIDHWLSMLCAQYNYLLADSAKPTLRERFRWYDHNRCSINACPLVCHLPELRDNPNYYSQKKTLPNLKKTHPWYKDIHSQVLQDVVKRVKLAFDRFVKGDKNGNRSGRPRFKKQHRYRTFTYPQIKEGCLEGDLIDLPKIGKVRIVLHRPVPVREASATPNGFKIKTASITIKCDGYYLVLSLEDKTVTEVKPNINPDSIVGIDVGLKEFLTTSEGETIGIPQYYRKSQKRLRVIQKRVSRRKKGSKNRLKAIKQLGRQHKKVADKRKDFHFKTANYLLSKYDIIAHEKLNVKGLAKSRLAKFVLDAGWSSFLTILTNKAVRVAWPKALNAGLLAVPVSAHNTSQNCSNCGKKVPKKLHVRWHDCPHCGCSLDRDSAKPTLREHNAAINIKNRAEGQSVLKAQRLLRDTRIGWEAYTEPERSV

SEQ ID NO: 33318 - protein, 369 aa, Actinomadura sp.
MSRTAKRAFKYRFYPTPEQAAESSRTFGCVRLVYNRALHARTLARQQEKRRIGYAETSAMLTAWKRDPELGFLREVSSVPLQQALRHLQAGFVNFFAKRARYPVFKSRKKSRQSAEYTRSAFRYRDGALTLAKMVAPLDIRWSRPLPEGAVPSTVTVSRDPAGRWFVSILCEDTIRRLDPVPGRVGVDAGITSLVTLSTGAKVANPRHERRDRRRLAKAQRNLSRKAKGSANRAKARMKVARANARISDRRRDFLHKLSTRLVHDNQVVVIEDLNVRNMVGNHSLARAISDASWRELRSMLEYKAGWYGRELIVVDRWFPSSKLCSACGRKAAMMPLNVRAWACPSCGTLHDRDVNAAKNILAAGLAER

SEQ ID NO: 33319 - protein, 419 aa, Actinomadura sp.
MESRGAASISVPRLPDARSAAGARAGVRLCADRVQRRIARAAGLPYIRDAELQKQVITAAKRTADREWLGEVSSVVLVQALADLHVVYRNFFDSVTGRRKGPRVAAPRFKSRKDSRQAIRLTRNGFSVRRNQRLYLAKIGEIRVRWSRDLPSDPSSVTVFRDAAGRYFASFVVDAVDAAFPEASRRIGIDLGLCHFAVLSDGRKFDNPRFLRRAQRQLRKAQKALARKTEGSANRGKAKRRVAKLFAQVADARRDHAHKLSTALIRDNQAIYVENLSVAGLGRTRLAKSVHDAGWAQFVAMLEYKASRYGRTFGRIERFEPTSQVCSTCGFKGESKPLHVREWTCPACGAAHDRDVNAALNILAVGQTDRLNACGARVSPGSVPAPRGEAGTRPGPRMRAVGISGEPAREDVNGISWSA

SEQ ID NO: 33320 - protein, 398 aa, Actinomadura sp.
MATSVKRAFKYRFYPTDAQATEPSRTFGCVRKVYNMALAARTEAWARKQRISYGGTSAMLTAWKKTEELAYLNEVSAVPLQQALRHLQTAFANFFAKRTGYPRFKSKKKSHRSAEYTTSAFRYRNGELRLAKMAEPLAIVWSRPLPENAKPSTVTVSRDSAGRWFVSMLCRDSQIRPYPATGTAVGIDLGLDRLLTLSTGETIANPRHERKDRARLAKAQRALARKAKGQGSNRAKARRAVARIYARIADRRRDHLHKISTRLVRENQTLVIEDLAVRNMIKNRSLARTISDAGWSEFRNMLEYKASWHGRELVVADRWFPSSKLCSGCGAKRDTMPLNVGAWTCRTCGARHDRDVNAAKNLLAVGLTASVFGADVRPQRSTPGRRSATKQKPTRREP

SEQ ID NO: 33321 - protein, 403 aa, Actinomadura sp.
VQLRYNFRVYPTPDQREALARAFGCARVVFNDGLRARQDAHAAGLPYISDGDLSKQVITEAKKAPGRAWLCEVSAVVLQQALADLNSAYRNFFASVSGKRNGRKVAPPRFRSRKDSRQAVRFTRNAGFAVTAGRKLRLPKIGDVPVRWSRALPSEPSSVTVVRDAAGRYFASFVVDAGHESLPETTGEVGIDLGLTHFAVLSDGRKVTNPRILRRAQRRLRKAQRALSRKQKASANRAKARARVARLHARVADTRRDHAHKLSTALIRDNQAVYTEDLSVAGLGRSRLAKSVHDAGWAQFVAMLEYKAKRYGRTFGRIGRFEPTSQVCSVCGAKDGPKPLNVRDWTCPACGTVHDRDVNAARNVLAAGRADRVNACGAQVRPELVPAPRREAGTLSPPTPARV

SEQ ID NO: 33322 - protein, 398 aa, Clostridiaceae sp.
MKATDIPYADRANQSSGSCFRMIMAKKIRLYPTEIQEKLLFQSAGTARFIYNWTLGRQEENYALGGQFISDNDLRKEITQMKKREEFAWLHEVSNNVAKQAVKDACSAYRRFFQKLADKPRFKSRKRSKVSFYNDNMKLKFKDKSVLIEKVGWISIKPHDIPADSKYTNPRITHDGKYWYIAVGLHREETETLLTGESLGIDLGIKQLAVCSNGKVYNNINKTMKVRRKEKKLRRLQRSVSRKYEMNKEGGKVVKTRNIIKLEKKIRLLHRSLRNIRSNHLHQTTSEIVKTKPSTVVMETLNIRGMMRNRHLAKAVAKQGFYELKRQLKYKCALYGIAFVEAGLWYPSSKICSSCGHKKEKLSLSERMYECEVCDVKIDRDFNASINLSRYEKSSLTS

SEQ ID NO: 33323 - protein, 345 aa, Nostoc sp.
MRLVERHIIKQNNKWFREIDQMSFLSKNLFNCAVYLCRQAFFKNQPIPTLNQIYHSLKNSDDYKALPSKVAQLVFKQVDKCFKSYQKTKKEYDLNPGKFLGEPKLPKYKHSSKGRNILAFNNQAFSKKALKKGLISPSGLSVFIKTKLAEIEEIRIIPKNNVYIIEAVYEQEEPPVVTNNRIAAIDIGLNNLATVSSNCLDFKTFIVCGKAIKSCNQFYNKVKASLQSQLPKNQKAQSQSAGRQRSELCKRTSRKIEALTLKRNNKVDYYLHTASRFIVNHLASQNITHLIIGKNENWKQSINLGSKNNQNFTSIPHARFIQQIEYKAQLVGIKTNQRGELHIQM

SEQ ID NO: 33324 - protein, 295 aa, Streptomyces sp.
VAFVQLRYSFRLYPDAVQRAALARAFGCARVVFNDVVQVREDARKAGEPFPTAGELSRRLITQAKRSPERAWLSEVSTVVLQQSLRDAEAAYRNFFASLKGTRKGPRVGPPRFKSRKDQRQSVRFTANARWKITEAGRLDLPKIGAVKVKWSRTLPATPSSVTVIKDAAGRYFASFVIETDPATDQARMPESDRAIGIDLGLTHFAVLSDGSKIDSPRFLRRAEKKLKKTQQDLCRKQKGSKNRDKARLKVARAHVKVADARREFHHQLSTRLISENQGALTPDVGHTRHWILRI

SEQ ID NO: 33325 - protein, 409 aa, Streptomyces sp.
MFMQLRYNFRLYPDAVQRAALGRAFGCYRVVFNDAVRAREEARKAGEAFPTAGELSRTLITQAKRTPERAWLGEVSMAMLQQSLRDVEAAYRSFFASLKGTRKGPRVGAPRFKSRKDARQSVRFAANARWKITDTGRLKLPKIGEVKVKWSRALPVTPSSVTVIKDAAGRHFASFVIDTDPAADQARMPESDRTVGIDLGLTHFAVLSDGSKIDSPRFLRRAEKKLKKAQRELCRKQKGSKNRDKARLKVARAHAEVADARREFHHQLSTRLISENQGIAVEDLSVAGLARTRLAKSVRDAGWASFISMLEYKAQRYGRTLVKIGRFEPTSQTCSTCGVKDGPKPLHVREWTCRACGTLHDRDHNAAINVKVAAGLAVSACGAPLRPGAIPAQREETGSHEFPTGHRAA

SEQ ID NO: 33326 - protein, 546 aa, unknown
  TnpB Polypeptide
MAQTRNRQKPTEEQIALKKFRKLSNRHMLIVESDLTNTNEIIPILNDADRLRKAKNELVGKMRKRYHQLKRTKKYRGLLKAYNKTSDDKKKKSIGKRLNEMQKAYNVTWDYCRNSMIPIAEKYHCNSVFALTKAEDVWSGIEKCLYSDGEDIHFSKYEDLPCLRAKQTNRVLILKVENDSLVVYYGKQRIGLKIKDRFQQEEIDAILSYLEQPEVIDKKAVEILQEEAYCIDSFRPCYGTLVPKYIRGKWRIFVHITIEGKAKPKYRKDGTPRHTYGKGIVGNDIGTQTVAYTSNTEVGLTNLAERESNTIKKEKKIKKIQRKMDRSRRATNPDNYNEDGTIRKGKKTWQYSKRYKKLREKYRELNRISAVNREYANNELANKMRALGDVLVTEPKNAKRLQKRAKETTKDKNGKINRKKRCGKSIGRRCPGGYQATLKQKFNNTGGIYREVSNNYKASQYDHTIDDYIKKKLSERMFRLKGTNEKVQRDWYSSFLLYCYDYRTDNIDKDKANKEFGRLYSKEKELIDWIINNKIKVLNSGIKIAA

SEQ ID NO: 33327 - protein, 466 aa, Streptomyces sp.
MEDTEKQRTRVTGDEAKRIKREALGIGDRRKHEGRAATAMKSKIKEPGTQQRVYRYRFYPTPSQAEQLEKTFGACRWVYNEGLTLRSGAWERHRVSVSFAESCRALTGWRQAPETSWLREVSSTVLQQALRHLDGAFTRFFKQSAKYPQRKRKHRSRDSATYVRTGFRWSEDPGRPGTGLLTLAKQTTPLDVRWSRPLPAGVVPVKLSVTRDRAGRYFLAVLVEEYIAHLPTALLPGSREPKAVGIDLGLAALVTLDDGTKVDHPRLLKKYDKELARLQRGLHRKKKGSNNRGKARERIARLYALISDVRRDMLDQLTTHLVRENQVLVVEDLAVMNLLRPAVGKGRRRKARLNRSITDAAWGELVRQLRYKYAWYGRTLVIVDRFFPSTRRCSGCHAKGPSLDVSVRAWSCAECGAVHDRDVNAARNLRDEGMRLYWLVATALPPGRMPPSVIKASEPVGVQLAA

SEQ ID NO: 33328 - protein, 326 aa, Crocosphaera sp.
MTFRIYPSADQEAMMLDWLETCRRLYNRCLRDLKTWLNGKKCPIDRCSLKQEYIVPADLPFPSYLEQKRQLTQWKKENPWFKAVHSQVTQDVVKRMHNTWEAFKKRGFGFPRFKKYGQFRSFLFPQFKNPPLQLPSWEGSWRGGYQIKLPKIGSVLIELHRPIPEGFVIKQVRVLSRARGTKWYVVITVQSNVEVPNPLPKGRGLAIDIGLENFLTTSDNFTIKPARFFRELQSRLKELQRKASRKKKGSKNWEKEQIGVAKLHHKIANYRKNFHFQVAHQLCDQGDMIFVEDIDFGVSAKGFLGKSMLDGGFGQFRTILKWVCWK

SEQ ID NO: 33329 - protein, 269 aa, Okeania sp.
VSGSRGGQKIAVRLMLAPRWMPIPQLRDNPNYYSQKKDLVNTKDKFPEYKLIHSQVLQDCIKRVKLAFDRWFKVDKNGTRLGKPRFKGKGRYRSFTYPQIKQNCIEGNQINLPKIGKVKLIQHRPLPDGFQIKTVTISRKADGYYITLSLEDRSVPALTTEVEPTLKNTLGIDMGLKEFLVTSEGESVPIPQYYRKSQKRLKTLQKRLSRKKKGSKRWLKAVKAVAKQHKKVADKRKDFHFKTANELLSKAEVIAHVDAERRAGGKLKH

SEQ ID NO: 33330 - protein, 570 aa, Streptomyces sp.
MRDFCWWWSLGVVTVFCGMGLGVAGLREVAAPYVAPGPSGVAVRTRLKHLTGEDESVLCLVGDLLGALASRDLKARCASGLKHDSGQWAERKRVLTGESSSPWAGSVTKATRDQWALARRGLLAHIHSLQAGVDMLRHRLSLPLGEKGTKRAPGGYRGRQEWFAKSRRLHVLEDRLRAARADWQAGIVHVVRGGKRLLNTRHHLQAAQLTETEWRARWQAGRRFLQADGESGKRHGNETIRVTPDGEVSLKLPAPLAHLANAPHGRYVLAVRVLFAHRGEQWADRVAAHRAVAYRIHQDVGRGRWYLTASWTLSPARTMPLEAARENGLVGVDTNADHLAAWRLDRHGNPTGEPLRFGYDLTGTADHRDAQVRHALIRLLHWAARHGLAIAVEDLDFQREKTREKHGRRKSFRNLISGMPVSRLRSRLVSMAAQLGIPVIVVDPAYTSRWAPSTGRNPSPARSGGPLATTRQPWRSEGAPWDTRSGVGRHRPHTTRAIVRGIGPSRPDRTARGVRETAPVSPDHGHDPCRPDMERTRSTRTPNTVRGVRLSTSPDNRAHPHSVSRNGSLC

SEQ ID NO: 33331 - protein, 416 aa, unknown
  TnpB Polypeptide
MQRTLKIVLMPTPEQAEALLETLRQSTECFNAVCEYGWKKGEKNGVDLHKATYYPLKAAHPKMPCQLLCSARVKATEALKSAFTLRKKGNEVSCPKKVSCPKGEQVPIRYDARSYRLRLNKSVASLASVNGRQEVTYRLYSHAAKAFAKATGFDSADLVYQKGKCHLHVVLTLPTPEFVDNELTVGVDLGLNRPAVVSNRKFLGKRHWREISNRYFRLRRKLQSKGTKQARRRLKRLSGRLARFRKDCDHVLSKQVVHSVSTGTTIVVENLTDIRTGTKQKGRQSRRRLHSWSFAQMRLFLTYKAEAKGCQVVGVDPRYTSQRCSKCGYVHRGNRKSQSVFLCRQCQYELNADLNGSINIAQKYLDAVGISDCVGPLSDGLSSQTSVSATVVSWPKNHTRTGTSSLLTPQAVRNTG

SEQ ID NO: 33332 - protein, 184 aa, Bifidobacterium sp.
MKVLEERVKRGQRKLSHRRKGSNNYLKQKQNVAKAYAKLRHYREDFQHQTSHRLIEENQFIGMETLMVRNMTRKAKKKLDANGKPMRNGQSRKRAMNRSILRDGWSGLVDKLAYKAERYGRTLIRVDRFYPSSKLCHDCGHKYKELRLSEREWVCEHCGRKHDRDVNAALNIRDEALRLNQTGQ

SEQ ID NO: 33333 - protein, 421 aa, Leptolyngbyaceae sp.
MFLTQTNRLRVNNKESEALKQLCRLSKNMFNVGLYNVRQYFFQERKYLRYEGNYHHSKENENYQALATDIAQQTLKIVDRSFQSFFKLLSMKQQGSYQAKARMPHYLPKDGYFLLTIPLRPRDWNRLPGKDWVFNVPMSRRFRREFGVVSVTIPERLRDKPIKEIRILPKYGARCFDVCFVYESPEVEPVNPSGEMLGIDLGLDNFATCVSSTQQAFIIDGKRIKSINQWWNKENARLQSIKDLQDIKVLTHRQAKLLDRRNHRIGDYLNKSARYVVNWCIANQISKIVVGYNPDLKQGVNMGKRNNQNFTQIPIFTFKRKLQSLCERYGMELIEQEESYTSKASSLDADILPVWSPSNTTKHEFSGKRIKRGLYRTKKKWLVNADANGALNILRKHTSKLNDLIGEFRGCLAQPVRVKIS

SEQ ID NO: 33334 - protein, 347 aa, Leptolyngbyaceae sp.
MLNMTWEFKLEPTPDQVAEIDRILEVCRNVWNFALRERKDWLNSRKSPVNACSIVAEYILPAAAPFPNYHVQAKRLTVAKTAYPELQTVNAQALQHVLRTLDRAFEDMKSKGCGFPRFKKRGRMRSFVFPQMLKNCISEAGIKLPQLGFVRVRWSRRIPELFQVKQARIVRKASGYFVMLSLAADVEIPSPMAHGHALGIDVGLEYFLSTSDGEQVKRPRFFNELQRKLTLLQRRLKTKQKGSANWLKLQKKIGRVHQRIADTRKDWHFKLAHHLCNQARMVFVEDLDFRIMAKGMLGKHTLDAGLGNLLIKCCLGCALSAMCFTARSMHGEPLRSAQTAGLRSKKT

SEQ ID NO: 33335 - protein, 385 aa, Nodosilinea sp.
MEQVLTIVCKLNAAPEQVAKLDATAQAFADACNYANQVVKTGITSKATIQAEVYGDLRARFGLNANLAVRACARVGMNRKAAKTKKRPVKEFQASSIDYDARIFSFRESDWTVSLSTLEGRERISIQAANYQRGKLAGQSPTSAQLCKHKDGLYYLHIQVKKTPPDPKPYKRFVGVDVGRRKIAVTSDGQEWSGKGISDIRDRYAKQRAVLQRKAAKGTRSTRRRCRQLLKRLSGRERRFQAWWNHTVSYRIVKRAVETSAVIVLEDLTGIRERTNQQPRNKTERRRSNSWANYQLRGFIEYKSVRDGAYCMVVRPHYSSQTHHACLHIGDRRGERFFCPNCQVVEDADHNASKVISLIGAAVAQPRGPWLSCEIVAGLQKAPTL

SEQ ID NO: 33336 - protein, 353 aa, Acinetobacter sp.
MKTLKLRIKDKHAKVLNQLASEVNFVWNYVNDLGFKHLKRKGEFLSAYDIAKYTKGTSKECNLHSQTIQAVTEELVTRRKQFKKAKLNWRVSNKKSARRSLGWIPFKKVAIKYADGYVQYGKHQFKLWDSYGLSKYGVKTGCFVEDARGRWYVCLVVDTPVPEKSKATKAIGIDLGLKDIATCSDGTVISNPKYFKKYEQKLGIAQRAKNKKRVRALHAKIANSRKDYLHKASAKLVRENALIVIGNLSAKKLVKTRMAKSVLDTGFAALKTMLRYKCEYAGVLFEEVNEAYTTQVCSCCRNITSSSPKGRTDLGIREWECMVCGTHHDRDINSAINILALGHERLAVGIPVL

SEQ ID NO: 33337 - protein, 413 aa, unknown
  TnpB Polypeptide
VYPTKTQETTLLHYLDHLCDLQNSARHDRKVAWETEGERVSINDQQRKLKVAREKYADFREVPQDMQVCALERTDKAFDGFYRRCEKGAGKKGYPRHRKQIKSMSWKLRKHTLKSGERVRQNPIRETAWKHDRLKVPKLGEVKIYMHRPLQGDPTGVTLVKKASGWYAHITCELPDTPKVEPTDAIAVDMGTTHYLTTSEGEKEDNPRWYRQAEGLLHKHNQTMARRKKGSHRWYKAVHASALHQERTANKRKDFIGKLIYKLCHHYENNVLVAEDLSISNMVKHKHLSKSIADASWGTFFKWAGNIAERDGFHFHQVEPKNTSQICSHCGQKSPKKLSLAIRTFRCQACGTSLDRDHNAALNILFRAAAAHRGERWVTDLNETRNKNGAQDLDLQNATQLTLFDATTGFPSL

SEQ ID NO: 33338 - protein, 434 aa, Streptosporangium sp.
MRLDSVSGFPGRGQGPVATVFEVKLVVQVKLLPTPEQAAALAATLHAVNAAATAVSHTAYATHTFGVYDLRRLVYGELRADGLSAQTAQHVIKKVADAYATLRGLVRAGRLTGRRRRKAESTPIAFRPEAAHPFDDRCLSWRIDARTVSIRTVRGRIKDLAFTGSAEQLTMLAAHRRGESDLVCRDGMWFLIATCEVPEAPLNAEPCGWIGVDRGIVNLATTSDGVDHSGEGLARYRRRMARLRAELQAKGTKSARRKLKKRAGREARHATHTNHKISKEIVADAQRTGRGIAVEDLAGIRERVRLWPSQRATLSSWPFHQLGEFLAYKARRAGVPYTGVDPACTSQTCPVSWCGSVGRGNRPSRDLFSCRSCGFAGPADHIAALNVARRAQVAWVFVNTPNDPAVESGVSASRACPPDRRERRKPRAASALGR

SEQ ID NO: 33339 - protein, 232 aa, unknown
  TnpB Polypeptide
LLFPKKVSYKLNTRLHDKTDIREVRIIPKGVGYVVEIVYQKKFHPKPLNKKKILAIDLGVCNLITTVNNNDLKPFVIKGGVVKSINQYYNKERARIQSFYGHKGKRTGKVMEKLTIKRIKKINDYFHKTSRKIIEYCIMNDIGTVVIGYNPDWKQNCQMGKKNTQNFVTIPYYKLIQQLEYKATEQGITVIKQEESYSSKCSFLDNEPIEHHIHFLGRRMTRGLFKSQKGTI

SEQ ID NO: 33340 - protein, 396 aa, unknown
  TnpB Polypeptide
MPLLTVTLKLKIHPTPQQAAALTVTRAIFTDCFNRVCAYGWQQGERNGTVLHRATYATLRAAYPDLPSQLMCAARVKAAEALKAVHTRRRQGRKVTCPQSAGTAIRYDARSSWVRLSQGEVSITTTAGRLRLPFRLCDYYQRYRDWQVRSSDLCQDQRGRWFLHVVVQLAAHDVPASGEVVGIDLGIRRIAVTSDGRNASFYSSGHLTNRVRRYQRLRRSLQAKGTRSAKRHLRRLGHDWQRFTAATNHVIARRIVDAASPGAVFGIEDLKGIRDRCKHRKGEQRGRFHRWSFSQLQGFLRYKAAAAGQHVEIVDPRYTSQTCLRCSHVARGNRRTQSLLVCQVCHFSLNADLSAARTLRQRAIDSLVAPLSGGVSCQDDPSVLASGDGPRRKLPA

SEQ ID NO: 33341 - protein, 668 aa, unknown
  TnpB Polypeptide
MEEKVKPHEFFKSVKTSLKNILKRPEINTTKINDVVIKSHKIVIHTLQFLKLYLLRHYETNHQTLPIIDKKLINTVMKVMCGVNDEKRGRPPNKDTVELKDKLTLFYNEHYKPYTQDDKLDYTYMNNVLAYLSEDIITMYENNIQLHYVDYVERFVNVVWKKKMITEKIQKLCKTKTERETRIRSLCIELRKIKNDLLTVDKTAYTSKSYYHSWITEQKKHILPNKSKFQKDSVYYDLKCKVMDYFPCMITMMKQVENELEPISNVFPLRSGITPSYIRLDTITLVHLLLRKEQGNKGDYTDEGNTKKYEDKIWEFFFRTEQKLFTKTGYSFHHMISTDGVGVSILFLRKDLVGNKIPNIKKNASKELYIDELTNYTDLLNKKIVGVDPGKDDLIYCVDGASKEANIFRYSQNQRRKETKLKKYNNIILAMKTNKIQGKTIIKYETELSNFNRKTLDITKFKEYIQSKNRINHILFEFYAKQLFRKLKFGRYINTKRSEIKMISNFQQIFGNPEDIVICIGDWEQKKQMKFKEPTLGKGIRTLFRKNKYKVFLVDEFRTSCKCSNCNGGMCEKFRIRENPKPKKDDMRLVHGLLRCKSGCGLWNRDRNGSSNIYKIAETSINKLDRPSYLCRTSNQAVLPNCYKQTIQGNEKLNLKQTKVKRVNIVPF

SEQ ID NO: 33342 - protein, 366 aa, Gordonia sp.
MAKTVKRAFKYRFYPTREQGAELGRTFGCVRLVWNKALDERTRVYATESRKTTYIQLSAALTGWKKTDDLAFLNEVSSVPLQQSLRHQQAAFSNFFAKRARYPRFKSRKKSKASAEYTRSAFTWRGGQLTLAKMKTPLDIRWSRELPDEPSTVTVSKDSAGRWFVSILTEDTIEPAPATDSTVGVDVGLTSLAVLSTGEKVTNPRYERRDRRKLAKAQRSLSRKARVSNNREKARRKVARVHARIIDRRTDFLHKLSTRLIRENQAIAIEDLTVRNMLGNHALARSISDASWRQLRTMLEYKADWYGRDLLLVDRWYPSTRVCSGCGALHEKLPLNVREWECRCGVTHDRDVNAARNILAAGLAER

SEQ ID NO: 33343 - protein, 217 aa, Marinobacter sp.
LAFYQPEIPDTPKMTGIDLGLKDLFVTSDGLRIGNPRHTAKYAAKLAKAQRRLSRKKLGSRNRAKARQKVARIHAKLSDCRMDNLHKLSRKIVNENQVICVESLKVKNMLRNRSLAKSISDAGWGEFVRQLEYKADWAGRQVVAIDPWYPSSKLCSGCGFVMEAMPLTIRHWTCPDCATEHDRDINAAINIKAAGLAVLALGESVSGMESVSVSSCR

SEQ ID NO: 33344 - protein, 388 aa, unknown
  TnpB Polypeptide
VLKAHKVEINPTPEQKQKIHQTIGVCRFIYNFYLSYNKEIYEKEKRFVSGMNFSKWLNNEFILNNPEYKWIKEVGSKAVKQAIMNGEKAFKRFFDGKSKFPKFKKKKNQNIKCYFPKNSKMDIFVERHRVKIPTFGFIKLKEFGYIPEKCTVKSVTVSFKAGRYYVSVLVEQEKQTLSNNNTEGLGIDLGIKDLAIVSNIDNPFKNINKTIKVKKLEKKLKREQRKLSRKYESLKVKIKAKEDATRQNISKQIVIVQKLHQRISNIRVNHVNQVVNEIVKTKPSYITIEDLNVRGMMKNRHLSKAIAGQCFNQFREKLNNKRKTNGFELRIVDRFYPSSKLCSCCGFIKKDLKLSDRIYKCNNCNSTIDRDKNASINLKNAKVYKVAA

SEQ ID NO: 33345 - protein, 186 aa, unknown
  TnpB Polypeptide
MHGLYVASDEEDADYTKFLQKAEKKLAKAQRKLSKCKKDSKNREKQRKRVAVLHEHIANQRRDFLHKKAKFLAGRYDAIGIENISVKAMAKRKKGKHFSFGKSVSDNGWSKFVNILKYKLAWQGKQLIKVDKWYPSSQICHNCGFQNEETKDLSVREWECPKCGSIHNRDKSVAINIREEVRRMIA

SEQ ID NO: 33346 - protein, 507 aa, Burkholderia sp.
LHVTRAGFGAEAEPNATIGSSNLTTVCLTSVTVPCGVTLTVRAAPACSDRAAAVPSTATAPMRQSSRVVWLVRFALLCLSCCFIRFAPGNPVLQVGAERGAADWLMRQSLRSTPAYDMVRDMDIKRAYRFRFYPTSEQAAMLARTFGCARFAYNHMLRMRSDAWQHHQASIGYHETSAALTALKKTPEHAWLNEVSSVPLQQALRHLQTAFTNFFTKRAKYPNFRRKDGTQSAEYTASAFRWDGTALKLAKMDAPLAIRWSRTIPKGARVTTVTVSKDTAGRYHVSMLCDDVVSSKSASTSKVGIDFGLTDFVVLSTGEKIAAPNAFRKNEAMLAKLQRRLAKKQMGSANRRKARFKVARMHARIADIRRDFLQKLSTRLINENQVIAIESLAVRSMQKNRRLAKSISDASWSEFVRQLTYKAAWYGRTLIGIDRWYPSSKRCADCGHTVATLPLKVRVWVCPGCETSHDRDINAARNVLAAGLAVSAHGESVNPMSLCEAMSGCIQ

SEQ ID NO: 33347 - protein, 404 aa, Symploca sp.
MKARYRYRIYPTVGQQMALARLFGCVRVVWNDALAFCIAQYQGGKKKPKNAELQKQFITQAKRIIERTFLSQVSCVPLQQSLNDLEQAYQNFFKSCKGQRKGKPVKPPRFKKRHAKQSARFTQRGFSLKGDCLKLAKIGKLKIAWSRPLPAEPTSVTIIKDAAGRYFVSFVVEIVSEVLPNTEKSVGIDLGISTFATLDNGQKIDAPKPLKKRINRLRRLSKNLSRKTRGSKRYERARKRKAKLQAKLKDTRTDFLHKLSTQIIRENQTIVLEDLNVAGMVKNRKLSKAISDLGWRQFRTYLEGKVQKYGREFRVISRWEPTSQTCSECGFRGGKLDLSIREWTCLNCGITHDRDVNAAKNIKLAGGHSESLNGRGGRRKTSAKGAAAREASTHREYVQLSLFG

SEQ ID NO: 33348 - protein, 267 aa, Anabaena sp.
VALRRATFRLYPTKKVNDLLHYHRRLHKELYNAAVSNRITSYKKFGKSVSYFDQQNCLPDFKEVWTEYKQINSQSLQSTLKRVDLAFQRFFKGLGGYPKFKSIRRYSGWSYPSFTGWKCHSTGDNGYLELAKIGSIQMRGKSRLWGHPKALDIVHRNGKWYASIVLDVDDEMLRSSRKTDSGVVAIDLGCNDAIAWTNGEENGLISAPRFFRNAEKKIKQLSKAKRRKRSPNYKKRQKASRRWKKVQSRISKLRELHRMIDPMIRER

SEQ ID NO: 33349 - protein, 416 aa, unknown
  TnpB Polypeptide
MNVLRAFKTELDLNNRQKTACTQHAGAARWAYNWGLARMIEAYNAGEKTPSAIDLNRELNALKKGELAWMYEVSKCAPQEALRNLDQAFDNFFRRVKEKKAGKKIQVGFPRFKSKKKGLGSFRLTGSIHVFEKAIQLPRLGRLRLKESGYLPGGDVHTLNATVSEHAGRWFVSVQVEMDLPDQTHRAAFGVGQTAKPVAGVDLGILALATVSDGTRIENPRAIKHSLGKIKRLQRSVSRRQAGSANRRKAVQQLARAHIRVANIRRDTLHQATSLLARTKSAVVLEDLNVSGMMKNHHLAQAIADVGMYEFRRQMSYKGEWYGCEVLFADRFYPSTKRCSRCGNVKPEFDLSERVYKCEVCHLIIDRDLNAALNLERWPTASSAERHACGEGVRPGRPAVLDEAGTEPRSTMCRFA

SEQ ID NO: 33350 - protein, 409 aa, unknown
  TnpB Polypeptide
MSTILKAYKTELDPTGKQIGLFLQHAGAARWAYNWGLRKKIEAYKKTGKTPTAIDLHRELNILKRLPIEKGGVPWMYESSKCAPQEKLRDLDNAYKNFFRRCKSKVKNKGFPKFKSRKQGVGSFRFTGSIKAAETYVQLPVIGKVKLKERNYIPTQGVKVLSATVSESVGRWYISFQVEQKALKSKPKESKIVGVDVGIKHLAITSDGEVFENPKVLVTLQSVLRTRQKAVSRKEKGSNNRKKAVHKLAVLHVRIANVRKDAIHKMTSAIAKSASVVVIESLNVAGMLKNRHLAKALSDASLSEIHRQLKYKMEWANGKVIEADRFYPSSKRCSKCGNVKLKLTLNERTYICDKCGNIEDRDVNAALNLKFLAASSAVKACCPGSSGRSRKTSTKLLVGQEPIRESQNV

SEQ ID NO: 33351 - protein, 402 aa, Escherichia sp.
VKRLQAFKFQLRPGGQQECEMRRFAGACRFVFNRALARQNENHEAGNKYIPYGKMASWLVEWKNATETQWLKDSPSQPLQQSLKDLERAYKNFFRKRAAFPRFKKRGQNDAFRYPQGVKLDQENSRIFLPTLGWMRYRNSRQVTGVVKNVTVSQSCGKWYISIQTESEVSTPVHPSASMVGLDAGVAKLATLSDGTVFEPVNSFQKNQKKLARLQRQLSRKVKFSNNWQKQKRKIQRLHSCIANIRRDYLHKVTTAVSKNHAMIVIEDLKVSNMSKSAAGTVSQPGRNVRAKSGLNRSILDQGWYEMRRQLAYKQLWRGGQVLAVPPAYTSQRCAYCGHTAKENRLSQSKFRCQVCGYTANADVNGARNILAPGHAVLACGEMVQSGRPLKQEPTEMIQATA

SEQ ID NO: 33352 - protein, 413 aa, unknown
  TnpB Polypeptide
LDGIVYIPAQIFDLSDWKGGRTTMPRTSKPPCEDGWVIQYNTIKARLYPTHAQAELFEKTFGCCRYIWNQMLSDQQRFYAETGAHFIPTPAKYKKGAPFLTEVDNQALTQEYNKLAQAFRVFFKNPETFGHPHFKRKKDDRDSFTACNHVFESGPTIYTTRDGIRMTKAGVVKARFSRRAQAWWRLKRITVSKTKTGKYYCAILYECPVKQPEPVVPTAETALGLKYSMQHFYVTDGGCTADPPRWLKRSQEKLVRIQQKLARMEPGSRNYEEMVQKYRLLHEHIANQRRDFLHKESSRIANGWDAVCMRDDALAEMSKGPLRKDAASSGFRMLRELLQYKLERQGKRLVLLDRYAPTTRVCSVCGQLQGSVDYGARTWTCPKCGTVHDREVNAAKNIKLEGLAQFLPTASPA

SEQ ID NO: 33353 - protein, 424 aa, Moorea sp.
MRIAYQYRLRPTKEQKNKIDNWLSMLCDQYNYLLADRFSWYEQNRCSINACPLVCYLPKLRDNPDYYSQKKTLPNLKKTHPWYKEIHSQVLQDVVKRVKLVFDRFIKGDSNGKRSGRPRFKKRYRYRTFTYPQMKDGCLEGNLINLPKLGKIKVVLHRLIPNGFKIKTASITKKCDGYYLVLSLEDKTVPEVKPDINPDSIIGIDVGLKDFLTTSEGETIEIPQYYRKSQKRLKIIHKRVSRRKKGSNNRLKAIKQLSRQHKKVADKRKDFHFKTANYLLSKYDVIAHEKLNVKGLVLSRLALSVLDAGWSSFLTILTNKAVRVAWPTALNAGLLAVPVSAHNTSQNCSNCGNKVPKKLHVRWHDCPHCGCSLDRDHNAAIRRSRRYANNIKNRAEGQSVLKAQRLLSNGRIGWEAYTEPKRSV

SEQ ID NO: 33354 - protein, 368 aa, Psychrobacter sp.
MKTLKLRIKDKHLKELNRLSGSVNFVWNYVNALSFEHLKRTGKFFSAYDLSEYTKGSGEYLGLHSQTLQAINETHAKARKQFKKAKLSWRSNRPDAKRKSLGWIPFKKSAIKHLSTRQTGKKALKSTLQLSLSKGQKLIIDVFDSYNLSLYQINTLEIVQDSRNRWYACITVKDYPKQVSGMGRVGIDLGLKESATTSMGDKLTIKQTQKWAKKLAIAQRANNKNRVKAIHAKIKNTRLDLTHKFTTKLVKDNALIVVGDVKSRSFTTKKTNLAKSTYDAGWFELKRQLEYKCKHAGCQLEIVNESYTTQTCSCCLKISDSSPKGRAGLRIRGWRCAECGTWHDRDINAAKNILAVGLDRLAVGIPSV

SEQ ID NO: 33355 - protein, 268 aa, Nostoc sp.
LLGCRHRQGALAQTKETSARGYYAQFAVDFVVKVHTEPTLQVIGIDLGLKYFIADNIGNVEPSPQFYRKAEKQLNRANRKKSRKFSKEKKKAKQKQSNNYHKARNRYARKHLRVSRQRKEYCIRLAYSAIQSNDLVACEDLNVKELVRNRHLAKSISDAGWYTFRSWLEYFGHKYGKVTVAVPPHNTSQNCSNCSEKVKKSLSTRTHVCPHCGYVEDRDINAAINILKLGLTTVGHTGSYATGDLPSWAVGVTLSSNGESLNVESPSL

SEQ ID NO: 33356 - protein, 327 aa, unknown
  TnpB Polypeptide
MKRLQRTYKVELKPTNQQIQKINQSLGVCRWLYNAYLAKNQSLYQDFKEGKLDKKKAFMSANEFDKYINNDVKFLDDYKWINDCGSKARKKAICNAELAYKKFFKGEAQFPRFKKKGKSKVGLYFPKNNKTDFKIERHKINIPTLKWVRLKEFGYIPTNAKVISGTVTEQAGKYYISIVCEVEEVKNSLPKTEPLGLDLGIKDFAIISNEVVKKNINKTSRVKKLEKKLKREQVRLSRKYDCLKNQNKIRKGETTRQNIRKQIVKVQRLHQRLRWYPSSKLCSCCGNVKKDLKLSDRIYVCKECGLVIDRDLQASINLREAKTYKIA

SEQ ID NO: 33357 - protein, 417 aa, unknown
  TnpB Polypeptide
MTTKRITRGYKFQVLPTEEQKVFFAKSFGCSRFVFNRFLNARKEYYLKNGKGIGYNDTAKLLTELKEQKNTEWLNEVNSQSLQQSLRQLDVAYQRFFKKISKFPSFKSKYDNQSFCVPQHFSFENGLLTIPKLKSPIKVNQHRPFGENSEIAFLTISKTKTNKYFVSFIVEEDFTPKVKKTNKSVGIDLGLIDLMTFSDGKKISNPRIAKKYRKKLEYRQRQHSKKTKKGKNRERARVELAKTYEKINNVKLDYAHKLTADIVKNHDTICMEDLNIANMMKDHKKARSIQEVSWYEIVRQLKYKSEWNDRKFIQIDRWFPSSKTCNDCGYINQSLKEGDREWGCPICNVHHDRDYNASLNILKQGLSGLGTKSLAKQKRCEALEMVCGKTQRVSKSMTNETKKLKFGVGNPPALAGG

SEQ ID NO: 33358 - protein, 439 aa, unknown
  TnpB Polypeptide
LIDLLVDGTDDTLVLKAALEESAMPAGESADPEPGPSRVRPAAVKYELPGLMSRPPKGGEPKACKAMLYTDLGTLVSPRLAELVRRDPAKHAVAFKTAIWRCLTKLGSNKHAGVEHMDLVFNNVIDTDGHSVSLHYVSRSLHGLTRFNGGFKALVTSQRRQAREEKAKGATYVTSLPEAERAALLRGTIVACDPGKASLATVTDGWGRAVSYSAAQRRAESGSLAHAKEHRMHWLLAVRPDPGARTAGELIRTIGAVPGLPGVVRSAKSCVPVHYEQYLRSRVAVEAPLKAFYRRPAFRAHRYDAHVGRRASEDRFASRIKAAFGDDVTILYGDWGRTPNLRHQPPSPGVGLRRRLCGHFRVYLVHEAYTSSRCPRCRGREVTKPRQDNRGEDVHHLLKCADRLCSCHWWNRDVLGALNILATGKHALRTGAWDPLFAA

SEQ ID NO: 33359 - protein, 390 aa, unknown
  TnpB Polypeptide
MRTSYQYKIKPNKEQAKKIDKTLEMLRYQYNYLLAQRFDWYEMNRSLIDRCPLICHLPELKDKPNYYRQKASLTQLKIDRPWYKEIHSQVLQEVPKKVEITFERWLKGDANGKKSGRPRFKGKGQYKTFTFPQFNQYHFANGIITLSKIGGVKVIVHRQMPDGFDIKTVSVTKKADGYYVTLSLDDKTVPTVKPDFNADNIVGIDVGLIDFYVASDNTRIAAPKHLRKAERKLKSAQRKVSRRHIGSNRRKKAIKQLGIKHKKVADTRRDFHFKTAKALLDKYDVVAVEKLNIKGLAKTRLAKSVNDAGWGHFVTILSNKAENAGLKVIAVNPNGTSQECSSCGNKVKKPLSQRMHSCPNCNISLCRDLNASINIKARGTHALKAQLMSS

SEQ ID NO: 33360 - protein, 613 aa, unknown
  TnpB Polypeptide
MWGRHLSQISLQTRVADASGVLDAFSELMNRAERRIHAELLSGRKWTGDIAVSLYREFGISAKLMESAYAARQAKVQSAQELAKLHAEDLTHKIEKKNRQIVSKERKASKLHKEIRSAAETIVKGEAKLVKLGAALDKSAPAKRPMALQRFKSMLGVLKKERQKVADACGEIKRLRRDLHQHRRRASTLEARLAEARRRIDAPSICFGTRKLFNAQFHLAENGFSSHAEWKAVWRRSRNSTFMIEGQAVSPAGNQFARLTHRRKGLFDLELRLPEALKHLAQETRKVRGSIIHVVQFSGLKFSHQARELAAALTRGIPVAIRFHRDETGWKIMPTFKAEVAEAKQDFSCGAVGVDINAGFVSVTRTDRFGNVIEAFDLPMVTYGKSADQSRDLVRKAALKIVRHAQEHDLPVVSEKLDFARKKRELTDGHDARYARMLSSFAYSGFDAALSSAAARQGIHHRRVNPAYTSIIGRVTFARRYGLSTHQSAALAIARRAMQLGEQPPRSFKESRSVGVSLNDAHHVTLELPVRKDPGAQDAGQRHVWSDWNEVGKAFRGALAARRQSRQRKKPRSVMGWNDLHSMVCRMGRTVSARSEPVAGSSGELAPPRRKPR

SEQ ID NO: 33361 - protein, 543 aa, unknown
  TnpB Polypeptide
MECPSASGWQKTEVTTSSPNQKRKREACDKDKDKKGRAVYPFWNEATTRWSREHLPDADRIMAAMPISSIPKTCFDAYVHFSAYRSAGDRPWRAILESGLPAPPPPPIPRVKSRTKKKTTAPDCGQPTAKKKSSYKAKTPKLPGDKTKRLRIYPTKVQKDLLSKWMGTVRWTYNQAVDAISKDTSLEKNEKRLRSIFVTKKAIENLKSSDDPFDHDFSWVLETPSFARNRAIADAVMAYQSNRAKQAKQGKRYKFDVKFRSRERDAQQSIAFSSADWGRTRGKFAGLLSHKVLRCCQMLPDKLDYGFEIVHIRTTSKFYLCLPGPLEIHARDPLKPFRAIALDPGVRTFQAGFDSDGNAFEFGVQKDERRIFRLCQHLDQLESRRTALQPGGDLTRFLYRHKKRANMKRAAARLRERIRNIVNELHRKTSLWLCCNYDAVLIPEFQTARMAKRGEERCIGSKTARMMYTWAHYRFRQHLMHKSRASTLRAGWSSFERTTRARHAVDVVRSTGNSEVPKCSDVQPVDMQQTGTSTQCETSSFDI

SEQ ID NO: 33362 - protein, 349 aa, Paralcaligenes sp.
MSTKVYRYRVKSLSGMLNKQSRAVNFVWNFCNDTQKHALKWRKRWPTGFDLNVLTTGSSKELGIHSGTVNAVCEQYAKSRGQFRRPCLRYRGRRSLGWVPLKGRELKRHGQAFRFAGHTFRVFNSRALPEGKIRDGTCFARDAQGNWFLNVVIEVADAPARPIHNGVGIDLGLKEFATLSTGEKIDNPRHFRQMEEKLATAQRARKKRQVAGIHTKIKNARSDFLHKLSHRLVNEFDYIAVGNVNAKALAKTKLAKSVNDAAWSSFRNLLQFKAMTHGATVEEVNERLTSQTCSSCGALPDSRPNGIAGLGIREWVCSDCGAMHDRDVNAALNILRRGRATLAVGILAL

SEQ ID NO: 33363 - protein, 358 aa, unknown
  TnpB Polypeptide
MLDDLADVHNHFLKLEHRYYRIYGKYAGRYRLQPHLTKLLKRTKKYWAWIPRDTLDAAIIRIDAAYQRFFAGKGGSPKFKRKHRYRSAKFQTGYKLEDGRVCLSFKSWDAQSQCLKFDKIWFSFHQHRDWHGDVRYVQILRDSVGEYWLYIVTDDISTEPLSETGESVGIDFGLKTFLTLSNGEKIEAPEFLKQSLKHLRKLHKSVSRKIKGSNNYYRVIRQLARHYRKIANQRLDWQWKIATDLCKRFDIIATETLNLDGMKRLWGRKVSDLGFYQFIQVLDFKCFKHKRHFLQVGQWTATTKPCSTCGHQNENLTLNDRQWKCQKCPTEYDRDINAAINILRAAYDPDKCQTRLWR

SEQ ID NO: 33364 - protein, 413 aa, unknown
  TnpB Polypeptide
MEYSHRYHAYPTEEVAEGLEHHLDVHRQLYNHVRWDYENSPEDDKPSEYDQNNELPEWKRKWPVFGELHSKAAQATVARFHHNLTVLSKLKEKGYNVGRLKRQAPADYRSVTYNQSGFDLDEKRGHDKYAYVWFSKIGWMKIRYSRPIPDHATIKEVTFKKETTGEWFVSFGLETDDADLPEKPTVDSLDASNSVGIDLGILNYIHTSDGKTVDWLTLEDDHERLRREQRKLSWKEHASQNYERQRQKVAKVKRRIRRKVLDYQHKLTSWLVTEYDAVFVEDLDVAEMLQGDGNAHNKQDAAWRQFITLLEYKGELYGTHVVQVEAEGTTMECASCGVETAKPIWVREHSCPSCGFETDRDANAAMNILQRGFADLGLGWPEDTPVETVTATDTTRFESVSASYVIETGRLSS

SEQ ID NO: 33365 - protein, 652 aa, unknown
  TnpB Polypeptide
MEKAKEKPPEFFKSTKTSLKSILKHPEINTRKINDVVIKAHKIVIHTLQFLKLYILHHYQTQSQTIPIIDKILILNVMKVVCGEKHTKQGKPPKKETVELTTKLTSFYTEHYKPYTQPEQLDYEYMSNVLSYLCEDIMTMYENNIQLHYVNYVERFVNVVWKKKMMVEKIRKLFLTKKERESRIRHLEKELRKIKNDLLNIDNSVAYTAQPHYHKWITQQKKHIIPNKDKFQKQSIYYDLKCKPMDYFRCMIAMMEQVENDVETISNVFPLRSSISPGYIRLDTITLVNMLLRKEQGKKRDFSNQGNTKKHEDKIWKFFFRTEKKVFSKNDFSFHHMISTDGVGVSILFIRDDLVGKRLPSAKKGVSKELYIDELNDYSALQNKKIIGIDPGKEDLIYCVDDASKGANVFRYSQNQRRKETKMKKYNNIILGMKTNKIQGKSVIDYETELSLYNRKTLCMDKFKAYINEKNRINHLLFDFYAKHLFRKLKFGRHINIKRNEQKMMSDFRKMYGNPENVVICIGDWEQRKQMKYKEPTLGIGMRSLLRKNNYKVYLVDEFRSSCKCSKCDGGVCEKFMVRKNPRPNKDDMRLVHGLLRCKSGCGSWNRDRNGSSNIYKIAYQAIYGLERPGYLCRTSNQSASTSAYTQNIHKV

SEQ ID NO: 33366 - protein, 362 aa, unknown
  TnpB Polypeptide
MVQKAYKFRLYPNKEQREYFAKTFGCVRFVYNRMLAEKIACYEETGKSLSVTPAKYKSEFPWLKEVDSLALANAQMNLQSAYRNFFRDKSVGFPKYKSKKNNHKAYTTNNQKGSVAIVGKYIKLPKIGYVRVKQHRGFIGTIKSVTISQVPSGKYYVSILVETEHIEFPHTDNKVGLDLGIKDLCIASNGDKFENPETLKKYEKQLVKLQRQLAHKEKGSANFYKIKRKIARCHERITNIRKDNLHRISHKLINDNQVIVSENLAISNMIKNHNLAKSIADCSWYELTRQLEYKAEWNNRQYIKVDTFYASSQLCGCCGYKNTDVKNLAIRIWSCPVCGTKHDRDLNASQNILAEGLRLLSA

SEQ ID NO: 33367 - protein, 388 aa, unknown
  TnpB Polypeptide
MEAIDIYKGFKFRLYPNNMQSKKINKNFGYNRFVYNYYLAKIIKEGYKSTSYYIKDYTTRLKYEYQFLWEADPMLIKKIIFKLEDNYKKYINGNSGYLKYKSKYNKNSYTINIIHSNKTIDYKNIKLDLENKLIKLPNLGNLEIRGYRNLKQIDGRIVNYTISREKNGKYYIAVLYELSDIQKVTPETIVGLDLGIKKLITLSSGKTYENNRYITKYEEKIKREQKNLSRKQKGSKNYYKNIKKLNGLYIKLSNNRRYYNHKITKEITENYDIISTESLTISKMIMDKEHHLSKAISDATFNEILEQLEYKAKERGKYFYKISPYYPSSQICSVCNNIDKKYKNLDERMYECNRCYSKLDRDFNASVNIMFEGLKIHIMAPMKNLSTR

SEQ ID NO: 33368 - protein, 336 aa, Crocosphaera sp.
MLAKLLLKDAGHQLLDFLIIVRNKFLVKKGYPRFKKNARSVEYKTSGWKLLDPKHIEFTDKKGIGKLKLIGTWDLAFYPEDKIKRVRLVRKADGYYCQFCISVDVKEELPPTHQTIGLDVGLKEFYTDSKGKNEPNPRFYRQGEKRLKFHQRRVSRKKKGSINRKKAINKLGRKHLKISRQREEHTKRLARCVIQSNDLVAYEDLRIKNLVKNHCLAKSINDAGWYQFRKWLEYFGVKMGRITVAVNPAYTSQNCSNCGAVVKKSLSTRTHVCACGCRLDRDENAAINILNRALGTTGHVGTWILDPNASGDLSSTFVGAILHQQDGSLIEESPYL

SEQ ID NO: 33369 - protein, 369 aa, unknown
  TnpB Polypeptide
MPRQTFKYRLYPNRRQRETLQATLAVCRELYNAALQERREAWSSHRKGIYYVEQAKQLPDIKAVREDVRAVHSQVLQDALRRMDKAFQAFFLRCQRGQVPGFPRFRSESRYDSFTYPQSGFKLSGRLSLSKIGDIKIKLHRAIQGQIKTLNLKRENGMWYACFSCIVEPEPLPANDKAVGLDVGLLSFVTRSDGRRIDNPRWFKKAQKRLRRAQRRVARREKFSKRWKKAVRLVARIHRKVFNQRNDFQHKLSRKIVNSYGIIFVEDLNVKGLSRGLFAKSVHDAGWAALFSKLSYKAENAGRLLVAVDPRGTSQRCSCGEANRKRLSDREHVCLHCGLVTTRDHASAMEVLRLGLSLQPLTAVQECCG

SEQ ID NO: 33370 - protein, 425 aa, Aphanothece sp.
MLVFEFKVRAKKHQYLAIDEAIKTAQFVQNKCLRYWIDNKEVGRYDLNKYCRVLAHDFKFANELNSQARQSSAERAWSAISRFYEQSRLSEARNNCKKKIPGKKGYPRFKNNCHSVEYKTTGWNLDPLTRKAITFTDKKGIGRLRLVGTYDLHFYKIEAIKRVRLVKRADGYYCQFILSVDLKIETQPTGKAIGLDVGLESFYTDHEGNKVENPRFLSKGEKKLKKLQRKVSKKKKGSSNRRKARQKLGRRHLKISRQRKEYAKRIAYCVVQSRDLIAYEDLRIKNLVKNHCLAKSISDAAWYQFRLWLEYFGTKYGKHTIAVPPQYTSQNCSNCGRTVKKSLSTRTHICSCGCTLDRDENAARNILRIGLSTAGHTGTWLHDSQNAWGEDASTLVGGNTCHAQATSVNQESPPFYGEGVSNELF

SEQ ID NO: 33371 - protein, 346 aa, unknown
  TnpB Polypeptide
VAGSTARRYVGWRCRLYPSPAQDEALLRCRNGLRELANALLATSQLRYGETGRRLSLIEMRAFARDWKRQPKHREFPASASYRVAADLDRTFRTWFSRPGRRGRRGFPRIKSTGREPGIYFSNQGIRFDGSRVWLPRFGSVRWKGGKLPQGRLPGPSGRKTLGLLSGRAWLDAGNRWMLSCLFECAPLTPVEPRTEKAAVRQNGREISVSVDGEALHVIRESRTLRNARRRLARLERRLERCEFGSEGRKRTLALMRNQARKVRNHQADLQHKATTGVVHEAREIEVEGAGSELLRQLEYKAEWHRRRLKVRRGPPEPGTGKPRRARRPGSRSQKRESRTRRPKAL

SEQ ID NO: 33372 - protein, 249 aa, unknown
  TnpB Polypeptide
MESMERVQAYKFQIMPSGEQHRDMRRIAGSCRYVWNKALALQIANHEAGEKFINHFAMCKWLPAWKKDPETSWLKEAPSQPYQVVLKDLARAYKNFFEKRADFPTFKKKGVSSSFCFPQGCEIDAGNCRIRLPRLGWIRYRKSRNIEGVIKNITVSSVAGKWYASIQTGREVDEPVHPSTSIVGLDAGVTLFATLSDGSVFEPVNAFRKNAAKLAKYQRGLSRKTKFSNNWKKTEAEDNTTASTDSSYS

SEQ ID NO: 33373 - protein, 481 aa, Thermodesulfitimonas sp.
MMTVPGRIYPDAAAREELVSFMGRFQAAKRSAYQALRRGKETGEIVKTLYEKFFPNARWCQWAVEDAKAAIESQKELVKMYVSDLEAKIEKSEEKLDRTKDRLHCQGILARLNKLRTKLAYWQGFLERNEVPPAVFGGKKNLLLLQEGKLSKEEWREMRSNAFYSVGQANMKGLEGQHGNANTEIVYHDLTDTFYLNVYIPPEPENKTGRRRKEEEWVTVPLEIPARYRNLLILRLLKGEAYTVRVVRKDGRFECLISFPLGDTVPVDKDSIMAGIDLNPEVAAVTVVSPNGNFKASRCFWCPELVHVSHEKREWLAGNLAKEIANWLEGLGVKQVALEELAFARDHDTNRYFNRITHNFCKKLLFNRIVVALRKRGVAVFTVSARFTSLIGYFKYAETYGLSAHQAAALVIARRALGYAEKMPRELMEVLSPKEGWRHFRLWGKFFGLFKAARKRAVREGYLTQRWRPEDWLVFMFGKTG

SEQ ID NO: 33374 - protein, 564 aa, Thermodesulfitimonas sp.
VPKVKPDLKIFTVCGEFFPEDFPPSKSEKWSRGEENPLQTEMRLFSSCLRWAFKRLLEGFPRNVIKKLGQEFFGLNSRFVDDARLKAQAVLDSQKELLDKEIEETRKKLGRARKALSFSAKKLARAEKEGADQEKLEKFRLAVKGREKKVARLEKKLCELREHKRNGTVPKVVFGGRKLWRKVCRGKATRTQWRAARKNRLYSRGDTSKRGNPNIKVSFDHEKQDFYLEVTISHLSKQIGADKKGRPKMSRAPKVRGRLWLPEKHRARVLELLSRDAPYSAEIIRRLDGRYIVYLTFELEELPEFNSSPGLIAVDTNPDGLGLANLNKYGFPEPWPEGIKALLEEVFPRSLHKYEGEFRVVFYPQGFLYLRVPELGYASCHRRDYLIGVLTKAVVEVAKACGKPLALEDLSFGKDRLVLGKKLNRLFSNFPFSRLLHAVLRRAVKERVGYKLVSPRHTSTIGLLKYQKRFSIPVHCAAALVIGRRAMGLKEKITREIREFIARIKEKLVSGSPLPGEEKGMSWVRASLSRAEKKLNLHNGLCPTEQASFNSVWRKLKRLALAFQ

SEQ ID NO: 33375 - protein, 429 aa, Thermodesulfitimonas sp.
MKRTNVIRVLYAREQAEYLEILADRCAALWNAVQYRCRQLFLKGEPVPSYAKLCSEFKECSAYKALPSDIGQEIIKKARKAWDSFFALLRLYRKGELENRPRLPGYWKDRKTGKRTAKVIPVKSPKSYRLTARTLSLTLPADLRTKNGHRLVLQTRGVLRFSGTPKTLELKCDQVKKRWYARQVVEVSKSVRSLKPEKHAAADLGARILVALAVEGMDQQLLFSGREVWKDFLYWTKRIAEEQSRLNRSGRRTSRRLRQLYRMRALRLKHALAALAARVARTLKRHRVTVLHVEDLTHVRDEMDFGPKNLLVHNFWAFRMVRNLITQACERAGIRVAADGTRDSLTCAVCGSRVRRFARHKALCRHCGRTWHADANAAAYMLKVSGSSKGHGPEAGPGKPLRYRWNKHRWQSRAESAASRSGPKAAQAA

SEQ ID NO: 33376 - protein, 391 aa, unknown
  TnpB Polypeptide
MLLCKKIKIEVSDQDAEALEFMQGKCRGLYNWWVGRLRSGERWNLEHAKKSLREGKVYDPDLRFVYGKLLAEVYFRLDKAMQAFFQRVLEGTKKPGFPRFKPRHQFFTLCYPAMYLEVQGNTLILPTGGGGNWGPKRYPNIVAHLTEEPPEQFREVAVSRDARDNYFCSFVYEESKQQVSHEGIVAFDLGIKTLATGYTDKGRFYHIGGFKGYRWYNKQLDKIRSKRDRCKKKSRRYIHLSRVYKRVAEQKHNKQQDCLHKASHLIADTLAERAVVIGDLSQQQMVLKKQESETPKERRKRQIRNRMVYNDWGLYSFVQMLEYKCLLYGKELYLISERDTSKTCHMCQQKHAMPLWKRTYRCENCGLVMDRDDNSAVNIYERFVARRGPHA

SEQ ID NO: 33377 - protein, 410 aa, unknown
  TnpB Polypeptide
VEENTTYFKAFKFRLEPTPDQSVLLSKHFGCARFIFNHFLKEKQEHYLLNKKTLNYNNCSGIMTNLKKQEDYIWLSEVNSQCLQAALKNLETAYGNFFRKKSKFPRFKSKKNNTNSFHCPQFVSVEKNKVFIPKFKDGISFIKHREIKGEIRSATLSRTPTGKHYVSILCELPLEKPLKKTGKSVGVDLGLKDFLITSDGKRFKNERHLKQHLKELKDQQKHFSRKQKESKRKERQRLKVARLHEKITNSRNSQHHQISSFLVKNYDLIALESLNVKGMMANHKLAQSISDVAWSSFVSKLEYKAKWYGKEVVRIETFFPSSKTCSCCGHQKSDLSLNDREWTCGSCYTIHDRDVNAAKNILQRGITIQSSGTDDYRHGAKIRPEKKFKGTSVEVSKKKGRIYTLKPVGL

SEQ ID NO: 33378 - protein, 239 aa, Bacillus sp.
  misc_feature (232)..(235): Xaa can be any naturally occurring amino acid
VKNQAIKDAKSLFAIKVKKSHYKIIPILKRPVCVWNNQNYSFDSTHISIPFKRNGKSTRVKIRALFSDKNNRNLNLLKHKLGTLRITMKSNKWMAQISVTLPTNERVGTKILGVDLGLKVPAVAITDDDKIRFFGNGRQNKCKKRKFRCIRKKLGKAKKVNALRGLDDKDHKISREIIGFAIVNHISVIRLEQLTNIRQTARTSRKNEKNLHTWSFYRLSKFIEYKAILADXXXXSAIG

SEQ ID NO: 33379 - protein, 408 aa, unknown
  TnpB Polypeptide
VSLYSYKYRLNPTSTQEVLLNKHFGCVRYLYNHFLDQRTTVYKESQETQNYYSNAIEIPKLKKELPWLKEVGSQALQYAVKQLQTGYDNFFRKVKQKTKGKKGFPRFKSKHGKQSFKVMQNVKIVEGKLIIPKFLEGVNFVQHRVLEGEIQFATISKNKAGQYFASITVKKEIAQLPRLNKTVGYDLNAAKIVGSDGSKHENPLPEHEHKQHLRFLAKEVSRKVKGSEGRKKAQLRYNKLKLYCKNVREDFLHKVSSKIINENQVIILEDLDVKGMFANLGDKRKEPRWKERKLHKQLQDCGFHSFVQKLMYKAEWYGREVIKVSRWFPSSQLCSECNYQNKELGQEKEWTCWNCFASHDRDENASKNIHNEGLRTLGTRGIADCPDVRPIKFGLLVGSEATPSLAAG

SEQ ID NO: 33380 - protein, 380 aa, Microcystis sp.
  misc_feature (374)..(374): Xaa can be any naturally occurring amino acid
MYGVQQVLIHADSEIRAILEFICEEANKLANCGLYYCRQMLFKAGRYVKKYHLDSQMKNHPHFRSLRSCCAQQLLHDVAESFSSYKGLLSLWNKGQLPNKPKPPKYRKKGGMAVVSYPSRYVKQSEKGLKFSLGEQVKAWFGIDIFYLPMPSNLRFEDIKEFRLVPRNLSFYLECVYEQPAQEKVKPNNKVLGIDHGLNNWLTCVSNTGKSFVIDGRKVKSQNQWYNKRIAQIKTGKPQWYWDQELAILTEKRNRQMRDNVNKAARFVINWCLNNDISTIVFGWNQRQKDSIELGKQVNQEFVQVPTAKLKGRIKQLSEQYGINLIETEESYTSKASFLDNDLLPKFGEKPAGWQSSGKRIQRGLFKAFNGQLXKYIVIE

SEQ ID NO: 33381 - protein, 333 aa, Bacillus sp.
MKKVKESFKKGKPTFPKNTSFSIQPSGIVSLSLPKKTMIWLTFYSFEHCYLDPKIKNTKAKIGRLKHRLDRLQQKKEKLQEHVPSAVFGTKKLFRSQFTKEEFVTHHEGWKPLFSAARNKQMMISGRKDAGYGNFMFQYNMEKQELSFTSIRGNVLTFPFVMFPHGQDIVNYVIETQIACKQKNKYGQPISWSIEDQEAYYLIKCMVDVETNSYINFSTSDGVIGVDCNYDHLAWVNVSKDGNYLESGILSFSLEGKCSGAITKILEAEAIRLVELAVRKNKPIVLEKLDTTLSKTGNKYDSKKRNRRKSMFAYRKMIDAIQNRANKMGVDVK

SEQ ID NO: 33382 - protein, 391 aa, unknown
  TnpB Polypeptide
MQSYKFRLQPNKEQREKLDNMFGCSRFTWNYFLDLNNKIYLESKEKDLKKKHLNYYDCANKLTGLKKENEWLKEANSQALQQTLKDLDTAYNRFFQKKGGFPKFKSKKNNQSFRVPQFFKLKGNHSCFPKFRKGIKTIIHREVLGNVKYATISKTKTDKYFVSITTDFEVKKKRISDNQIGIDLGIKDFTVLSNGEKHSLKIKEGNIRFLHKQVSKKMKGSNNRDKARLKLVRRYEKIDNQKQDFQHKLSDKICKDNKLIAIEDLNITGMVKNHCLAKSISNQSWYSFIAKLEYKAKRYGSEVVKTKRFYPSSKACSCCGFVNQDLTLADRNWQCPRCKTELDRDINASQNILAQVLRELNIKGGRNYRLKPVELSSLDEAMKQEATRSLA

SEQ ID NO: 33383 - protein, 197 aa, Paenibacillus sp.
VETDIQPLPKRDDKIGVDLGLKSFAITSDGDTVENPKYLRKSEKRLAKLQKDLSRKKKGSNNRYKARLRVAKLHEKINNQRRDFLHKVSSKMISENQVIVMEDLRVKNMMQNHKLAKAISEVSWSMFRAMLEYKAQWYGRGIIIAPKHYASIQLCSCCGYKNADVKNLGLREWTCPECNAHHDRDINAASNLLKLAM

SEQ ID NO: 33384 - protein, 447 aa, unknown
  TnpB Polypeptide
MITISHKIELVPNNKQKSYFRKAFGCARLAYNWGLAEWQRRHKEGEKVDAYGLKKAFNAIKKEEYPFVLEVTKYATQQPFINLGKAFKKFFEDLKRGAVSYPQFKKKKDNEGRFYIGGDQVSLSDTNRNSMALKKMPHNERQKRQYLKVPNLGWVKMTERLRFIGKVNGVVVSQQGDKYFASFSVQVTEEEYRRTHPKTCSCRENRNAGIDLGIKSALVLSDGVAVENPKPLKDNLRKIKRISRQLDKRTHARTKQERLEGKKKSKNYRRLSVRLSNAQRKVANMRRDFTQKVTTILATHYTHIALEDLNVKGMQRNHHLAQAVGDASFGMFLTLLDYKCRWYGVNLIKIDRFAPSSKTCGKCGYVYKGLRLSERSWTCQECGTRHDRDFNAAHNIKEFGLKALPTERGKVKPVDCPTVDERPRVLKSRGRKKQEKRRDTSLRSSCL

SEQ ID NO: 33385 - protein, 413 aa, unknown
  TnpB Polypeptide
MEQTLTAKVRLYPTAEQAEMFKVVTKEYQRLCNIVSQWVFDQHFKVNQKKFQKEMYHPLRAESPDLNSLMVQSTYRTVEAQYKTVRTQLSQHPYRYNTGKKNKDGEEIWKSVDRTLEWLWKPIHFKRPQADYVRNLNYSFVKKGTLLSINVLGQRIKVPFKADYLQDWFKLDVHLGTAKLVCLKKHWFLHIPVTFDTDDWQITDNQHIVGIDRGLRQVMTVYDEQGKTKFFPGRAIAYKRKKIAYLRAKLQSSGTKSAKRHLKKMAQRENRWMADVNHCLSKTLVNHYGENTLFVLEDLTNVSFDEKNQSTRDRNRDLHSWSFYDLQTKLTYKAKSQRSQVLIVSAKYTSQRCPKCGQIRKANRNHVLHLYQCKHCGFTTNDDRVGAMNLYDLGKRYLSGEEKPKYTLNNVTD

SEQ ID NO: 33386 - protein, 386 aa, unknown
  TnpB Polypeptide
MIFKSFVTQRTITLHVGENADLLDTIKVFNECCNQFMTLGFEERTSSKRKLQLHYPAMRKRFPRLQSSLVQGARDCAADMLKREKCKKLPLKRTLSAIRYNLRTFTPKMLKNELSISTLNGRKTITVSIPAHFEQYRGLRIDAMRIRATRSERIVLELIGELPDVPKKEVSTCIGIDRGINNIIVTSDAQFFNSKKLRRIRGRYAHNRSSLQSVGTRSAKRHLRRLRGREQRFQTDTNHCISKSIASRCLAVAVENLTGIREGCTTKWNKWHNRRLNGWAFAQLEQFLDYKLAANGGALIVTGAPYTSQMCSGCHCFGERIGNRFKCRNCGLDLHADLNAARNIAQQGNALLMQAAVNRPIVTSYDGQHACSPEFSCKPPVLTGGD

SEQ ID NO: 33387 - protein, 193 aa, Blautia sp.
LERYFHKEIARVQSAWYAQQSERGIKYPKSSKHIQRLYRKKQNTVKDYLHKVTRWIAEYCKKEDIRCVVVGDIRNIRKEKDMGHKTNQKFHGLPYNRLYIMLEYKLKLYGIQLIKQEESYTSQCSPLSPEVSKRHAEASNRKERGMYITDGVRFNADAVGAFNILRKHLSVSGKQKELSVTGLKTPEIIKVAA

SEQ ID NO: 33388 - protein, 437 aa, unknown
  TnpB Polypeptide
MAKTSIQPITEQWAAYAFLKSNPEMYTPVMDNIRYAALFRFTRIHQNLKKAPKRNSSRKKDIRDEQFIVFRFLAKPNNEQEQFLRQSAGNCRFLWNLMLADLKKTGTFSRPAAYKKEYDFLKAGDSTSLTNVQLNFESAVSDWRNGKKGFPHFKKKYISKDSFRCTVVYNQSEKGNMTLTDSGIILPKMKTEIKLRLHRKIPEDMILKNCTCTLEPNGKWMFSLQFSIVQSQDLLSIFDKKEIRRIGLDMSLPKLYIDSNGESADFCKPYRNLEKKIAKEQRKLSRMQKFSSNYMKQKQHLANLYAKAKHQRSDMLHKLSCKLTDAYDLITIEALNMAAMKQALSFGKSVSDNGWGMFVNLLEYKAARKGVLLLFVDKWFPSSKTCHRCGYIHKELQLSDRQYLCPACGHVMDRDVQAAKNIDEEGLRIFYELKKAG

SEQ ID NO: 33389 - protein, 375 aa, unknown
  TnpB Polypeptide
MITALKVRLEPNNKQKSRLFQSAGAARWAYNWTLARQEENYKNGGKFINNGDLRKELTHLKQTDELKWLNDYSNNITKQAVKDACNAYYRFFKELSDKPKFKSRKKSPPKFYQDTEKIKFKGGKVRLEKIGWVRLSEKDRIPENAKYTNPRVKFDGVHWYISVGIEAEQEPVELTDESIGIDVGIKDLAICSNIEKPFKNINKTREIRKLEKKLRRLQRKVSNKYEKNKEGRSYVKTNNIVKLEKDIRKLHKRLDNIRTDYRHKVTTEIVKTKPSRIVIESLNVSGMMKNKHLSRSIQQQEFYEFSKLIQYKSEKQGTEFVVADKWYPSSKTCSVCGHVKTKLSLSEREFKCECCGTVIDRDKNASINLSRYKVS

SEQ ID NO: 33390 - protein, 490 aa, unknown
  TnpB Polypeptide
MGYMRTRKVLINQGHPLFDYAKTITSLSNNLANAALFRERQVFTAVSKPENEWTANEREVMEEIRHALPLMKQKRQLPAKGRSVLGSGYLYDVLFLTGNPDYFAAGLPRQSAQRIVKQAAMDMFSFLKACRVYAQDPSGFTGKPKLPGYKRKGGYCTAVITNQDCRIKTGADGKWYAELPFIKKVPLCIGEPFQDARLKEVTITPDNGRFSFSFKFEVDQELPAAKEESIRICAVDFGVENLMAVTNNCGLPSLLYKGGTAKSANQLYNKTIAGLVSIQTLETGKKFVPTPEYHATTNKRNDRVRDLFLKDAKHLVTWCVENRIDTIVLGVNKGWKQQVTLGHKNNQEFVQLPHAMLRSMIAYLASWNGSRVIEQEESYTSKASFLDGDSIPVYQQGDDTPYCFSGKRISRGQYRLADGIILNADINGSANILRKAFPDAFAYGMPDLTKTEIIRHPDLESRRQNRRNQTAAAKPISHAKQKRIARKRAA

SEQ ID NO: 33391 - protein, 381 aa, Frankia sp.
  misc_feature (282)..(282): Xaa can be any naturally occurring amino acid
MGGGVVKRAYRYRFYPTPEQAEQLARTFGCVRYVYNRALAERSRAWFSEQRRITHAETDKMLTAWKRDPETAWLAEPSKGPLQATLRHLQSAFVNFWEKRAGYPSFKKKGRTLDSATYFRNCFSYRNGAVTLAKQDRSLDIVWSRPLPDGADVSQVTVSRNSRGQYHISILVEETIITLPPTSGQVGIDAGITSLVTLSTGEKVTSPRYERADRARLARAQRELSRKEKGSANRAKARARVAKVHGRIRDRRRDHLHKLSTRIIRENQTVVIEDLSVRTMVXNHALARAISDASWSELRTMLEYKAGWYGRTVIAIDRFYPSSKTCSVCGSIVEKMPLNVREWACRGCGTVHDRDVNAARNILAAGLAVAACGDGVRPLRS

SEQ ID NO: 33392 - protein, 560 aa, Drancourtella sp.
MARTKHEKTEYEKCRRVFRSQSARHVLVLEVDMSEDMKRRAFSLSDRLRVCGNKLTAKLEKGLAQLIRTKKYRALLKDYGELTERLKRSPDNEAIKKARKEIASKMSEMQKAYHVSWDDACTYMQFLKDRDDLNSIFALSRVEDIGAGVEKVLFGGAETIHFKKRGELPEIRAKQINRGIVLYVADGKLYFKCSNIGNEKFTTKILDKFQQDEVNRLLDYLASPEQKDEMAVSAMMETGEITDTFRPCYGALVCKKIRGKLRVYMHLTIEGHAAPKYKTDGVTPRHTFGNGRIGIDIGTQTVAYTSDKEVGLKNLSERGLSIFHAEKRERQLLRKMDRSRRATNPDNYNADGTIKKGYKKWVKSKRYIEIQKEHANLCRKNAESRKYAIHEDVNHLRCIGDTVITEPPNFKALQKRAKQKDTQSARETTQKKNQRRKRFGKSLKNRCPGTFQAVLKTRFEMTGGVYHEVQKMFRASQYDHTADDYIKKKLSQRMFALEDGEVVQRDWYSSFLLYNANPDFSAPDRETCLKTFGTLNEMHIKMIDYIKHAGIHVLNSGIAC

SEQ ID NO: 33393 - protein, 302 aa, Nocardiopsis sp.
LAHLSNAAHGRYVLSGRVVFAHRGTEWADRVEADGAVAYRLHLDTGRGPGRGRWYVSAFWTHAPVPQVPWEAALAHGVVGVDANADHLAAWRLDTRGNPIGNPRRFAFDLSGKSQHRDAQVRHALSRLLRWATAQGVHAIAIEDLDFAREKTREKHGRRKRFRQLISGFPTAWLRSRLVPMAHTLGVSVIAVDPAYTSRWGAQHWQKPLSTKRRKVSRHDAASIAVGRRAQGHPVRRRTAPPPHHQGDGVGHRTVQAASGSSGREGNRPPVTERARDARGRARQERGDPAHPEPFGMGAVPA

SEQ ID NO: 33394 - protein, 379 aa, Anaerolineales sp.
MNLTYAYRLYVRPRERVLLSRLLEEHREVYNAALSQIKTAFEVNGERQTAVSQWAYFREWRKQANIVANASSVQQTLRRLDKAFAAFFRRLKAGETPGYPRFKGANRLDSVEYTYGDGVSLYYDEPYDRFLLHVQNVGEIKVKLHRFLPDRAQIKHVVLKRKATGWYVFLMFAVPDPLLVEPNGLPQVGADRGLLRLLTLSDGTQIDNPRWLRANLDKLRRTQRRLARAQKGGQNRNDCRMILAKRHEHIANIRRDFWHKITDWLVRHYGLIALEHLDLAFMTRNTHLSLSAHDAGLGLFNDLLRFKAVDAGCALVHVNPRNTSQQCSGCGALVPKALSVRVHSRPHCQLELDRDVNAAINILALALPSPPGSGGQVLT

SEQ ID NO: 33395 - protein, 400 aa, unknown
  TnpB Polypeptide
MRIKGELPPEAIFLLEDFRLAVNNAIRIGHQARVTSRNALTKLAYKDFRLEHPGMYAQHLVSAFEVAGSVLKNYRRRLMTRAASRAPYVHRLMMKAENQAYKLDRQRGIIDLPIRAGCHIKLELEVSDYHRRYLDDLTLGLGSLTVLPDRVIVAFRKEAPESYVPESALSLDTNERSMDGVFVKSDEARAAKADYQDIAAIQQRHHVRRRRLQKKKAHDRRTSKRLCRREGRREHDRIEYRLHQVANAVLSFAEDQRAAIILEDLKGIKPKRSKEMNRRLSLWPRRKLHRIIEYKAEWNGIPVIKVDPRYSSRTCPICGRIQDSRMGAEFVCECGWRLDRHINASLNLLQTAVSKGLEVAGGLRFNPGAFQHDVMMILYEPAMAARSEPNGTSCIGAVTS

SEQ ID NO: 33396 - protein, 411 aa, unknown
  TnpB Polypeptide
MPTVGFRFRAYADEETLRALKAQLQLACEVYNTLRWADIYFYHRDGRGLSQTELRQLALDLRKQDKDYQQLYSQVVQEIADRFYNARQRFLEGLSKRFPREKKPHKYYSLTYPQGGWRTLSVRGIRTGSRRNRKRLIVLRLSNLGVFKVIIHRDFPINKVRRVTVKLTKSERIYISFIVDGYEFPKLPRTGRAVAIDVGLEKLLVTSDGEYFPNLRPLRKALKRIRRLHKALSRKRYLSRNWFKAKVRLARAYEHLANLRRDLCMKLGKYFAEHYDVVVMEDIDVKQLIGRVNRAFRRSLQDAAFGMMRSIIKYQAEKYGKRFILVDPRDSSKTCAKCGYVKEDLTLNDRVFECPVCGWKADRDYNSALVHLRRAGWEPPVVPVELRPIPVALRYGQGGAMKQETPPLRTG

SEQ ID NO: 33397 - protein, 519 aa, unknown
  TnpB Polypeptide
MHTLRLKLKTDRRIERILEKRYRMTARIHNTLVKYVKRQLTKLKKDPGYQILLARYGQIRKEEKAGRKVSDKAETVSGLKQYVQDYGLTKGCLYRYVSVMQKRFRKHISSQQAQAEAEKVLRGVEKVLYGDGKDVHFKKYPEFRTITGKSITNGVKFILIPDHENRRMDCHIAWNGLEIPVKLDISKSNLPDGKNYVWESLNAGTLKYCEIVRLWFDSGWRYYVNLYLDGDAPKKLTPGKSVMGLDEGTSTLAAVSETSVILEELAPECKRYNSRILKLQRQVDRSVRTTNPERFHEDGTPKKRSECRELGPWKHTKACLRKKARIRELYRKKAEYTDCMHHALVNQLVQDSSVFINEPMDFRALAKRAKETSRQERSTQIKKKDGTVQLVHKYKRKKRFGKSVTDRSLSRLILFLKMKVKQYGLLYYETDTWKYRASQYDHTEDTYKKVNLDCRFKLVGGRQVQRDLYSAFLQSCMATAEKPDRDLCLERFEDFVQMQDERINGMKRQGLTRPACFGF

SEQ ID NO: 33398 - protein, 834 aa, unknown
  TnpB Polypeptide
VLSRKSYRYRVYPTEEQKQRLRSWEGALRFLWNLALEQRLMGLGHAKGEQKFYTAFDQINELTALRAEVEWLADVPRNVCAQVLVELDKAWQRCFKKLGKKPRFKRRGRDSMGLCEPHAKVFRIEGDAILFPKLGALKMVPHRPLLGKAKTCTIKRDVDQWFVCISCEREVDEPAASTLPAVGLDRGVMMLLADSEGGLVPNPGHGEQMAARMANAQRAVTRKQKGSQNQRKARVRVARLQRKVRRQREHTLHTLSHRYAKNHGVVVVEDLQIKNMTASAKGTVEEPGSNVPQKAGLNRRILDAGWGKFVELLSGKLAAVGGLLVKVPAAYSSQTCAACGVVDTASRMTQASFVCTGCGHHDHADSNAAKVILSRRTGGGDVCGGDSVARPVRQKLRVARRGTVVHGGAVKSPAVHGGDGLRTSLPHEGGERGHRAGRGHLGPREGGRRRRKGRRGRGRKQDAVAARVGVRADLRDGEAEVVFEVGEIDPAAHAHPPHAAQRLPEGAHVGVVRLGRAAAEARGLAEVEVHRSPHDVPTAAAASIGDDLAGRGAAEGVEPILLGAGAPAGHQAQANALGRQKLAQAREAFLHLGRQRSEDVGSHSRGSLAQPPPCYARPVMATRFRPSKRSDSFSTSEKIGLLLSGIGVLISAFSLRQPKAPPAPPARIVDPGDHVLLFGDSIAEGIGPPLAHLFADNGVTFAVVAHRGDSVRALSQKASHDLSAFKVVLLSAGSNDLGQATLEAPALGHLLAVLRQQGALVMWVVPPSFHFEGLTAAQGQVVKLFQEAGVPLVPIKGPPVDTSFDGVHTDPAGYRQLAAQIYDALITPGRFVPA

SEQ ID NO: 33399 - protein, 366 aa, unknown
  TnpB Polypeptide
VLRVYRYRLKPTPAQERALGETMRLLRGLYNGALQERRDAYRLEGRTIGAYEQMRSLKDVRALCPEYAALHTHLLQDVITRLDRAYQAFFRRCKAGEKPGFPRFKGFGRYRTFTFKDAKNRNGARIVAGGKRVELVGIGKVKFRQHRPIEGRVKQVSVSLDGDGHWYVAFVCDEVPGKPLPLTGASVGIDVGISTFAALSDGVLVDNPRLREAAQPAIRRAARTVARRKRGSKRRRKAAVILQKQHAKVQRKRQHFHHHTARAIVEGYDSIAVEELNVKGLAGGMLAKQVQDAGWAQFVTILSHKAESAGRDLHRVDASGTSQECSACGATVRKGLHVRVHRCPGCGYAEDRDINAARNILFRART

SEQ ID NO: 33400 - protein, 437 aa, unknown
  TnpB Polypeptide
MRMITVAHRIQLMPNNKQKTHFRKAIGCCRLAYNWGLSEWKRRYKEGERGLTGRKLRDSFNEIRGEQFPFTYEVTKYATAHAFDDLQAAYDNFFEHRANYPQPHKKKDGMGSFYIGADQATLLDYHKGLKHLKKVVHNVGGKHQYLNVPNLGYVKMSERLRFNGKVLGVRISQDGDKFFASFQVQITEEEYHLTHPQVNADKHGAVGIDFGLDEAMTLSDGVAVHNPRTIRKHQRKITRLGRQLSKRQHAKTKQERLQGVKRSNNYRKLSRRLGKEHQHVANIRRDFSQKLTTILTTHYKAICIEDLNVRGMQRGKLAKSVSDVAFGELRRQIEYKAAMNGVSVTVADRFYPSSKTCSHCGAKKDDLTLSDRTFVCPECGHTINRDLNAALNLLSLIPNVGTDYPELTPADLTALHSRFTLNGIATSKVETGRQRKL

SEQ ID NO: 33401 - protein, 320 aa, unknown
  TnpB Polypeptide
VNCETSEFDLQKELKGIRKERGLSIGAATVQSVIAQHAKSRKQFKKNKLQWRCSSGSKRALGWVPFKTAGVKLVNGQIRFCGEFFGVWDSYDLSKYELGTGSFSQDARGRWYFNTTVKAEVKPSEGRVSVGIDLGLKTTATCSDGTVFERRRITDEFAVQLATAQRANKAKRVKAIHARIKNSRSDAIHKFTTAMVDNYGAIFVGDVSSKKLVKTKMAKSVLDTGWGMFKTQLEYKAITRSVVFAEVNEKYTSQICSGCGEISGNSPKGRAGLGIREWSCPLCGELHDRDINAAKNILRLGHQSLAVGIPFLPAQAAAAG

SEQ ID NO: 33402 - protein, 287 aa, Ruminococcus sp.
KYILKIESSRFSNGTFCSRTFKELKSSEPLINIQHTCTLQYNRDTGKYILLVPTHKESKSYVANDLDCGIDLGVRTFATVYSRNNVVTIGNKFKKIDSCHKKIDKINELLDSNNNKYKLRKSKRKYYRRIKNIITDMHYKSAYYLATNYDNIHIGKLSTKGILSKNNKKISRHTKRMVGVLSPYLFRQRLNHMAHKYGATVFEVNEYLTTKTCSNCGKINELGAKKVHKCKCGMETDRDVNAAKNILKVGYQYNSTLHQVNDIDIFETNNHMVTFNKVIQEYEVFEV

SEQ ID NO: 33403 - protein, 394 aa, unknown
  TnpB Polypeptide
VQVRYRYRVYPSPRQQQALARGFGCARVVYNDCLRVRDEAHANGEKISDTEVQRRVVTLAKATPERAWLGEVASVALVQACQDARRAYKNWFDSFMGHRKGPKIRHPKPRRKHGRQSIRLTRNGFALHGERLYVAKVGELRVKWSRPLPSVPSSVTVIHEPDGRYYASFVVEREAAPLPACDREIGIDLGLNNLAVTSDGEVIPNPRFLRTASKRLRRAQRVLSRRQKGSTNRTKARRRVAVLHRKVRETRLDHAHKTALALVRDNQAVYAEDLAVSGLMRTRLARSVADVGWSQLMRCVGEKAAQYGRTFHRIGRFEPTSQVCSACGVKDGPKPLSVREWVCTACGTVHDRDVNAAKNILAAGRAERLNACGVGIRPRLVAIGAEAGTHRSAT

SEQ ID NO: 33404 - protein, 381 aa, Clostridium sp.
MILAKKVRIIPNIEQEQKLWQSVGTARFIYNWTLAIQEENYKNGGKFINDGDLRKGLTILKKTELNWLNEVSNNVAKQGVKDACNAYKKFFKGLSDKPRFKSRRKSKPSFYNDTLKLKVKENVVLIEKVGWIKTSEQIPMNVKYANPRISFDGKFWYISVGIEKEEPISENTDVSIGVDLGLKDLAIVSNIDKPFKNINKTKEVKRLKKKLKRKQKQVSRKYEDGKIQMGKEGENRYKFTKTNNIKKIEREIKIIQRRLSNIRLNHIHQATTAIVKTKPSRIVVEDLNVKGMLKNKHLSKAIQEQCFHKFISILEYKSKFNGIEFVKAHRFYPSSKTCSCCGAIKKDLKLKDRVFICSSCNHKIDRDKNASINLSRYEKSV

SEQ ID NO: 33405 - protein, 413 aa, Alkalibacterium sp.
MANLRSVWYNNREEILPLNRFKGIRKGVTVMLVHKAYKFRLYPTKQQSDAITKTIGCSRFVYNHFLTLWDENYVKTGKGLTYGRCSAQLPLLKKDYVWLKEVDSIAIQSSVKHLADAYTRFFKKQNKRPRFKSKKHPVQSYTTKQTNGNIAILGNTIKLPKLGFVRFAKSRDVEGRILSATIRRNATGKHFVAILVETDVHDMLKTERAVGIDVGLKDFAVLSDGTVHHNPRFFRTLEKKLEKEQRKLTRRYEQAKKEGKPLHEAKNYQKQKVKVAHIHEHIKNARADFLHKLSTDIVKNHDIIGIEDLQVSQMLKNPHLARAISEVSWSAFRTMLEYKATWYGKRVVPVRKSFPSSQLCSCCGYRHTAVKNLALREWDCPTCHAHHDRDINASKNIEAEALRLLTVGTTGIA

SEQ ID NO: 33406 - protein, 409 aa, Thermoprotei sp.
MVREALKIIVENDARSRRKAHILCYGFLRKKHPQLHNKFVQEAYKRALAMYRSYRKLLNKWKKLPAKKRRRIKPPSPPSVEENRVVELHIDTYKLERRHGFLTLAVSKGNGVYLRFLVMEYDYAVEELRGAKLGNSKILVDENSDIYLLLTIRRNVEVKEHRNKLFIDINEDSIDCLLVNYEDGWAKLFSVKHDVRRIRTNYRRIKKGIQKKVEDEKLSGRLLAKYGYRERKRVEDRLKKIATILAKIAKEYNADLTRENLKDLRLNGRKRSKQLNYRLSTFPYRKFISYIEYKFWEKGLEVTTIGASGTSITCPLCGYVDKKNGVNRENFRCKKCGFTFNAQYVACLNLFSRLGDGRVAIRGGRLYLVSRKAAPVVAVDVALRDAEWNEASQQGKSVQIPIVSKIPKI

SEQ ID NO: 33407 - protein, 481 aa, Rhizobacter sp.
LQTISIPYRCSDDDRQFLEELRRVQSAAIRTAYANALDADGSKRLEKDIREIVKSRFTKVGLLDSWAMHCATRVGVLKRKLRPEGHAVFGGRAGLERRRKGLISNDEWKRMRLHPFVSYSDSQKVRGNQSIHLIDETTIVVRIGRKEDGGRSGRTVTQTARLDLARMKGTTAIIIRQLADICSRPDKAHRINVTYSVGDTHVSITFDPGDLPNHPQRRRPVAPKKGLALGIDLNPNWIGLAVGSNGADASNIEDTELLEHALVKLDMAVDASPELVRETLAAVCDRAVSMARKHRCGTIVLEKGLGKLRSSGKSRSLNRLLNYWARTVFVHMLTPRARLAGIEVLEVWAGYSSTIGNLAFDAPDACASATEIARRGIARLAGIKEVLPALEVGCVSRLWKNGKVPAELGSWQDVHRTIKAAKIGYRRPHPDVPIGTRGSDVHGAKMFCGHAVVRLGRRHRPGLLFQPMVTSSKPDAVFRAF

SEQ ID NO: 33408 - protein, 302 aa, Ruminococcus sp.
  misc_feature (256)..(259): Xaa can be any naturally occurring amino acid
MQTVSSYGVELRKQNIPVRQTLEIYRSAVSYLTEIYEQVWEELAEIPDAKRRFNAAEHLVHTPKKNPARFDFDLRFPKMPSYLRRAAIQHALGSVSSYETRMELWEKSGEKAGEKAGKPRLAYENHAMPVFYRDVMYREEKEGKDEAYLKLYDGHDWKWFCVRLNHTDMEYLRRNWSGKKASAPTLEKRHHKYFLRFSYTEEVTLTKTPVKEQIICSVDLGINTDAVCTIMRADGTVLGRKFINHPSEKDRMYRTXXXXWGENLSIIPVKKTGCTAHWAGSEDSRGNTALRSHGEDGHIRNA

SEQ ID NO: 33409 - protein, 396 aa, Streptomyces sp.
MSRFRLQPTSDQVMGLVGHCRHARYVWNLCVEQQSWWAQWRGAAPGFAERCRQLTEARSVFGWLAAGSVTVQQQALRDFGQAMSNFFAGTHRRPTWRKAGRHESFRITAVKPSDVRRLSRRVGEVRVPKVGWVRFRWSRAVPGAKSYRVTRDRAGRWHIAFAVVPAPITTPDSGATVGIDRGISVSAALSTGQLLSCPVPSKFETARLARLQRRLAKATRGSKRRARLKAAIGRTKARQTDRRKDWTEKISTDLARRFDRMAFEDLRVTAMVASAKGTSEAPGWNVRQKAGLNRSILQHAWGGLLQRTKNKAPGRVILVPAAYTSQRCSACGHVAAENRESQSVFACRACGYAVNADVNSAKNIDTAAGHAVVQRGEGTRAAGPKNREPQLVSSVT

SEQ ID NO: 33410 - protein, 412 aa, unknown
  TnpB Polypeptide
MKLTQQIRIKPTKQQEDILWKLSEKCRLIYNFALTERIYCWDLGIKGINYYSQQNNLPKLKKKYPDYKIVYSKVLQYILRTLDADYKSFFALWKKGDKDAKPPKYKGKEHFTTMVYNQSGFKVKDGKIRLTQYYDKQQHLEFDIPEKFKFDKIYQISVYQKDNNFYISVTYEKQEKEFVDNGLYQAIDLGITNIITAVNSRGKFLQIKNKRPDKYWLPKIKKIQSRRDHCKKKSRKWNKLNKNMNKMKRKSANQIRDFQHKLSRKIVDNTKANTIIVGDLAVKKMGRKGGVKKRGLNRAIQNTGTLGRFVRFLTYKAKIVGKRVKETSEYKTSKECCCCGKEWEMDLSIRTMKCDCGNEMDRDENSSVNIMTRFLSRNGLWTALSEFQANLRQTGIPIQVLHSQEASSFRVR

SEQ ID NO: 33411 - protein, 260 aa, Streptomyces sp.
VDETDRTACTRPGTRHAREQAGSVHDTKRILVVQLRYNYRAYPDAAQRRALASAFGCARVVWNDCLRDRKQAHAARLPYVKSAELSRLRITQAKRTEERAWLADVSAVVLQQSLRDLDTAYKNFFDSLKGKRQGRKAGPPRYKSKKDTRQSIRLNTNAFCLKGDGHGVRGQGRQPQGQVVSQASGRTHVPDRHQGQLWPVLPQLRRGHRAGQPARAGDRRRYRPRTVRLRRPVRRQEDRQPALPAPGGEETQASSAGAVP

SEQ ID NO: 33412 - protein, 351 aa, Streptomyces sp.
VALAVAGRAPVPRRDGESGKRFGNETIRVTPGGEVSIKLPAPLAHLANAPHGRYVLAARVSFAHRGEQWADRVTANRAVAYRIHEDTARGRWYVTASWTIPPVQTVPLEAARARGLVGVDTNADHLAAWRLDTHGNPVGEPLRFGYDLTGTAAHRDAQVRHALIRLLHWAKRHGLAIAVEDLDFTAETTREKHGRRKRFRNLISGMPISRLRARLVSMAAELGIPVVAVDPAYTSKWGAQHWHKHLTTKDRKTTRHDAAAVAIGRRALGHPIRRRTAPPPHDRSDRAGHRTVQAGSVAPGREGNRPRIPGPRTRSVRAGHRANAVDQNAQHRSGRSAEHGSWKQDSLPLRL

SEQ ID NO: 33413 - protein, 403 aa, Streptomyces sp.
MITQEVSGVRAVVALRSDGMKLVVQVKLLPTHAQASVLEATLRACNRAATYASHVAFAKKLKDRNGLQKEVYTDLKTAFGLSAQPTVRAVKKVVDAYTTLKANLQAGNLGLPTSKRYRAAVSTPISFRPEAAQPFDDRCLSWQYDARTVSIWTVDGRMKGIRFACSLDQLKTLVQYRKGESDLVCRGGKWYLVATCDIPEPELYQPVDWIGVDRGIVNLATTSDGTNYQGRRLGRYRRWQDRKRAELQAKQTRSAIRRLARRAQKEKRHAGQVNHRISKEIVSVAQRTGRGVAVEELGGIRERVRLRRDQRGTLSSWPFHQLGQHLAYKARQAGVPFLEVDAAYTSQRCPRCGHTERANRSDRDHFCCRRCGLAGPADVVAGVNVRNRARSAWVFVTAPAPSP

SEQ ID NO: 33414 - protein, 450 aa, Streptomyces sp.
VIVMSELGLVKRQFGHRARLALSPAEIRVMDDQAHAARTMWNCLHSWWQMMPKDKRTLAGADAAIRQARKDLDYLAVLPAQAAQAVLKTYHRAWVNCWEGRAQEPSYKGRFRWPMSVDIPQGRDLNVVRVHRRWGMVNIPKVGRVRFRWTKDLPVGKRANKANRITGARLVKDALGWHIAFRVQTLERAPEPHQGPEVGIDAGVNIPLALSNKDHQDHGRPPRLPNGDCDRDKWLTLKEKAKLLKLERQAAHRKTFRKRGEKTSKRLQHTYDQIKQLRAKATRRALDWQHQTTTYLARAYGVLVVEQLNILGMTKSPAPKPDPEQQGAFLRNGARAKAGLNRSIAQEAWGRTVTMLTYKTARYGGRLVKVPAPHTSQRCSACGFTTPGSRESQELFACKNPDCGWTANADWNAARNILHLYRIGRVIVEVPAAGRRGRRAGKTVKPVAAR

SEQ ID NO: 33415 - protein, 379 aa, unknown
  TnpB Polypeptide
VERSYRYRIYPTRLQAEALSAQLGFCCDLYNAALEQRRDVWRWRRRSVRYEEQSSQLTEVRRAGMAPAGMNAWTQQQALVRLDRAFQAFFRRCKADEKPGYPRFRSESRYDSLAWSFSGNAAGVALVGDRLRLQGVGHVKVKWHRALPDQARLRTATVVRHGQRWEACFSLEVPVPEIAPNGLAEVGLDIGITTFAALSTGEIIAGPRSYRAATRRLRVAQRRVARRKRGSRRQRKARAIVRREHERIANVRRDHAHKVARDLVSRFETIYVEDLSIRGLARGMLAKDINDQGWGAFLLQLDSKAECAGCRVVRVNPRNTSQGCSDCGALVPKGLSVRVHRCPECGLVLDRDVNAACNLLRLGRSLQAITVEDGPRAVA

SEQ ID NO: 33416 - protein, 382 aa, unknown
  TnpB Polypeptide
LARWSGSARFLWNLAVDQRRWFQRGPGLASQCRDLTELRADMDWLRELPAQTAQQVLGELDLAWQRCYAGLSRPPRFKRKGQPVTLRFPQDIEVRRLNRRWGSVRVPKLGQVRFRWTRDLPGTVKHASLSYVAGGWHVAFCLEVEVKPAAPNEMPPIGVDRGVAIALMTSEGAAFDRALWTVGEKARLLGLERLKARQVKDSARYCRTCEKIARLHHRATNRRQDFAHKVSTQLAKNHGLVALEALIIPNMTKSASGTLAQPGSRVAQKSGLNRAILDKGWGLVASQLRYKADRYGSQLVEVPPQNTSLACSVCGCIDRANRQMQAVFVCVECGHTDHADVNAALNIRERGIRLALAGGQPVPGRRESRRLRTWRQPSPVAA

SEQ ID NO: 33417 - protein, 384 aa, unknown
  TnpB Polypeptide
MYTTHYKLFRAPRNRHLKRKTWIAHTIWNYFLGWQRTRSSLGLPYLSYKEMSRAFTILRKSHPDMFAHWRELDSWAARQVLKRLDEGYVRFFKKIAKRPPRFRSFRKPYSFTMCPSGYKFADPIAGDKGFGIYTDRVTILGKRYRFNLSRPIFGNIKRVTIKEDALGDFYMSIVTDHVQSHIKPMTGNAAGFDMGVKTMLTCSNGKQYESPAFYTESMNHVRTANRQLSRKQRGSNNRERARQHHARMHRKITRQREDQHWKLSLELVRRFDVLFFETLNLDGMKRLWGRKVSDIGFYAFLQKVKWQAKKRGKRVECIDPWIPTTSVCHVCDTRVSLDLSDRTWTCEHCKTHHDRDINAAINILKVGTSTFGVEVVRLAIASNL

SEQ ID NO: 33418 - protein, 376 aa, unknown
  TnpB Polypeptide
MEKAYRYRFYPTPEQESLLRRTLGCVRLVYNKALHERTQAWYERQERVGYPETSTMLTQWKREEDLDFLNEVSCVPLQQGLRHLQTAFTNFFAGRTKYPNFKKKHQGGSAEFTKSAFKLTDGQIYIAKCKDVLPIRWSRQIPKECEPSSITISLHPSGRWHISIRFDDQTIQPLPFNDNAVGIDLGITRLIATSNGDKVTNPKHFKKHRKRLKKAQKNLSRKQKGSKNREKARVKVAKIHNQISDDRKDFLHKLTTQLVRENQTIAIESLAVKNMVKNHQLALAISDSSWSELVRQLDYKCRWYGRKLVAIDQWFPSSKRCSHCGHIVDKMPLNIREWICPSCGCNHDRDLNASKNILAAGLAVSVWWSECKTRAE

SEQ ID NO: 33419 - protein, 497 aa, unknown
  TnpB Polypeptide
MRAKTPSYVVSIKLKLTESIENRLEKTFRIVASAYNEALSFGLHRFEVLKQNSRYQELLELRRNNNYQVKEYNKELCELHKMYGLTEFGLSARLGQQRKKSNSPYQQLNSGELQVIAGQAYKTLEKVLFYQIKSSSVRFRSKYDLNVSYRNKVNTTGTRIIPSDRKGYAYRLYIHKYRTFVDIPIKAFNNHQQMSLLRSEKIKYVQIIRKTIRGKPIYILQIVCQGLPLTKVERGVGIMGIDLGISTVAYVSKNSLALVDLIPKDVNRKEKLMRYLDRAIERSKRVNNPNCYHSNGTIKKGSKFKHPSNRQMRLQIRRLKSYRSLSEERKKIQGQLVNHLVSQASLIKIEDLNIKGLQRRSKDICINPKTNRPFSKKRYGKSVFRAAPSSFRQILQTRTSQLGVDVEIIQPKDLKPSQYNHITQTFEKKALSTRLYDLSEKWTSVQRDLYSAFLIGHIENGSYQQEKLTQDFPDFYKQMKDFLQQPRKTNRLDWYLN

SEQ ID NO: 33420 - protein, 353 aa, unknown
  TnpB Polypeptide
MRLTIQCGIVKLTKRKQEILDREYNNLQKFLHGEDVPLYSANKQQALRYYKKVKRKEYPLSLRKDVINIRKAKAFWFLKIPVYGVRGGIKVPVKPHREFPNGKLCESKIVRRNGKYIAMLTFDIETSPLRKCSSILAIDLGERFVATAVLWQHGVMKVKFYGREIRGIRRHFAWLRRRLQERGLLKVVKRIGGKERRRVDAILHKVSKCIVSLADATNSFIVLGDLTGIRQHARGKGKRFNRIVSNMPYYRLTKYIEYKAMLKGIPVIYTSEAHTSRVCHRCGHEGKRKTQGLFVCEHCGEYNADLNGAINIAKKFERSLGYMPLLGVACEPTLNRSVEYHSSPPEALSFREG

SEQ ID NO: 33421 - protein, 435 aa, Streptomyces sp.
MPSVIAMQLRYAFRLYPDAAQQALLARAFGCARVVFNDAVRAREDARKDGRPFPTAGELSTRLITQAKRTTERSWLGEVSSVVLQQSLRDAETAYRNSFASLKGTRKGPKLGAPRFKSRKDTRQSIRFTANACWKITSSGRLNLPKIGAVKVKWSRTLPATPTSVTVIKDAAERYFASFVIDTDPAADATRMPDTNQAVGIDLGLTLPQTPSGGTPIAVLSDGTKIDSPRFLRRVEKKLKKAQRELSRKQKGSRNRAKARLKVARAHAKVADARREFLPQALGFARAGGTPIQLSTRLIRENQAIGVEDLAVRGLARTRLAKSVHDAGWAQFVNMLAYKAARYGRTLVKIGRFEPTSQVCSTCGIKDGPKPLNVREWTCTACGTTHDRDHNAALNIKTAAGLAASACGAPVRPGVIPARREETGSHGIPTGNRAA

SEQ ID NO: 33422 - protein, 559 aa, unknown
  TnpB Polypeptide
LKRRVFYAYHINLCGSEQDAKAGILFRVPDSPCKKTAKFSKLILRNLRTGLKKDPVDRTSNENEVLETVRIGIEMANEKLQKDVDRLTKQLQSLPASDPARTKIQKRIENKQKNHPIMPTSDHWMLTYETLDAVMKNTKNPDYYAMPSQANQHVLRKVLKDWKSHFELLASYRQNPGKFKAQPKQPGYIKTPYTTVTFTNQVAKRSDIKGKMHITFPRCLVPLCVGKPEGSYVRTEVKPCYGGYIVYVTFQDAVKMPEAPTNPTRILGLDPGLDNFLTALTNFSATPFIIDGHWLKSINQNFNRRRAALMSELTKGMDSTKSVKNSARLNRISKKRACRIDDFFYKAAHYIVDFCLKNKVEVIVCGHNKDQKQEINLGSGNNQHFVSIPYTRFFWILTCVAAKAGIPVIETEESYTSKASLIDKDPIPVYKEGDRLEYHFSGKRISRGQYESKEGTILNADVNGAGNIICKVYPNAFDGVTDFSYTNKTVIRVTREVLCHAKHKKKHAIPQRKRGMNRWLHHRRQEQKLVYFALFKVSSAKDKTKYIEESKQTAAKKTA

SEQ ID NO: 33423 - protein, 357 aa, unknown
  TnpB Polypeptide
MKHTKTLKVRIKDRHRSLLQQMAWSVNQVWNYVNELSQRSIRERGVFVSAYDIQAYTNGAGKDLGLHSHTVQEVGREYVTRRQQFKKTRLQWRKSGGVRRALGWVPFKSGAVTWKQGQVYHNGHYFKAWDSYGLAQYQFRAGSFSEDARGRWYLNVVVEVEAEVPAGQEAIGIDLGFKDTASCSDGTTLEAARFYRDLEPALARAQRARKKHRVKAIHAKIANRRKDALHKFSRQLVNRCGMIIIGDVKSRSFTRNRKSAKTVYDTGWAMLKQFLSYKSAGAGIVFQAVNEAYTTQTCSCCGTIPASSPKGRAGLGIREWTCDDCGAFHQRDVNAARNILALGHERLAGGITVPSGR

SEQ ID NO: 33424 - protein, 405 aa, Moorea sp.
MEFKAVLKKSQQKAVDEAIRTSKFVRNKVLRYWIDNKGIGKKELYRYNTQLRDEFKFVKDLNSHACQASVENVERAIKRFFDNCKKKVSGKKGFPKFKKHCRSVEYKQSGWKLSPDNKYIKFTDKKGIGKVKLKGTWDLWWFDQKLIKRVRILKRADGYYVQFCVKVINPEKLENTGCAVGLDVGLKEFYTDSEGNTEPNPRFYRKSEKRVKFCQCRVSRKKKGKAVGHATRTVNRRKARNRLGKAHLKISRQRKEHAKRLARCVIRSNDLVAYEDLKVKNLVKNHCLAKSINDAGWRQFREWLEHFGQRFGRITVAVNPAYTSQNCSECGEVVKKSLSTRTHVCRCGCNLDRDHNAAKNILNRALSTVGHTETFRNAWGDLASTKPDSGLVKQVSSLNQESPDF

SEQ ID NO: 33425 - protein, 417 aa, Moorea sp.
MQQVITAKLKLNCTPEQKEKLRAVTLAYRDALNYTSKLAFEKGKISYAAKLQKQVYYDIRERFRLPAQMACNVPRQVATIYKNLWMKVERNATHLKSGITNKRYKGLDTPPKFIARTCTFSYKRDYSFVKGKASLVTLEGRIKVDYSGYQKHLDLIHSGAAKIGTAIIGYAEKTKTYYLLVSLELNVPNLKPEAIKRVVGVDVGQRYLAVTFDTNNTAGFFSGKSVIHRANRYSKTKQTLQQKGTRSATRRLRVLSQRERRFNADINHCIAKRIVISGSLIGLENITENRDRIKSRQLGQESSKKAGQAHRNKRAWEFTKLHDFIDYKAVLGGALVIRVDADFTSQSCPRCGHTSKGNRPNQGLDFDCIACGYKLHADLVAAKNIALRTLLLRQDFERTGRLSTVPDVSQDETKTLD

SEQ ID NO: 33426 - protein, 420 aa, Moorea sp.
MRSAYQYRLRLTKSQEMEIERWLDMLRHQYNYLLADRFNWYEQNRCSINSCPLVCHLPNLRNNPDYFSQKKTLPQLKKDRPWYSAVQSQVLQDCVKRVDLAFKRYLKGDSNGRKSGRPRFKGKNRYKSFTFPSLGKNPIDGNNLTLPKFGKVKLIYHRPIPEGFKIKTATVTRKADGYYVTLSIQDDTVPDVIPVDSVKNPIGIDMGLKSFLVKSNGSEVPIPQYYRKAQKRLKKVQKAVSRSKKGSNNRKKAVTKLGKAHKKVADTRKDFHFKTAKGLLDEHDLVAHEKLNIKGLAKTKLAKSILDAGWGQFLSILSVKALNAGLATKAVNPRNTSQNCSNCGKKVPKKLKDRTHSCPHCGYVADRDVNAAINVLNLAVGHSVSSKAYRSRSVAIGLVTVRVASGKARYRWVVLVRSLH

SEQ ID NO: 33427 - protein, 460 aa, Acinetobacter sp.
VKLTRIHHCKNLNREKYKQLEKQAALLGRVRSEVWRKYGAVAGLNMGDRAIRDSWMNEGREFNVSANAWKETLRDCIGDIKAYREAAKEKVKQAIRKRTHCETELKRLYTLLKKDAWMEDNFLHRQMRKHFRHGVNHTHNQIIVRADMCKTFELNGQCWLKVPSLVPRQTIKIPLNTTMEFAPQGTLRIILRNGNVEVHSTYDVVETKDCGEATVGVDKGYSEAFVDSDTDVYGKGLGKLISSESDYLNKKYKRRNKLRAISKAKPHKRQAIERSNLGRKKLDKRQDAQRSKLKTLIYTATHQLIDKAGLIVAEDLTSPIQSKRSYGKNTNRRLNTWVKGILADALTTISHRRGSVVHLVNASYTSQSDSFLHGLLIGTRKGDQFYRSNGEVVQADWNAARNVLARLNDPEISRYTPYREVRRVLQERTDRYKSELTDLGSSYKLGNKTLTECELVLDYV

SEQ ID NO: 33428 - protein, 390 aa, unknown
  TnpB Polypeptide
LNYERRQQFFNHQRVDFRGTWGKYYGKYKGLLGVNAQAVLQKNNEAWNSFFSLLKLKKGNKLPPYMNHVSSPGYWKDEATGRRRLILVIRQDRYVVDEQRRVIILKDFNLEVKFTGGLRWFGKQGRLEMHYDEARNAWYASIPVEVGVEEAKTGRRSKFIVHGERKVIQLESPKGNKAASIDLGINNLASVVVDDGTWLLYKGVRAKEDYFYFQRKIAEIQSLRDTLKDKLLSDAVEELNHEMRRLHGKLARRLLHLYRNFASHLLKQLHELGVSTIYLGYPFNIAQERGNKFTVNMWSYRKLMEAIELKAQEYGIKVYEVVEYNTSKYCAYHNVEVKRKPRGVAHCPMGHKLHSDLNGALNIMKRAIGKIPLVIKKPLSFIVGHNQVAP

SEQ ID NO: 33429 - protein, 215 aa, Streptomyces sp.
VELHPARPCYPRPLPGRRPRQGQPAPCRGRPGQDRVGQALSRFPRRKAKDRTANHRRAVEKVARLHGNVRRRRLDHAHKTALGLVRAHDVIAHEDLIRNMSKAPAPKPDPGRPGAFLPNGAADKAGLNASISDAGWGVFLTILHAKAESAGREVIAVDPRNTSRTCPACGHMAKENRPTQDKFHCVACGHHAHADTVAAANVLRAGLVRRNANPA

SEQ ID NO: 33430 - protein, 355 aa, Streptomyces sp.
MAELSRTVITEAKRAPGRAWLGEVSAVVLQQSLRDLDAAYRNFFAGLRGDRARVGPPRLKSRKDARQAVRFTANARWSITPTGRLRLPKIGDIRVRWSRALPSAPSSVTIIKDAAGRIFASFVVETTETSLPETGAEVGIDLGLAHFAVLSDGTKHTSPRLLRRAEKKLKKLQKELSRKRKGSSNRVKARLKVARQHAKVADARREFHHQLSTRIIRENQAVAVEDLAVRGLVRTRMAKSVHDAGWSSFISMLEYKARLYGRVFTRIGRFEPTSQVCSACGVKDGPKPLHVRTWTCAACGTVLDRDVNAACNILAAGRAERLNASQSAEKTRTPVPAPREEAGSTGSQSQPQCAA

SEQ ID NO: 33431 - protein, 426 aa, Streptomyces sp.
MSDHGVETRQFGHRARLALPLAVALKADDQAHAARTMWNCLHAWWQMMPKEKRTLANADAAIRQARQDIDFLAVLPAQAAQAVLKTYFQAWKSCWDGRADTPNFKARFRSTLTVDVPQGRDLNIVRVHRRWGMANLPKIGRVRFRWTKDLPVGKHADKDNRITGARLVKDPLGWHIAFRVQSLEPVPEPHQGPETGIDVGITVPLALSDGETYGHGAWLTAREQARLLGLEQRAARRKKHRKPGERTSRRLHHTYDQIAGLRAKAKRRASDWQHKTTTKIADTYGTVVVEALTITNMVKSAKGTVDQPGKNVAQKSGLNRSVSGEAWGRTVTMLTYKLARRGGTLAKVLAPNTSRRCSACGFTTPGSRETQALFVCKNPDCGWTGNADHNAARNILHLYRTGHALIPAAGRAVARRARRVKPATAR

SEQ ID NO: 33432 - protein, 429 aa, Streptomyces sp.
MSRFRMYPTPQQEQQMLLHCAHARYVWNLAVEQHSHWYQGRRAAPGFAGQCRQLTEARRGNEWLGSGNADVQQQALKDFARAKNARFTSGFGEPTWRKKYRHEGFRVIGTDRVPELTNDGSARLNAKTGRQVMGRSVVVHKLNRRWAQVKVPGCGWVRFRLTRPELPKVKTFRVTLRNGQWHVAFAVIPVPVEAPGTDGVIGIDRGVKITAALSDGRKLNCPQLTVKERAQVRKHQRRAARAPKTSEQKTAEYAKMAKLKAREAARRKDWCEKTSTMLARTYGLVRFEKLNIKNMTRSARGTAGQPGKQVKQKAGLNRAILAQGWGLLRRRTEHKAPGRVEDVPAPYTSLRCSACGWIDKNSRKSQAEFVCSFCGFTCNADTNAATNVAAGQGGIPRPRRSAGAGGMTTATSRSSIREPQPTRVGIPLS

SEQ ID NO: 33433 - protein, 399 aa, Streptomyces sp.
MIRAYKFLMRPTVGQAGALAEMLRDHCSLYNGALQERRDAYRHTSKTTVRYGQQSAQLKDIRSFDPERQGRWSFSSQQATLRRLDKAFAAFFRRVKAGDKPGYPRFRSGKRFDTVDFPKDGDGCRWDSTPHDRITRVRLQGVGHVKVHQHRAVIGKVKTISVKREGRRWYVILTAEQSAPKPLPATGSVVGVDMGIANFLADSGGEFVPNPRHGAKAAAKLEAAQQALARCKRRSKRRRKAVERVATLNRKVRRQRLDHAHKAALDLVREHDFIAHEDLKIRNMSKAPAPKPDLEQPGVFLPNGAAAKAGLNRSIADAGWGVFLAILAAKAEGAGRQVMAVDPRNTSRQCPECGHTAKENRPTQEKFHCVSCGHSAHADTVGAINILRSGLVRRDANPA

SEQ ID NO: 33434 - protein, 375 aa, unknown
  TnpB Polypeptide
VNRSCLKIRLYPDRAQERELEQTLETCRLVYNSLVNDRKFQYDTANVSVGRYTQQAYLPKWKQSHPELKAVYSQVLQDVVHRVHLAFKAFFDRMKKGDSPGFPRVKGEGQYDSITFTQSDSFRVGDSTIRLAKIGQVKAELHRKPWGELKTCTVLRVNGKWFACLCQEIEAEHLPLSEEAIGIDVGLKTFAALSNGEFLENPRFFRKEAKALAKAQRKLSKQKRGSCERKKARKVVSRIHERIRNRRHDFCHQNARRIVNRFGIIAVEKLSIKNMLGNYCLAKSIADASWSQFRSILTSKAESAGREIFAVNPAYTSQDCSGCGYRPDGQEGRMRKKLSDRWHLCPLCGLSVDRDTNAAVNILALGQQSLATVAA

SEQ ID NO: 33435 - protein, 623 aa, unknown
  TnpB Polypeptide
MVKKKKKDTFQEFRSTDKSAYTTIKTTLKSVLHNHNEVQPVITNLVFEMNDLMIHSYQFIRLYVLKCYNDKQPLPEINEKFILYCIKTLGIRDKRGIQSKDTELLETLQEFYDKEYQPLLNHEKTSLKNKSNMLPYLATQLHTSLSNNTQEHFIQHFLRFINKTTTNITEDKAVLFKFKKIVLECNEETDTIFDEWKTTHLPNILPENIKKSVHYDVKVSPFDYLKGMLYMNAVLEKEDHKLFQPLPLRNNIIPKHIILDTACIVNLFSLEGKTKTELFKAIKENQYDVWNNLLNLQHKTFKSKHYQFHYQLQTDGISCSLLFIRKDLKDKKWGSRVPTLQEQDFHNIEDLSIEQLDTLKDRNIVGCDPGKHSLVYMMDKQGNKLQYTASQRKIESYGKRNERILLQEKKRNHIIEKETHLSSKNSKSVDYEKFKVFLVEKDKLNKETTEFYKRDVWRKMKFRQYSYGKKSIDTFLNKIKETFGENILVGYGNWSRITQMKHIMPTMNKGLRKLIHKKYDTLTINEYYTSQKCCECYKDLKHYNDKKGKEIYRLFHCSNCVSYENKNTVFRTRDKNSAISIMKLTKDWIETQTRPSEFQRHPSFTCGTLTGLSKTIGNEKVAY

SEQ ID NO: 33436 - protein, 318 aa, unknown
  TnpB Polypeptide
LQDVLLRLDKAYQAFFKRIAKYPKPKRAHKYSSFTYPQSGWKINVKNGKLKLSMIGGIGIELHREMVGIPKRCTIIRDVDQWYCCITTATDDEEQQEAAKSSSTPPIGIDMNLGFNWLTLSTGEKIQTNTLNFKAQEQTIKQLQRSLSRKRKGSHNRYKARIALAKAWRTVRRQRDDFCHKTSKHLADRFGTVVFENLNIDNMVRNHSLAKAIMGATWYKLRQYTAYKVERRGGRVILINPSGTSQKCSRCGNVVKKDLSVRIHECKCGLVLDRDHNAALNILKLGQELAHAETEPLLIRKISKFQSRKQEAHELIRG

SEQ ID NO: 33437 - protein, 472 aa, Moorea sp.
LGRGKRAIKLLSSSDGVIPLRSASCLSCFLSKLVNLIINVLSFIYELTYVIVYTILIIGRLPGENKMRLAYQYRLRLNKSQISKIEKWLDLLRCQYNYLLADRFSWYEQNRSATNYCPLVCHLPELRNNPDYFSQKKSLPGLKKDRPWYKEIHSQVLQDCVKRVDLAFKRFLKGDCNGNKSGKPRFKSKNRYRSFTFPSLTKDPIKGNILTLPKFGQVKMIYHRQIPDGFKVKTATITRKADGYYATLSIQDDTVPDIIPIDSVINPVGIDMGLKSFLIRSDGTEVPIPQYYRKAQKRLKKVQKSVSRSKKGSNNRKKAVVKLGKAHKKVADTRKDFHFKTAKELLDSHDIVAHEKLNIKGLAKTKMAKSVLDAGWGQFLSILSVKAANAGLLTKAVNPRNTSQNCSNCGKKVPKKLKDRIHSCPHCGYTEDRDVNAAKNILYLAVGRPVSSKADRATEPVGGVGKKPALSR

SEQ ID NO: 33438 - protein, 291 aa, unknown
  TnpB Polypeptide
MQTVSSYGVELRKQNIPVRQTLEIYRSAVCYLTEIYEQVWEELAEIPDAKRRFNAAEHLVHTTKKNPARFDFDLRFPKMPSYLRRAAIQHALGSVSSYETRMDLWEKSGEKAGKPRLAYENHAMPVFYRDVMYREEKEGKDEAYLKLYDGHDWKWFRVSLSHTDMEYLRKNWAGKRAAAPVLEKRHRKYFLRFSYTEEVTLTKTPVKEQIICSVDLGINTDAVCTIMRADGIYETPEHRAGKKNCRSDRKKCRREPCRCDRIRVSGNAGKDIRKEKTETASVEKTGYPETL

SEQ ID NO: 33439 - protein, 383 aa, unknown
  TnpB Polypeptide
LAVQQQSWWWPGRGSAPGAAERSRQLAEARAAEPWLAAGSSSVQQQALRDFDRAMGAFFDKQNPAGKPSYRGKRGTQGFVVRDVKVRRLNRNHAEVFVPKCGYVRFRLSRDLPGKPGMARVTCDRAGRWHVSFQAPQPALDREPAGAVVGIDRGVRTALVTSDGQHYRVPRISDRRAARYLALQRRMSRQQKGSRKREKTRQAMAAITMTVTDRRKDWAEKISTRLVEDHDLVAFERLNTKGMTRKPQPKPDPDKDGAYLPNRRRQKAGLNRGILGSCWGLLATRTEQKAVASGAAVIYVDPKYSSQECRRCGHVAAENRESQAVFRCVACGHQDHADANAARNVLARGLACLAAPRRPRDYGAYARGRRRLAPARREPPGKP

SEQ ID NO: 33440 - protein, 367 aa, Moorea sp.
MASRKNKNLMKRTARVYLNDLNVGKSEIVRQFLFQCHDVMQYFVDLFWQRKDFSGKLGDLPTVHRARERFGITTRLGQALAKQASECVSSQRKKNKKRKPQLRWHTVTLFYHFVTIEPFKKKGFDWCVKLMGSGAPKLVIPLKSTSVINQRLAQGWQISKTIRMGLKKGRVWIDFIFEKVRPPLKTSGQVVGMDSNYKNGVVFSDSQVVGQSIYQRIQEFKKRQKHTHAEIKSMLGQTLKNVDWSSIKVLSIEDLKKVKHGKRGTFSRVFNRRLSHWLYRTLVQWLERKCEEEGIQLVVKDPFKTSQFCSSCNRWDRRNRKGERFKCVHCGYLAHADHNAAYNLELLGVAGVYGLRSYLNSKIQSFE

SEQ ID NO: 33441 - protein, 470 aa, unknown
  TnpB Polypeptide
VETRLQTDSKLVNYLNTAVTEYEWVKRKIFYEMTHPLFKQRYKTEAVFEKHCRKTYGLHSRTINSIVNEVKGIMKAYMKLKKTELANLNTKIKEQERKVKKTIKELNKLKPKVTKNLATKKQLSKYRRNKFSLYHQKNKLNRLNIKYKNLDYLITHSIYKICFGTKKLLKKQYNLSDNKYKTHEKWYNDFIKNRDKNIWLTGSINEKDGNQMVALSYSEPTNTFNISLRKIEKGNYGKYDKNKYIEYNNFTIKYNKQDIIDLINAQKFNLPNKRAIHFRFHRKNTKWYLQIVYTKSFYDTEYLTRSNNGVIGLDYNDGFIQLSETDAKGNLVGLKQYDLKYHGCGKRAEHEIEQIINKIVKYSVLVGKDISIEDLDFKKTKAKSLKSSNKGNTKLNNILHKFDYSRYKQKLKDISFNHKVNLNLVNPKNTSKIAKQKYCNIKKLNTHQGAAYVIARMHQGFIDKLESMVA

SEQ ID NO: 33442 - protein, 295 aa, unknown
  TnpB Polypeptide
VHEGFRQVGVKPRHVERLNRRFGQVWVPKVGWVRFRVSGPVPEDVKSYRVTRDRAGRWHVALAQIPRPIAGPGDGSVVGIDRGVAVSVALSTGEMLHAPLLTPGESKRLKVLQHRLARAKRGSRRRQKTKLAIAKLSARERDRRNDWVEKISTDLARRFDVIRVEKLDVRAMTRSARGTVAHPGAGVAQKRGLNRAIRRSGWSKLVTRLRNKAFGRVEQIPAAYTSQRCSACGHIAPGNRKSQAVFECEACIAGRCNADVNAARNIAAGRAVTARGDLAVGRSANREPQLTTPAA

SEQ ID NO: 33443 - protein, 411 aa, Microcoleus sp.
VQHQAIKVRIYPTQSQEQKLAQAFGCSRWWWNFALNKSIETYKETGKGIGQVALNAILPKLKKQAETSWLADCYSQVLQATTLKLVTAYKNFFEGRSRFPRFKSKKSKQSIQYPQNVKILANNTIKIPGEVGEVRAKIHRQIEGKVKTVTVSKTRGGKYFASIVVETEGEKPRRSTEGNVIGIDLGVKDFAVTHDGEKVSKYSNPKHLAVHEKNLKRKQQKLARKEDGSNSRFKAKKIAARVYERVSNARQDFLHKLSHKLVNENQVVVLENLNLKGMVRNHSLAKAISDCGWRIFTNFLAYKLERKGGNLVEINRWFPSSKLCSNCFYQIDGMPLDVRDWTCPHCGTHHDRDGNAAANIRTEGIRMLQTDGTAVSAVGGEVRPHSGRQSVLRHSPVSTEAPIKPLAVSGG

SEQ ID NO: 33444 - protein, 477 aa, Mycolicibacterium sp.
MSRHTAFRFCLDPSVEQSEVLARHAGAARFAFNQCLAMVKTAIDQRKTSTSVDVPWTGFDLINAFNAWKKTEDAGRVIAVGRDGEAEVAVTGLLWRRDVCQEVFEAAAVDLGKALKAWSDSRSGRRKGRRVGFPKFKKKASGTASFRVRNRHRDGRAPAIRVGDNDRHRSVTLPGIGQINVHDDTRRLRRMLSKDRAKIVFATVSRRGGRWWVSLSVAAADLHSTAAHPARDPADDAGYVGVDLGLSVFMVAATTDGKEVARIADAPKALVAGLVRQRRLAKALSRKQKGSRNHREAAAKLARHHQHVANVRRHFLHQVSNALVKTHDRLVIEDLNVRGMLANHRLARAIADAGWAEFARLVQYKQAWRGGTIAVADRWYPSSRLCPACGRIRSDLTLADRVFTCDCGHSADRDCNAAVNLARWGQAHHGSHRSPDPQAGGRAVNARRRDPADRHPTRAVGARPNDVGTEVQPAVPA

SEQ ID NO: 33445 - protein, 164 aa, Bacillus sp.
LCGVYLGLKNFAILSDGTVYQNPKFFRTVEKKLAKAQRILSRRQEIALNQNKPLNEAKNYQKQKRKVAIQHEKILNAQMDYLHKVSTEIIKNHDVIGMEDLQVSNMIKDHKLAKAISEVSWYQFQKMLEYKAKWYGKQIVTVSKTFASSQLCSGCGYQIKTLNI

SEQ ID NO: 33446 - protein, 368 aa, Lactobacillus sp.
MFGNDRFVWNQMLAMMNERYQNNKDLPFLSKFKLDYLLKPLKQEYPFLKSSDSSSLQVVNASLYQAWKNFFNDKTGKVGKPRFHSRKYLKNSYTGKSLVRIASRRYLKMPKLGYIKTSKTDILKDTKIKRYTVVLEPTGKYYLSLQVETNPVKPFKQTGKKVGIDVGVTDLAILSNGLKYPSFDGSYYEKQAISWQKKYSRRRHSAQLLCLQDKNRKVLNPRSLGSFLNWQKAQRTKAVYQAKVAAQRKDYLYKLTTHLVKQYDVIVIEDLKVKNLQKNHHLAKSIANASWSMFRQMLKYKCQWYGKKLVAVDPKNTSRICSKCGYNSGEKPLNIREWSCSKCQTHHDRDINAAINILNKSKACIVEL

SEQ ID NO: 33447 - protein, 383 aa, Mycobacterium sp.
MSTVTSRTVKRAYRYRFYPTAAQADQLAQTFGCVRYVYNRALAERSRAWTQEQRRVTYADTNKMLTGWKRSSETLWLAEPSKDPLQAALRNLQGAFDKFWRKQTRYPQFKKKGRSKDSATYFANCFTYRGGQIKLAKQSEPLKIRWSRPLPEGAQPSQVTVSKDSSGRYHISILVDSEVKAHEPTSSTVGLDAGLTSLYTLSTGEKITNPRHEKRDRQKLACAQRDLARKQKGSLNRAKARLKIARIHARIADRRRDNLHKLSTRLIRENQVVMVEDLGVRNMVRNRSLARAISDTGWAQLRSMLEYKAEWYGRTVVAIDRFYPSSKTCSACGMINENMSLDVRAWSCRCGAVHDRDVNAAKNIQALGLSVLACGDGVRPPRS

SEQ ID NO: 33448 - protein, 396 aa, Methanohalophilus sp.
MLTMVLTFILHFYRKVYKSLNHIILTMLKAYKYRLKPTKDQIILLEKHFGACRFVYNWALNLKIKTYEQTGKSISQFDINKQITILKKENEWLKEVNSQSLQGMTRNLESAFTRFFREKTGFPNFKSKKNPIQSFPVPQYYYADFKKGIVKLPKIGEVEAVLHRSFEGTLKTATVSRSATGGYYISILVDDEKEFPEKKEFSESTTVGIDVGIKDFAILSTGEKVENPKCLKNSLKRLKVLQKRVSRKQKGSKNRGKAKQRLAKLHEKIANQRNDFQHKLSKRLISENQALAVETLNVKGMIKNHHLAQAIGDSAWSSFVTKLEYKAEWYGKTLLRIGQFEPSSKVCNVCGFHNSELTLKDREWTCPDCKTKHDRDINAAINIKKFALIDQNLIGT

SEQ ID NO: 33449 - protein, 350 aa, Methanohalophilus sp.
MILTYKIKHHRDFSDELKKAKQVAHYVLEHHPHSDKFSSKDVKQFGLKSVMSNQIIRKYGRNKKIKRINKVKLTIPKQGIQYIPTSQIIKITALKLEFNHEIPIYFDTINQIEVDNEYLFVSVTHKENSEYEATEWLGVDRNTTGHIAVVASTDTGKIMKLGKSGQYIHEKYKHIRKNLQKRGKYRKVKQLKNRESRIVRDINHKISKKIVGNAYENGYGIKLEELKGIRKNKKQAKSFRYSLNSWSFYQFQMMIEYKAKLLGVPIAYIDPAYTSQSCSRCGHIGDRNGKNFQCPSCGHVEHADVNAAFNIALSPNIVRFATESDVAKGNTGIPKAAMIRKQSTVEPHAI

SEQ ID NO: 33450 - protein, 408 aa, Xenorhabdus sp.
MLILKAYKFRLEPTPEQSQRLRQLCGCARFIWNYGLAETQQILNSGSKLPSAFALNRMLTEWKKIPELAFLQEAYTDNLQQKLKDLHRAWKRCFDKKLSAKKTVFKRKNEGRDTIRFVNFEKYCRLENRRIKFPSGLGWIKFRQSQKVTGKIKNATVSQSCGKWYVSIQTEYDVAAPLHPSTSMVGLDVGIAKLATLSDGTVFAPVNSFKTNQKKLSKLQCQLSRKVKFSANWQKLKRKIQRLYSHIANIRKDYLHKTTTEISKNHAMIVIEDLKVSNMSKSAKGTIEQHGRNIRAKSGLNRSILDQGWYEFRRQLDYKQQWRGGQVLAVPPAYTSQKCACCGHTAKSNRSSQSQFECLACGYSENADINGARNILAAGHAVLACGGLAQSGHPLKQEPDAERSVVTH

SEQ ID NO: 33451 - protein, 402 aa, Escherichia sp.
VKRLQAFKFQLRPGGQQEREMRRFAGACRFVFNRALALQNENHEAGNKYIPYGKMASWLVEWKNATETQWLKDSPSQPLQQSLKDLERAYKNFFQNRAAFPRFKKRGQNDAFRYPQGVKLDQENSRIFLPKLGWMRYRNSRQVMGVVKNVTVSQSSGKWYISIQTESEVSTPVHPSASMIGLDAGVAKLATLSDGTVFEPVNSFQKNQKTLARLQRQLSHKVKFSNNWQKQKRKIQRLHSRIANIRRDYLHKVTTTVSKNHAMIVIEDLKVSNMSKSAAGTVSQPGRNVRAKSGLNRSILDQGWYEMRRQLEYKQLRRGGQVLAVPPAYTSQRCACCGHTAKENRLSQSQFRCQVCGYTANADVNGARNILAAGHAVLACGGMVQSGRPLKQEPTEMIQATA

SEQ ID NO: 33452 - protein, 393 aa, unknown
  TnpB Polypeptide
MLKAIKIRLYLNPEQSDYVSNLLGCSRFVYNNILAYRIEEYNSNNKSVSFGEQGKKLVELKSEYEWLRNVHSKVLQQSLIDLNKAYNSFFKNGSGFPKFKSKNNNKQSCRFPSDAIGKIIGNRITIIRKLSNIHFKSSRRDEILLNKYQKIIKSATLSKNKSGKYFLSILVDLPLDKQLPESNNSIGIDLGIKDFVITSEGETFDNIKIKRNNKKKIAKLHRELSRKKKGSNNRNKCKFKLAKYYEKLNNKKEHYLHEISNKLLNENQVIVMESLSVSNMIKNHKLAISLQELSLYRFKEMLKYKSKWYGRDLVEIDKWFPSSKLCNNCGYKNNGLTLKDRTWICPECSKSHDRDINAAINIKKEGIRILNIKQIGFSSPELTLQESSPLGSQ

SEQ ID NO: 33453 - protein, 422 aa, Desulfotomaculum sp.
LIFNRKIRLIVTDEQARILDSQSKKCNWLYNQLLAIARDDYINNGNSKKLLSGRNLRNQVPILKQDNPFLKTVHSSPLKNVALRLKDAYMRSFKQGNGLPKFRAWKKKWFSLLYDEPNKGFRINGRELKLSLGTNKEGKRLYITLALEDAPASPESTIKNLRITKDHKAYYAVFCIEKPDKKPAKRLKWIALDPNHKNLMVGINQDGVSYEFKNLTQIKYWDKVIDRLKSKRDVCLRKAKFIETYEGRGYWQPSKRWLRINKALDKAYNARREQIKQGLYAIANRLAKTYDLVLMGDYTPTLETAKYDNMHRSMLNRTAIAKARKIIAWVMEKSGKHFKEVAEEGTTKTCSFCGHEEKKDPTVRVFTCPNCQTTLSRDINSAINIAKKENLLPCLGYVEDLSRTTYTVAWDYTRCDLMVQMN

SEQ ID NO: 33454 - protein, 473 aa, Desulfotomaculum sp.
MGVILELTETQQAYLDNLMARYCAAVRWSFKRLLEGKGIRDIRQGVQVKFNLNSRQANDAVYDAQSTIKSQHELVKLHYANALAKVEFTQKRITKAKSSKKKANLQKRLEKEQRKLADWQKHLEAKTFPTIVFGGKRLFLERCKGNITREEWQEARSNRYLSRGDKTKGGNLNTRLYEVDGQIYLDIAAEPTGTGRYKRITVPVYLAHKPSKKTGKINGRNYRQMVLDYLKTGSSYQVEIIRKDGRYYIHVTIEEDMPDPYHAHGAVGVDTNPDGLGIALTDCLGQYRGSQWLGQGEWTYAKSNRRNNLIGEKAKKVVALAKETGGALAVEDLKFKHDKSVTAKFNRMSHGFVWSKFLAYIDRCAAREGVPVIKVKPAFTSVIGILKYQHQYGLSNHQAAALVIARRGLGFDYERIPKRLVDRFIKAKEGFKKLNNWQQWSAVKKAILKQLKKKGVNSLVSWQVHRKELLGAG

SEQ ID NO: 33455 - protein, 387 aa, Escherichia sp.
VKRLQAFKFQLRPGGQQEREMRRFAGACRFVFNRALALQNENHEAGNKYIPYGKMASWLVEWKNATETQWLKDAPSQPLQQSLKDLERAYKNFFQKRAAFPRFKKRGQNDAFRYPQGVKLAQENSRIFLPKLGWMRYRNSRQVTGVVKNVTVSQSCGKWYISIQTESEVSTPVHPSASMVGLDAGVAKLATLSDGTVFEPVNSFQKNQKTLARLQRQLSRKVKFSNNWQKQKRKIQRLHSCIANIRRDYLHKVTTTVSKNHVMIVIEDLKVSNMSKSAAGTVSQPGRNVRAKSGLNRSILDQGWYEMRRQLEYKQLWSGGQVLAVPPAYTSQRCTCCGHTAKENRLSQSKFRCQVCGYTANADVNGARNILAAGHAVLACGGCQQTG

SEQ ID NO: 33456 - protein, 446 aa, unknown
  TnpB Polypeptide
MTVSDRVLKPRNFYLNGTHHILSLQFQKIQRYKLRGIEKTRMLVQKAFKVTLNPSSNQEILINKTIGCARFVYNRFLARRKELYDSEQKTLNFFGCSRELTQLKQEIEWLKEVDKFALQNALRNLETAYKNFFTDLKKPKSKRRFGFPQFKRKHGFKQSYKTNFTNGNIQVKENYLKLPKLGWVRFHKSQAINGAIVNVTVTSTKTGKYVASILCETEIEKHPDVDKNIGLDLGIKSYLVTTHEEEVQNPKYYRQVFRRLRKANKQVSRSIKGSNNRAKAKTKLARIYERVTNLRDDFLHKLSTRLIRENSVICIEDLRVANMVKNPKLALSIADASWSKFIAMLEYKANWHDRIVQKVSPFFPSSQTCSCCGFINPEVKDLSIREWDCPVCNTYHHRDFTAAKNILREGLRLLTAVGAPEVIKNACRELVRPENIQAEIVETGIS

SEQ ID NO: 33457 - protein, 402 aa, unknown
  TnpB Polypeptide
VKLTEVIQVKYSFEISKLCHLAKNLYNLANWYVRQDFFNLNNLLTYYDLDFILKSKQAYKNLPSQTAQQILKYINRNWKSYFRGLREYKNNFKKFKKKPKIPNYKKKNGESVVIFTNQQCKIKQGYLYFPKKVNILPIRTKIKERLNEVRIIPLGVKYKVEIVYEKKEQDLGLDRDHMLSIDLGLNNLITAVNNNGCRPFIIKGGMIKSINQYYNKQVAYYRSIENKKGNFTDTKRIQKLHLTRSNKITTFFHRISKYIVNYCVQNNIGTILIGYNNNWKHKINIGKKNNQKFVQIPFLKIVKLIAYKAQLKGIHILTVNENYTSKCSFMDDEPIKKHEKYSGKRISRGLFKTSKGILLNADVNGAYNIMKKAFPNAISADGIEAFGLMPQIIHQYIVDSII

SEQ ID NO: 33458 - protein, 417 aa, unknown
  TnpB Polypeptide
MLLTERLLIKPNNENYKQIKKSCRITKSLYNEANYLFRQSYFDGKIFKWREVDKELRTNSKNYAEIPAAASQALIRLLDKNWKSYFSALKDWKQNPEKYKRKPKPPHYSEKYQVFLQPFQSLQCKDGEIIFPKKLNLKNVKILNGKEQKTREKNARLNQIRFVPHGHCFCLEVIYESDISMENKEIKKKDIKLNSDNVLGIDLGVNNLLTMVTNIDALPPLLYKGKVIKSINHLYNKSKAYYQEVGNTALIEKLSIKRFCQINDYMHKASNFVINYCLKNDIGKIVIGKNEGWKQSINIGRVNNQNFVSIPFNKLLAQIEYKAKLVNIEVVITEESYTSKSDSLALDILPVYNKDDKKTYQFKGRRVKRGLYKSSIGKIINADVNGAINILRKVIGDGFVKNLTNKGFVFNPETVSA

SEQ ID NO: 33459 - protein, 446 aa, unknown
  TnpB Polypeptide
MKIFSSYSVKIKHYNHIFKDTVAIYRSAVDYLIGMCMEEWDTVSGIQGNLLRQQYMERLCHATADNPDPKYTGFDRRFYKFPSYLRRSAISEAIGKVSSYKSNLANWEASDTGIRGRKPSFPKVGFIYPCLYKTGMYEQTGTYEARIKVYVHNTWDWITVDLRKSDVDYITRRCQFRKKCAPTLRKRGHEWYLDFPFEEETVLANTDIFHQTIAAVDLGINSTATVSIMHPDGTILGRHFCKLPREYDSLKHATNRIRKAQQHGNFKTPRLWAIAKGINDDIAVKTAGFIIDTAVLYNVDTIVFEHLDRKGKKRGSGKQKLHLWRSQYVQSMVEHKAHRLGMHVSHICAWGTSRLAFDGSGRVLRGREADLESYSVCQFRTGKVYNCDLNASYNIGARYYIREILKSVPVKVRLALEAKVPQAARRSTCTLSVLINLNAELVSMAA

SEQ ID NO: 33460 - protein, 373 aa, unknown
  TnpB Polypeptide
VKLTVQIQLLPDAEQSWTLRAIVERFNEACSWIAAECFARNESNQFRVRKFAYKEVRERFGLSSQMAQLAIKAVCDAYKRDKSIKPKFRKHAAVVYDQRTMSFKGPDRVSLLTLSGRELIPFVMGKYQAEQFTHAKGQADLVLRHDGKWFLLITVDVPETAPIPTTNFMGVDFGVVNIAMTEDGDKFSGEKIDATRRHYGQRRKALGKAAGAKRRAGKRPKNIRRATKRAKAKEARFRRHENHCVAKKIVQTAKGTGRGIGLENLEGIRDRVSARGGEQRNRLSGWAFFELRSFIEYKAALAGVPVVAVDPRNTSRTCPECGHCEKANRKSQSEFECRACGHRSHADLVGARIVGSRARASVTAPKHAGPVPA

SEQ ID NO: 33461 - protein, 214 aa, unknown
  TnpB Polypeptide
MPSGAYTDSDGRAVDCPKFLRKAEQKIRRAQRRHSRKVKGSSNRRKSKTILGRRHLKVQRQRKDFAVKLARCVVRSSDLVALEDLQVRNMIKNHCLAKSIADASWGIFSHWLSYYGSVFGRPVVKVPPQYTSQDCSSCGRRVQKSLSERTHACQCGCSVRYGGTTSTVLDRDHNAARNILRLGLEQTSYSGAPRNEEGSPSETPVESEPLPPAQ

SEQ ID NO: 33462 - protein, 201 aa, unknown
  TnpB Polypeptide
MRTLEYKLITDAKQRLLIGEALRTSQFIRNKALRLWFDDRRNKAFDLNRYCAVLAKEFPFASALNSQARQAAAERAAYAIARYTRPDGAGKRLVKPKFQKDNRSVEYKATGWKLSQDRRQITFKDGIGIGTMKMMGTKSLHQDLCAYDLALIKRVRILRRADGDYAQFCLAVDRKESLKESLEPTGRTLGLDMGLAKFYTK

SEQ ID NO: 33463 - protein, 382 aa, Ignisphaera sp.
LSTSIQRVEEGFRVLTLQYPLSEDVKFIEEYGVLASHFYWCKRLGLEPAKKVVEKLWERVPSYWRWHLVDSKDPMYLFKGVEKSPVPYRTILRLPLVDALHEKKGAYIKGNKLILRLNRRVELEIPERALKWLENRFAEKPDKKYVRVFERDNRLVVQIVLHKINRVEMPRDPLLVVVDVNSSYGIVAHFWNKKLIKTMKFRPPNRGNRWRHVRELMSHRDLLYNQGCLTQKQINVYSSLIRLTLKGSVKRWVQQAVAKIVKRVRRMARRHGKEPLVLIDKPDYSLLHGTPLQRTLYSFIKYLENVLSWYGIYWEEKRLYSTICPVCGGKLVLDEKTRRARIMKCTNCGFKEDRDSIPLYWTIKHLPALKDEASICDGGDGV

SEQ ID NO: 33464 - protein, 402 aa, Salmonella sp.
MKQQVSFKFRLRPDGQQEREMRRFAGACRFVFNRALALQNENHEAGKKYIPYTKMASWLVEWKKDTETEWLKDSPSQPLQQSLKDLERAYKNFFQNRAAFPRFKKRGQNDAFRYPQGVKLDQENSRIFLPKLGWMRYRNSRQVTGVVKNVTVSQSCGKWYISIQTEREVSTPVHPSASMVGLDAGVAKLATLSDGTVFEPVNSFQKNQKKLARLQRQLSRKVRFSNNWQMQKRKIQRLHFRIANIRRDYLHKITTIISKNHAMIVIEDLKVKYMSKSAAGTISQPGRNVRAKSGLNRSILDQGWYEMRRQLEYKQLWRGGQVLAVPPAYTSQRCACCGHTAKENRLSQSKFVCRDCGYTANADVNGARNILAAGHAVLACGGMVQSDRPLKQEPSEMIQATA

SEQ ID NO: 33465 - protein, 312 aa, Nocardiopsis sp.
MTGKSVKRAFRYRFYPTDAQAAELSRTFGCVRLVYNRALAERTTAWHQRQERVGYSDTSAMLTAWKKTEELAFLTEVSCVPLQQTLRHLHTAFRNFFDRRARYPRFKSKKKSRASAEYTASAFRYRDGQLTLAKMIDPLDVVWSRVHARITDRRRDFLHKLSTRLVRENQVVVIEDLAVRNLVKNRRLSRAISDAAWRELRTMLAYKCAWYGRDLVVVDRFFPSSKACSTPDCAYVHASLPLHTREWTCPRCGVTHDRDVNAAHNLRAAGLAASACGAGVRPQRESSRTGRPATKQEGHGATRGEALASNHR

SEQ ID NO: 33466 - protein, 649 aa, unknown
  TnpB Polypeptide
MKKSKRKKNKIERKIFHSGKLNEMKNAIQIHKNVPLYNIFFENSIKNDINSYCDINIYNVDNIDTNKYQFKNDIIQKINRKTKKPNVLLSCKKIIILPDSKQKKIILNMFEGYRKAYNLTLKFIKTREYRRKKYLLNKNIETEHIESENIETEHIESENIETEHIETEHIEIEHIESENIETKHIESENIESENVESEHVETKHIESENSKKTKEEKKKELLEKVDKLRKNNNLITDFSIIRTYFIKNELKYLAKKYKTPVHTLAYAVKLACASYKSALTNLRNGNIRYFNVRYLKQNKNSHIMDIEKTAFSNNSFFSTILGKYIKTKPLYNGVLFNFKSVKNDSKLHYNKKTKKFTLLVPEEYTEHYNKKLKLYEETKDITIDKTLKQRNINKPKNKLLIKKEKYISIDPGLRTFLNCISNDKYIEIGKNMRDNYYKLFKKIDDIEKSEYFKDKNKINNKKTYNIKTKIKRTNKCRNKKENKLYRFYNKININENLDINEKTKLINKCTENLKHKLKNKIHKRITNITSDIHWKIINYLTNHYNHISIGKWSTKSIIKNDKSILNSYNKRFAQSLSFYTLLQRLEFKCRARNISLRIQDEYYTSKVCTNCTYKNDMLGGNEIFNCPSCNISIKRDYNGARNIMLKSLL

SEQ ID NO: 33467 - protein, 358 aa, unknown
  TnpB Polypeptide
MAKAVIRTAKNQLKLLTESARYQFKNLYKRRKSLYKKIQKYKSMLSLRSISLKQRKAIKVRLFWTQMKLNKLNQLIANGFKLHFTFGTKHLLKANKEKFFAKRDNQVVYIGDKNETCGNQQFQLQFNSKYNRFDYKLRLENKWVSDSGKYIFGSFVLKNKEAKSDILKTLSDKKSNPLTYRILKRESNLYLQIMYRREVIDIARTNDGVLGVDFNKGFISVSEIDSGGDLKSLTRYNYLHTGKATKTKTSMFELVAKLVTQATNIGKDIIIEDLVSLDSNKKQKKTTSKDYNRMINSLKFGLFKRCLLSKATKEGVTLHSVNPYNTSKIAQKRYTNRMKLNVHDAASYVIARRFYQYD

SEQ ID NO: 33468 - protein, 362 aa, unknown
  TnpB Polypeptide
MQLTTKVKLYPTEEQRKLLFDTMKLYNEACNRISEIAFNADSKKQFDIHRLCYNTIREEFPTLSSQMVVRAIAKVSGQMKREFVQHTFKPLGAIQYDSRLFSFKAVDEVSLWCIGGRQRIKMIMTGYQKKTAYESKKQANLVFIDNQFYLLVVIDTDEKEPIITDKVIGVDFGIVKIATLNDSTSFDGAIVESVRKKYAKLRASLQKRGTKSAKRKLKKISKKESRFRRDLNHQISKKIVAKAKGTNSNISIENLKGIRSGTTVRKSQRAKHHSWSFFQLREFIEYKAKLSGITVFVIDPKYTSQQCRKCGNISRSNRKSQSIFKCTACGFTDNADVNASFNIASRAVSFGSKVNQPIVASA

SEQ ID NO: 33469 - protein, 373 aa, Nocardiopsis sp.
MMVGVSKIVVQLKLTPSPEQAAVLTSTLRDLNTHTTWVARVAHEQGVMRDYELRKHTYQQLREAGVGSQAAQHVIKKVCDAYHARRSNLNNGNYGPQGSALRERIESTPIAFRPDSAHPYDARDLSFAMDARTISLWTFQGRLKDVPFVGSPDQIKMLAEHKRGEADLLCRDDAWFLAVTVEVPDAPEIDPNGFLGVDLGIVNIATTSDGRVMAGRQINRYRRRQLRLRQKLQAKGSRSAKRLLNKRLRREARYARNINHQISKRIVAEAERTGRGISLEDLRGIRARVRQRRPQRVTLHSWSFHQLGAFIAYKARLEGVPVVFVDPAHSSRECAACSYTHKANRVSQALFVCRDCGVVAHAGRKSHVPPDHP

SEQ ID NO: 33470 - protein, 410 aa, Nocardiopsis sp.
MARKSVKRAFRYRFYPTDAQAAELSRTFGCVRLVYNRALAERTTAWHQRRERVGYPHTSAMLTAWKSTEELSFLTEVSCVPLQQTLRHLHTAFGNFFDRRAQYPRFKSKKTSRASAEYTRSAFRYRDGRLTLAKMAEPLAIVWSRPLPEGARPSTVTVSRDAAGRWFVSLLCEDTITSAPAVNNAVGVDAGITSVVTLSTGEKVANPRHEQRDRAKLARAQRALSRKARGSTNRDKARRRVARVCARITDRRRDFLHKLSTRLVRENQVVVIEDLSVRNMVKNRRLSRAISDVAWRELRSMLEYKCAWYGRDLVVVDRFFPSSKLCSTPGCGYLNVSLPLRVREWTCPGCGVAHDRDVNAALNLEAAGLAVVACGAGVRPQRESSRTGRPAVKQEGHGATRDEALASNRR

SEQ ID NO: 33471 - protein, 643 aa, unknown
  TnpB Polypeptide
LDELVQQVATHILHDHWTADELDGIYAANHQAWKYFDEHQPFDDLDDEAVYRALYDETPPADFELYLPSRIRRCILQKVGGTLRSHADRREAFQSIQYVLPTHKIRRIHRRRIKEELWDDGEYLSSGYVDILIDQLNAHYDRHGRYPDSYLDLQDPPEYDDGTLPYSADDGSTSGQAVEYSRDDTADTLSVKVKTPNTVTPQTRGDWSWHEHDLPTYDAFNDLHDVGSISAPEFQPGRRKNGDRIYELAFPIKVDGTDTSDEMERVLALDAGIRKEMTAVVVDETGEQVSRPHFVRFTDRGGMRRLHRERQRLNARLAELRRKGRAHTAEFKQVQAEYERVNTKLSNKREQLVHDVANQVVALALVYDVDAVVHEDLRSLSPPRGEGELSWALSSWARREIIEKIEYRCEYVGMEVERVYPKGTSRSCPRCGSTGHTCKSPDHSKEVWWGGHFRCDNARCEFEGDRDYIGALNVARVFFGGTDELESGFTSSYTGDSETVPARRSVGTRLTFGRGVVAYRPGQARATAGGGSAVIAPAVALSESKMDGSDGCGPATRQYTQFQRVTAENRNGERYPRATRGSGPGERRQNATGRRDPAGVLDDPDEESDYHDRHPEHPDVGRDPPRKERQLRTHRLHRVAPST

SEQ ID NO: 33472 - protein, 426 aa, Oceanospirillales sp.
MGFHLFTLNCNLGKIYDMRAYKYRIYPNAEQRVLIDKHFGCARHIYNWALAEKDKHYKETGKSLSKSELQKRIVASKKDDKPWLSEVNSQALLASLMNLETAFGNFFKGRTKFPKFKSKYSGWQSFQCPQHVTIDFEGNKINLPKLKGIKIKLHRSFDGQIKTVTVKRSPSGKYTVSVLVDNNFTAPIPTTVEDNKTLGLDVGISHFIIDSEGNKTNNPNYQKHSLPRLAIEQKKLARKKKGSNNRAKQKCCVATIHERIANQRYDFIHQETAKLADKSHATSFAVENLNIKGMVKNRKLSRAISDCGWGMFITTLRYKCEWNGKNLLTIDRFAPSSKTCSSCGLKQEKMSLKIREWQCECGAVHDRDHNAAIMIKQFALADALGHSVCVKSSPVAKSISVDATAKEVVSVPLGSQEAPTRATSVV

SEQ ID NO: 33473 - protein, 436 aa, unknown
  TnpB Polypeptide
MYRTDRIYIQKSHELYEYLDDFAHKAKCLHNASLFRIRNTFTAHDKTNLTANEKEVQDELALLKGQKSYYVLGYGVLQKLMRATSNPDFFSGLPMQTAQHIIRQTCGDFKHWLSAIKKYKKDPTGFTGKPKMPKYCRKETSTYLFTNQDAVIYDGKLKLPLTKIRISVRRRHGKLMEVKVKPVSGGYELLLTYQMKDSKVRSGMHFAAVDFGVDNTMAVVSDTGKSILFKGRFIKSVNQYFMKEKAERIRILSKGKETTERVWSKYLDQLSAYRTNYIRDCFHKMSKKLLLWCQQNDIGYLVLGSNTFWKQNVNIGKVNNQNFVSIPFEMLKKMIELKAIEYGVTVIKSEESYTSKASFLDNDEIPVYEEGVNIKYRFSGKRIKRGMYQSSDGTCINADINGAANILRKAGYDTSKVELTNLLNPKIIRFKDLNCK

SEQ ID NO: 33474 - protein, 413 aa, unknown
  TnpB Polypeptide
MYTTQKNQIRHLHQSEFVALRELCRLSKNLYNVGLYTVRQYYFQERKHLRYEAAYHLCKTNENYKTLNTDIAQQTLKIVDRTFKSFYGLLKAIKSGSYSQRVKLPKYLPKDGYFPLIIPRIKVKDGRFKVPMSHEFRQQFGTVSIPFPARLDPNTIKEVRIHPKHDARFFEVEFICQVPDEPVETIPNSALGIDVGLDNLATCVDTNGASFIVDGKKLKSINQWFNKENARLASIKDQQGIKQLTQQQARLYKNRSNQVRDYLSKTARLIINHCIKNQIERLIIGFNPEMKQNINLGKRTNQNFVHIPFFALRNKLKSLCQRYGLIYQEQEESYTSKASSLDGDEIPTYNADNPQKYEFSGKRVKRGLYRSKDGHLINADCNGAVNIGRKSKQNGFTGLSRGCLTQPLRIRIS

SEQ ID NO: 33475 - protein, 404 aa, unknown
  TnpB Polypeptide
MLVKGVVFYLNSVLPTEAKLLLEDFRLAVNNAIRAGLQARVTSRNALVKIAYENFREEHPRMYAKHLVSAFEVAGNVLKNHRRRVRKGVTCRIPYVKRLLMKAENQAYKLDRNSGIIDLPIMAGCHVELRLVVSQYHRKYLDDMSLSLGSLTVLPDRVMVAFRKDAPKPYAPESALSLDTNERSLDGVFVEGDVVKAIKAEFPDIAVIQQRHHDRRKRLQKKKAHDRRISRNLCRREGTREHRRIDYRLHQVANSVLKFAEEKKSAIVLENLKGFKSKRSKELNRRMSVWPRRKLHQIIEYKAQWKGIPVVKVDPRNSSRTCPVCGRIQHSRMGAEFVCQCGWRLDRHINASLNLLQTAISKGMAGGLWFNPGAFQHDVMMILYEPAMAARSEPNGTSGIAGVT

SEQ ID NO: 33476 - protein, 422 aa, Moorea sp.
MLMMNYSYRIYPSIDQQAQMLEWLETCRGVYNYALRELKDWLASRKCESDRCSLSKEYIIPANTPFPSYHLQQNNLPIAKKVNPKLKKVHSQVLQTTIRRLHDTWDDFRARGFGFPRFKKSGQFKSFLYPQFKKNPIQNGVIDLPKIGKVTINLHRPIPDGFQVKQVRVLSKARHTQWYVVVTIALDVEIPDNPPGGRAIGIDLGLEKFLTTSDGFTVERPKFLKHLQGELKLLQRRAARKQKRSKNYSKAQVLVARLHHKIANTRKDFHLKTAHLLCDHAETIFAEDLNTVGLNRGMLRKECIDASFGQFLDLLKWVCWKRGGYFERVDPSGTSQTCPECGATAQKLLSQREHICPECGYRTHRDHAAAQVIRLRGLEKVPVGDGERKLSADSVLPGECNSQVSATQKVSVVRLRSPRRNL

SEQ ID NO: 33477 - protein, 293 aa, Uncultured sp.
MLILKAYKYRLYPTIEQQEYLNQTFGALRHNKLKISKLELPVEVKWSRELPSIPSQVTISKTPSGEYYASFLCKVVPKVTNGSDIIGIDLGVKELVVSSDNQRFPNPKVLYKKQHKLAKLQRALSRKIKGSNNRNKARIQVAKLHNQISNIRKDNIIKLYRILVNRSKVIVIEDLKVTNMVKNHCLAKCVSDASFGIIKQTLTWMVAESHWCNIVEASPFFPSTQLCSTCFKKSEIKLELKDRLWKCSNCNSIHDRDLNAAINLRNLATSVDHIYNITKSSGKYIQLDHVTNC

SEQ ID NO: 33478 - protein, 398 aa, Uncultured sp.
MHKSFRYRIYPNKQQKNLINQTNGCCRKVYNNILAKVNMTYQAYKDSLNTTNPILKPEFPTSYTLINMLPTLKVEFPYLYDVSSTALQQTVMDLGASFTNFLKSKAKYPRFKKYSYKNTFRLTIDGFRFNNDNLYIAKSKKPLKVKWSRKLPSSPTSLTISKEPSGEYYVSFLCKTTDYRQVAYKTQTVGIDLGLTDYATLSTGRRIANPRNLKRYQKRLARLQMHSARKHKGSKNRQKCNIKVAKQHNRIANLRKNFIEQETTKIVRDHQFIAVEGLKVANMLKNHKLAKGISDASWGIFLTRLAQKVTETKESILITADTFYPSSKLCSCCGHKILSLPLSTREWICPECSTKHHRDLNAAFNLENILENNLDYLVSESTIYGPKILVANSAGMLH

SEQ ID NO: 33479 - protein, 407 aa, Okeania sp.
MRTAYQYKLKPNNELVSTIELWLDLLRRQYNYRLGERFSWWSENRSSVNACPLIMPIPQLRNNQDYYSHKKDLVNTKDKFPDYKLIHSQVLQDCIKRVKIAIERWLKADKNGQRLGKPRFKGKGRYCSFTYPKIKQECLEENKINLPKIGKVKLIQHRPLPSGFQIKTVTISRKADGYYVTLSLEDKSVPYFPDVEPTTENTLLIDMGLKELFVTSEGESVPIPQYYRSSQKRLKTLQKRLSRKKKGSKRRLKAVKTVAKQHKKVADKRKNFHFKTANELLLKAEVIQYENLNIKGQALTSLSKSINDAGWSQFLSILTVKAGNAGHKIAVNPKNTSQDCSNCGKKVPKELNIRTHSCPHCGIVIDRDLNAAINIKNRAVGHSVLKACVARRDTGATKRKAHTIASA

SEQ ID NO: 33480 - protein, 601 aa, Firmicutes sp.
MLRRLRGKDPGGRLRFEIHHKKRRLAGLGAKLEMAEGSLKRAVPRICFGSNRLFRRQFHLKENGYRTHEEWLSDWWGARSSQFLCLGSKDEKCGNQTCALLPDGTLRLRVPDALANNPGGKWVLISGVRFRYGRDVVDRALAEGQALTHRFLRRERKGKPVWYVQVTVERQDAPLLTSRLLGALGADLNPGLVAAARIDRYGNPVAWRHIPVQTRGRRQEQVMASLGEAAADLVAWAKAEGVPIVVERLDFEKKKAGLKEMGKRYAGMLSAFSYSEFFALLLSRAAREGVEVILVNPALTSVIGQVKFGPGYGLSPHAAAAAAIASGQTGGAYPRGCVPKAHVVGVLPREGGAGGYPYPGRHLRLPVGRTARLEMVLPRFRGVIHRRQLSGKLFARRPEHCAGDQAHGEKGYPRGGPFCRLPDPHARSPLAHGERHHHRGGGPRHRLRGCRPTGVDRSGWPSGARPHARRRFPADQPQGARTGSHHRLQSRRDHQHPQTRHQAHRRGPHPRRVGRIPPGGRQTAENRAHRVGTPGPLARACGGRPLHGHRSPVCAAARPGGALAAPGHGCPLPVLGAPRRGTASTGQHARAASRWRTGQFA

SEQ ID NO: 33481 - protein, 446 aa, Halorubrum sp.
MKRANTFDVVPQSDEDEGLLRRLLDASAALWNEINYERREHYADPDGDVWEISEYRGRYGGVLGASTVQQIERKNREAWKSFFSLRKKGEANGKPGFWGNAEEGRELRTYIRNTSYSVEWGEYSRLEILVGKDLKDEYELGHRERLRLEVRGDPNWEEYDKQGRLELFYDEQAQSFRAFQPVTIGEDHSRLAHPLASEEAALDIGANNLVACTTTTGQQYLYEGRELFERFRETTREIARLQSLLEEGRYSSHRIQRLYDRRTKRRDHAQDALARDLIERLYDEGVSTVYVGALTNVLETHWSVETNAKTHNFWAFRAFVNRLACTAEEYGISVEVRSEAWTSQECPNCGSTEDTTRHRDTLTCPCGFEGHADLVASETFLRRHQNSPSSGWRTRREASRQRQTTVTRSMARPVCLKWDNHDWLESSRSPRPNEEHTNPQVASVGR

SEQ ID NO: 33482 - protein, 454 aa, Moorea sp.
MAKNNKKIGVQQMVLHPDQETNAILEYLCEQSGKLYNMGVYFARQTFFKTGLILTGKFDLIYEQSVGKTSIAKSLPSTPAQQTLLSVTAAFKSYKRLRDLWFKGKLPNRPKPPNYLKGSKMFKVTYPNSGGQKPKIINGQVQFSLGLTVRRWFGFKNFYLPFPTNLKWRKIKEWTILTKNGIFYLEVSYELPDQDIQVSSNNNEALSIDVGTSDNLAACVDTLGNSFLVDARAIKAFNQYWNKQVSNRKEGKPQGYWDSWLDRVTRKRNHRIRDGINKAARLIINHCLKSGINTIVLGWNEGFKSHANMGRLNNQKFVQIPLGKLKDRLGQLCEIHGIRLEITEEAYTSKASYLDGDSLPRFGEKPDGWKASGKRIKRGLYRSGDNSVVNADLNGSANILRKVASKLGIDLSRLGRRSLTTVARVRLWALPQSNLSAESPRLMTGECQKTLDRQ

SEQ ID NO: 33483 - protein, 451 aa, unknown
  TnpB Polypeptide
MSNVYTYTTEIKNREYNIKLMEYITEYKGLFNHIQRVVFHKIKGIYVDNQGEFTLKDKGALVKYVARTYGFTTRTASSIVYNMTGRFNAIKELKEYEREQLETKIESLEKKIAKTEKSREDLNLKMATNIATKEEQEKYKKIKLSLYWRRNKLNKMKQKLVNIENEIGTYNFKLCFGTNKLSQKDYQKFVEQRDSEIFYVGRATEKAGNMNFQMEYNKKDNQFYLQIRKEINTEQDRYVRGKVYFSKSQRKMIKKILRSKESPLTYRIKVKNGRYYLQVIFQYKHNKSMCNNTRNSYGVVGVDFNKGFVAVSETDSYGNLINTFNIKYRFRSGNKTESDFQYIAKILSDYCLEKGKDLVIENLNFDKEKANMVKGDFKIYNEMLSSLAYAKFSNIIESKCAKKRIFLKKVNPAWTSYIAKKKYCKKKKLNIHSGASYVIARRGQGLKDKAK

SEQ ID NO: 33484 - protein, 405 aa, unknown
  TnpB Polypeptide
MRLTEKHQIHKKHKLYSICDELCFNSKNLYNAALYEFRQSYIDKNRKELTWIDINNLFVQKKQVDYKRLQSKVANAVLKKLGDNVTSFKGMLKAKKEGKIKNKVRLPKYLHKTRGRFLVEFNNQMISKKRDENGYLIVSPRDLKLVIPTRREEVKQVRIVPQLNYYVIEVLYEAQEEDMKTGIVVGAIDLGLNNIATIVTNDKKNPLILSGKKLKSINQYFNKNVANRQGKLPKEVYTSKEIKRLWAKRGNKIDYETHKISKYIVELMVEREVSKLIIGNNGGWKQGINLGKRNNQNFAYIPYKKIIDRIIYKCQMKGIEVIVREESYTSKASFLDYDYIPTINEDDEVKDFSGKRVKRGLYRTNKGKRINADVNGAYNIMAKESLDYIKTKREELSFSPKLIKL

SEQ ID NO: 33485 - protein, 374 aa, unknown
  TnpB Polypeptide
MLRGQTVLLYPTEKQEQMFRKCLGLARFSYNYLKTIDDDRVKNGEKRLTNNEMQKKLVELKQTEGYEWMKELPSDVHKQAALDFGQAKARSKKQVGHQGQTRYKSKKDSEQSFYCEYRKTKAKKGRKVCISKIGEVKTSRQIPRSVGLHDPRVIKKGNKWYLSFGIEKPEVKKELTDEVIGVDMGLTHLAITSEGKKYDNPNRSKKIRDLEKRKKEYQKMMSRRYNKEKNISEQSKGYYRAKAKHANICEKLTNIRKDIRHKISRDIVNTRAKTIVLEDLNIKGMMKHKKLSKAIGEAGWYTLGMYIKYKAEEQGTEVIKADRFYASSRICSCCGEKKQGDFSLSIREWECPNCKAKHDRDINAAINLKQYPTL

SEQ ID NO: 33486 - protein, 414 aa, unknown
  TnpB Polypeptide
VAMMNRKIDDRFRYAYKFRIYPNKEQEILINKTFGCCRYIYNGLLADAQKQYEETGKSKIASYKSLYTEENETWLKEVDSIALSNIQQHLKEAYKNHFANIKKGEYRELRFKSKYNRNKSYTTNNNSTAKRKTKSIEIQGNYLKLPKLGLVRCVFHREVIGDIKSVTISKNPSGEYYVSILVARNPEDEPQKLPKTNKKIGVDVGKKSYATMSDGSEIEKQQWLIDCDKKIAKLQRELARKEKGSKNWEKTRIKLAKAYQHKSNKMDYFLHNVTTKLIRENDVIAVENLSIAKNKKSMVRTDKKQGQTNKERQKENHDTMNMSWYKFRQMLTYKSVWYERVLVVAQNTYASSQICNKCGYKNSITKDVAVRKYICPECGAVHDRDLNASINLINLYNNKDIENIDESASVNLQL

SEQ ID NO: 33487 - protein, 391 aa, unknown
  TnpB Polypeptide
MLLLISTFSKRMQQGEVGGKKYLSREVILKMMKATKTIRCKLIGLTKRKRELLNREYDNFQHWLETGEDRGVYSAYKQDARWLYKKAKRMKGVPIRKDLIDIQKRDTKIAKYWARIRVKGERGGVKVALAHQPFNFEEWEVCESLLVKKDDDFYLYVTVKKEVELKEEYSSIIAVDMGARWVAVSVARHRSKPKFYGRRVRELRGKYFWLRRKLGREKKLRAIKKIGHKERRLVDDELHKIAKDIVDEAERHNAIIAIGDLRGVRDNNKKGRGRKVNRKISSMPSYKLKEYIKYKALERGILAIEIPEYNTSKQCSRCGSMNTERPSQGVFICKDCGYQVNADVNGAKNILKRAVGYMLTVGAVVTRPEGERFVLSHTPQPLASVGCPSLQ

SEQ ID NO: 33488 - protein, 320 aa, unknown
  TnpB Polypeptide
MKPMAVYRPRLYPSKAARQRLFGSFDRLLLYNYCLANGVHDARISASRRRQPPTGGKAIGIDLGASNLSTDSDGLVVGRPRSVRKASRQLARQERKLSRKIEGSRSRCKQRHSVAVTRAPIGNRRNDFLHNNLSRYHVDNHDLICLECLNIKGSIQVNCSSMRKLMQDAGWDKITRLYKCKAERAGKRIVFANPGDAPQRCSARGEPVRRCLSERTHSCPFCTTVLNRGYSGSQNILNDGLSSYLFFRHYLLCYSGSQNILNDGLAMAGWGRGTPEPSCPDRGALVEIKAHTLADDKREQALVEEARISRFRQGECQIIA

SEQ ID NO: 33489 - protein, 376 aa, unknown
  TnpB Polypeptide
LYNELRSEKVEKYRKDKISLTKTDLRRIALKKRRSSEELKQVHSQVVQNVADRVSAAFKNFFEKRSRFPKNKHYRNYRSFIYPQSGIDVEPTLEGHKLYLSGIGKVRIFVHRPMSGKVNRLCVKYEAGEWYAIFLIEHVVRQKRENDIDSIPDERIRGADLGLERFITLDDSISKEYPRFLTQSEEKIKRIQLHLSRKKKGSTRRRLLAVKLSQLHLHVKRQREDYQNKLVSTLLNTNTDILVLEKLSVENMLQNHRLAKSIADASFGRFAMKCVKKAEILSKQVIFVDPWGTSQFCHICLEWVPKDLSDRNHECPKCGVKLSRDLNSAKLIRRLGIQKRSPPSDGGLSSAELLPLPYLRRMASIGEEAGSLRIHS

SEQ ID NO: 33490 - protein, 404 aa, Trichococcus sp.
MTVTIHKAYKFRIYPNQEQRILIGKTIGCSRFVFNRFLSEWNKTYEETGAGLNYCACSAKLTLLKKESETLWLQEVDSIALQAALRNLSDSFNRFFKKQNKAPRFKSKRNPVQSYTTKQTNGNIAVMGNKLKLPKLGLVKFAKSKEVDGRIMSATIRRNPSGNYYVSILVETDIELLPKTGSACGVDVGLKDFAVVSDETVYENPRFFHKMERKLAKEQKILSRRAQQAKKDERKLSESKNYQKQRVKVARIHERIRNARTDYLQKTSTKIVKNHDVIGIEDLHVSGMLKNKKLSKGISEASWAQFRTMLEYKSKWYGKQVVAVAWNFPSSQLCSCCGYQNKDVKNPSVRDWDCPKCHAHHDRDLNASINLKNEALRLLTVGIYGDSLLKEPGDTPVLVGISHL

SEQ ID NO: 33491 - protein, 393 aa, unknown
  TnpB Polypeptide
VAAQHKVYRFRMEPTKTHAVFLGRMAGARRFIWNWALRRWKDYHAEHGKSISLAQLSAELTALKQQPETAWLNEIDSQALQQALKGLYGAFVNFFEKRARHPRFKSRKRDRARFRIPQRVKIQDGKVSVPKVGQVRIRQSQPVEGTTKSATFRRDARGHWFVTLTVCFELPDGPLLPPAADKVAGIDLGLIDFATLSDGSDPIKAPKFYRKGQRKLRTAQKALSRRKKGSKRKAKARGKVARIHQKIANQRCDFLHKLTTKLVHDHDGICIEDLNVKGLARTKLAKSFSDASMGEFRRQLEYKSLWNRKHLVVIGRFFPSSKLCNVCGALNDHLTLSDREWDCGCRAHHRRDFLAACNIRDEGLRILAVGQTERLNAQGASVRPGTSGRLASN

SEQ ID NO: 33492 - protein, 429 aa, unknown
  TnpB Polypeptide
MMNLTYSYRIYPSLDQEALMLSWLEQCRRVYNYALAERKDWINSRSGQVNACSIKQEYIIPAETLYPDYYKQQNALTKAKEAIPELKVVHSQVLQDALKRLDKAFKFRQERGFGFPRFKKFGQYRSFVFPQFKANPINGFNTAVATTRGTRATRCLLKLPKIGAVQLNLHRQIPEGMTVKQVRVVLKASGWYAQLILQADVSVPEVMPHGESIGIDLGLEKFLAVSDGQLVERPRFFGDLQSKLKWLQGKLRDKKKDSANYRKAQAKIRRLHEYIHNVRREFHILTAHTLCDKAGAIFAEDLNLKMTSRGMLAKHCLDAAWGSFLDILKWVSWKRGVYLAKVDPKGTSQTCPICQAHTGKKELSQRVHSCGECGYVTDRDVAAAQVVMQRGIAAAGLAVFLPVEEGCLGTPKKQENLSCEIEKPALYHS

SEQ ID NO: 33493 - protein, 372 aa, Rhodopila sp.
MKLTLQVQLLPDAAQAASLKATMERFNEAAGWLAGHAFASGSANKFALQKAHYRELRERFNLSAQMAVRCIAQVCECFKRDKSKRPRFRKHAAIPYDQRILSFKGIDRVSILTLDGRVVVPFVMGKYQHERFGFARGQCDLVLRRDGKWFLLVTADVPDKAPVPTTDFIGVDLGVVRLATTSDGETFAGAAVEAVRQKRTAERRSLGRKMSHRNKRRTRKNARRAMKRIGGKEARFRRDVNHCIAKKIVVKAIGSGRGVALEDLRGIRDRTRFRKRQRNKMGGWAFFQLRSFISYKGRMHGVSIVAVDPRNTSRTCNECGHCEKANRPSQAIFKCRQCGHTANADINAAANIAARARVNAPQVSQPQPIAAA

SEQ ID NO: 33494 - protein, 387 aa, unknown
  TnpB Polypeptide
LKKAYKIEIKPTKEQKIKINKTIGVSRYVYNFYLIHNKEIYEKEKRFVSGIEFSKWLNNEYIPNNPDKAWIKEVSSKATKQAIMNADGAFRKFFNGKAKFPRFKKKKKQTVKAYFPKNNKTDWTIERHRVKIPTLGWVRLKEYGYVPLNAKVYSGTVSQQADRYYVSILVEEENDINNSSYSEGIGIDLGLKEFAIISNGTTYKNINKTAKVKKLEKKLIREQRSLSRKYESLKKQKNKKEGEATRQNIQKQVLKVQKIYRRLYNIRTDYINKIVAEIVKTKPEYVTIEDLNVSGMMKNKHLSRAIASQKFSEFRTKLISKCKNNDIEVRLVDRFYPSSKLCNKCGKIKKDLKLSDRVYKCECGYIEDRDLNASFNLRDAKTYRVAQ

SEQ ID NO: 33495 - protein, 386 aa, unknown
  TnpB Polypeptide
MKKCKNSNEPMIAYKFRIYPTEEQKIFFSKTFGCVRLVYNLMLNDRIKAYEESKGNPDKKMKYPTPAKYKDQYVFLNEVDSLALSNAQINLDTAYKNFFRDKSIGFPKFKSKKNPVQSYKTNNQNGTINIFENKLKLPKMKELIKIKVHRKIEGIIKSATISRSSSGKYFVSILCERKIEPLPKTNSAVGIDLGLIDVAILSTGEKIPNLRFTKQLESKLKKEQRKLSRRLLGAKKSNKKLSEAKNYQKQRIKVAKIHEKIMNMRTDYLNKLSTYIIKNHDIICVETLDIKKMLKEHKYSKSISDVAWGKLILKLKYKAEWYGKELISIDKLYPSTQICFTCGKKGGNKTVDIRKWTCSFCHTHHDRDINASKNILAEGLRKRQAV

SEQ ID NO: 33496 - protein, 367 aa, unknown
  TnpB Polypeptide
MFKTYKYRLYPNKKQTEQIQKTFGCCRFVYNQVLNYRINLYENEKKSINKFDCNNYKNKVLKEKYPWLKEVDKFALENAIFNMDSAFQKFFKEHSGFPKFKSKHNHKKSYKTNFSNNIRISFENNKIKLPKLNWVKVKFHRTFSGKIKSAVISQNSSGKYYVSILIETENESTFLPSTNSSIGIDLGIKNLIITSNGDKFDNIYIIKKYEKKLAKEQRKLSKKVKDSKNYEKQRKKVAVIYEKIHNSRIDYLHKISHKLIIENQVIVSENLSVTNMTKNHNLSKSILDCSWYELTRQLQYKTEWYNKSYIKVDRFSPSSQTCHVCGYINKDVKNLAVRNWKCPQCNTIHDRDINAAINILNEGLKLL

SEQ ID NO: 33497 - protein, 387 aa, Escherichia sp.
  misc_feature (64)..(64): Xaa can be any naturally occurring amino acid
  misc_feature (74)..(74): Xaa can be any naturally occurring amino acid
  misc_feature (85)..(85): Xaa can be any naturally occurring amino acid
  misc_feature (96)..(96): Xaa can be any naturally occurring amino acid
  misc_feature (111)..(111): Xaa can be any naturally occurring amino acid
  misc_feature (210)..(211): Xaa can be any naturally occurring amino acid
VKRLQAFKFQLRPGGQQEREMRRFAGACRFVFNRALARQNENHEAGNKYIPYGKMASWLVEWKXATETQWLKDXPSQPLQQSLKXLERAYKNFFQXRAAFPRFKKRGQNDXFRYPQGVKLDQENSRIFLPKLGWMRYRNSRQVTGVVKNVTVSQSCGKWYISIQTESEVSTPVHPSASMVGLDAGVAKLATLSDGTVFEPVNSFQKNQKXXARLQRQLSRKVKFSNNWQKQKRKIQRLHSCIANIRRDYLHKVTTTVSKNHAMIVIEDLKVSNMSKSAAGTVSQPGRNVRAKSGLNRSILDQGWYEMRRQLAYKQLWRGGQVLAVPPAYTSQRCACCGHTAKENRLSQSKFRCQVCGYTANADVNGARNILAAGHAVLACGGCQQTG

SEQ ID NO: 33498 - protein, 414 aa, unknown
  TnpB Polypeptide
MLNMNYTFRIYPDATQQSLIQEWLETCRQTYNYALRELKDWLASRKSLADRCSLEKEYIIPSDAPFPSYQRQQDGLPKAKKEFPHLASVYSQALQTTIRRLHDTWENFQKRGFGFPRFKKFGQFKSFAFPQFKNNPIARHQIKLPKIGSVSINLHRPIPEGCVVKQVRVLSKARGTQWYVVITLQLDVSVPDVSPHGRAIGIDLGLERFLTTSDNTSVERPKFFKSKQSKLKLLQRRAARKQKRSQNGEKSQIKVAKLHHNIASSRKDFHYKTAHQLCDQAQTIFAEDLNTVGLNRGMLRKDCVDASFGQFLTLAEWVCWKRGAFFMRVNPNGTSQTCPHCLVTVQKDLSIRVHSCPECKYETHRDHAAAEMVLIRGFETVVLRDSEEPKEPVGSRSAGGESLGKRRRSRNAQV

SEQ ID NO: 33499 - protein, 511 aa, unknown
  TnpB Polypeptide
MTRLPRAATGNPAMRMAISLTTPIPTAIRSERYRVRFDSRRQAQLCAQTAGANRFVWNLFLANNDWRYRVCRKARGYDFPEAQRPLWVDPSRTWQSMYKRFARIRRGTYDREFRASPEGAVYADLDLSWLRDLPSAPVRHALKYLDAAYQVFYKAHAAAKAEGRFLPRRQSDGKPQRFPRRKSPRGPKADGFTIPDKVKMDGHRLHISQLGWVRLERGANHPYRGCAPKTVRLLKEGTDRHPKWYATVAYAVPVAQLQPPADDGELGVDRNVRQATDSDSEVYVQPDTSKLDANIKRKQRQAAKARERARKSGQPLSNRARRVCGQLRKRHRHSRKMADTAHAVVLEDLDTQAMTRSAKGTVAQPGTNVKAKSGLNREILASGWGQLERNLAYKAGLMVKVDPAYTSQTCAQCGHVNKESRKTRATIQCTACGHTANADRNAAVNILDRGRPLIRQARGAGASARRGAFGIEPTPTTREPGRRGPSPPVRPRTAYRMSTIRYKSLTESLPL

SEQ ID NO: 33500 - protein, 306 aa, Moraxella sp.
MLKAYKYRIYPNQQQAIAFEQHFGCVRFVYNWVLALQNRYYKIFGKSLSRTQIQSQLVKKKKTGKFAWLNEVNSQSLLNALLNVYTAFTNFFKSRTKFPRFKSKKIPQRSYQCPQHCTINFKQGIINLPKTKGIKTVFSREFVGNIKTVTITKTATGKYHASILVENNEVVPTPTTIEPSLTVGIDLGISHLLNLSDGSKFDNPKHLAKASQRLAIQQKIFARKQKQSKNHQKQKLAAARIHEKVRNQRLDIHHKITHSLICENQATSYALEDLGVKNMVKNRKLAKAIHDVGLGQFVTLLTYKAN

SEQ ID NO: 33501 - protein, 404 aa, Moraxella sp.
MQTSVVTAKIKLLPSDEQMVALAQVRTLYTKACNWLSAKVYETKELGQLALHNAYYQQMRTKLGIKAQMTQSVIKTVIARYKSAKSNNHPWSLIEFRAEECDLVYNRDYSYNRKKRTFSIGTVAGRTHIKHTTGKNEFLDNLKDKDNPSGYVMGTAKLWLDRKGQWFILVPMTKELPEFDITQDATNVIGVDLGLNFIATTYDSKGNTKFHSGRVVKHRRAECKATRKELQRKQTPSARSRLKSYGSRENRYVTNVNHQITKALVTSHPKGTVFVLEDLTGIRQVTEKVKLEHRYVQVSWAFYQFRQMLEYKAKQHGHSVLIVDAAYTSQTCPKCGNVHKSNRHKKEHRFECRACHYRSNDDRVGAMNLHRKGIEKISELSILSSTQQACPIEQGQGQLSQSLI

SEQ ID NO: 33502 - protein, 451 aa, unknown
  TnpB Polypeptide
LGSDEVIAHRIRLDVTEQQARTLARWCEAARLAWNWGLSERDRQYRDRVGGSALVRRGAKWIPVGPQWQADPDAPREDLDRLTTRIRREGRPWWMVEPPARVYRTEFRTLDEAWRRCREGLARRPVEKRRARSFGLSNQDIRLDGRRVRLPKLGWLRLAERLRWRGTVKTVRVSCEAGRWYVALGVDWDRQRRPAPDISAGLDVGVRTLATLSSADGLLLHRYANPRAHDASLRRLRRAARAVSRKQMRSAKWRKAVLHLARLHARVAAVRREATEQVSTSVARSVRRVGIEDLSVRDMLRDRLLARRVSDAALSRLLGRVGVKVREAGGQVLVAPRFYAATRTCSVCRGRTERVPAGAAGLGVRRWTCERCGAVHDREVNSARNLDPAVWSAEMDAAGRAESENARGQACQPPAEADGGGLAEAGSARARDPHAGAPSTSASGELLRVQR

SEQ ID NO: 33503 - protein, 371 aa, unknown
  TnpB Polypeptide
MSNMRTYKFKLYKSKKNKKLQHQLWVACKVYNHCIALHKRYWHLYHKSLGRYQLQNYLARLKKTKKYQYWQDIPAHAIQDVNDRIDNGYKLFWSNLKRKKKTAPPKFKSWRKYCSFSYNMVGKGVIDGNTIKIAKNKYKFFKSREVEGKIKVLTVKRDACGDFYVYLVCETPEVKIESRLGKSIGFDFGLKGKMLVAPNKGDDIIAPDFFKRQQKDIAKANRKLSTKRLRSNNRRKAHLVLARLYRKIVNQRKAYHWQLARELCKKYAIICLEDLNMKWMQKGHGKKVGDYGFGEFLNILEYVASQFGTKIVRVDKFYPSSQLCHECGYQNPEVKNLSVREWDCPSCGHHCDRDRNAAQNILDEGLRLLSA

SEQ ID NO: 33504 - protein, 380 aa, unknown
  TnpB Polypeptide
MLRTFKYRLYPSKAQSIVLEQTLETCRGLYNNALAERKNAWKHEGKRVTCYEQLNNLPTLKESSSVLRRAHSQVLQDVLRRLDTAFKNFFRRVKAGEKPGYPRFKAANRFDSFTYPQFGNGVKLRENKLWLSKVGEVNTKLHREIPAGVKIKTCILRRDVDQWFACLTIELPDPAREPREIRSAVGVDLGIANLVALSTGELVENPRWLKQSEQKLALEQRRLSHKKKGSKNRGIQRLHVAKLYRKIRRQRTDFLHKLSRKIVDSYDLIVFENLNIEQMIRHKYIGKFVADAAWRQLMFFTRYKAEEAGAVVQFVEAKNTSQTCSECGALVPKGLGKRVHLCPSCGLVIDRDINAARNILIKSTAGRAGRACRSTAIAGC

SEQ ID NO: 33505 - protein, 356 aa, unknown
  TnpB Polypeptide
MLCTVTAKAKLPATTEVVMTVTAFRKGLQYCVDAAWKRGIKNKVKLQPFVYAHLRKTLPAQLSIACITQACAMVKKAVTKPDVERASVGYNFPRSARYADGVLHLRLLHERRDFPITIPACYTQYLSWEMREGLLTIDRRGRAYFLFRFQHDAPAPTGDGHVVGIDLGIKNLAVTSDGDVFRAPRTRIMQYRHTRRELQAKGTRAARRRLARRRSREQRFMAWKNHNISKQIVNKADTIVFEDLTHIRPLGRGRTQNARRRNRWLHGWAFRQLQSFTTYKAVKAGKQAVFKNPTYTSQTCSRCGLLGSRYGDSFVCLHCGFSSDADFNASCMLRRLHVTQPHSSCDDASLHSGTVC

SEQ ID NO: 33506 - protein, 386 aa, Proteobacteria sp.
MIQRQLKLRLHPSQERHLHTWLFQLTGVWNWAIRTIEQDAKDGIYYTQKDFHNLLSHHGRKLGIPSHTLQGMLDTAYLAWARCFKKLAKKPRLKGQRNKLTSIPFPDPFKAPAGTHVLIPSLGHVRFHAQALPAGLLKSGRIIKRASGWSLCLCIDAPPNAIPPVAAGAIGIDPGFHTLLTLSTGEKRAHPHELRQTERRLGQAQRGDRARLVARLHERLANQRKDRNHTLSRRLVAENRVIVWSKDNATGLARAFGKSVASAAHAQLRGLLSSKCPASGRQFLAVPSRFSTKTCSACGSLSGPTGYAGLKVRQWSCAACGSAHDRDVNAAINTLHAGVGTPHERRRKAVPGIPWLEPWGGSTMVDTHAAASTVREQPQKIAPAPV

SEQ ID NO: 33507 - protein, 375 aa, Prevotellaceae sp.
MLKAYKYKIKPNTQQEELLSKFFGCTRFIYNWGLDMKTSAYKQNGKAIGYMQLAHELTKLKQDKEHQWLNECTTEALQQSLRCLDKAFTSFFRKKANYPRFKSKKRSTDSAKFINCVHFDFENWTVRLPKLGKVRMCKNRTFDQSVCKQGTCTVSRDHCGTYWCVITVDDLQPKPTKAKLDKDNAIGVDLGIKDYAILSDGTKFSNPKHLEKAQNKLAHLQKVFARKQKDSKNHESMRIKVAKCYRSITNKRNDFLHKLSTHLVSNYDTICLENLNVKGMEQNHHLARAIQGASWSEFVRQLEYKSEFYGKNVLFIGRFEPSSKLCHKCGYINQDLKLSDREWTCPVCGEKHDRDVNAAINIREIAFDKQNLVGV

SEQ ID NO: 33508 - protein, 380 aa, unknown
  TnpB Polypeptide
  misc_feature (340)..(364): Xaa can be any naturally occurring amino acid
MQIISSYGVELRKQNIPIRQTLEIYRSAVSYLIGIYVQVWEELAEIPDAKRRFNAAEHLVHTTKKNHACFDFDIRFPKMPSYLRRSAIRHALGTVSSYKTRLDLWEKTDGKSGKPGLVYENHAMPVFYRDVMYREGAEGKDEAYLKLYDGHDWKWFCVRLEHTDMEYLRKYWSGKKASAPTLEKRHQKYFLRFSYKEEVTLTKTPVKEQIICSVDLGINTDAVCTIMRADGTVLGRKFIDHPSEKDRMYCTLGRIRRSQREHGSAQTQGRWAYTKRLNTELGKKIAGAIVRYAEENHADVIVFEYLEMQGKISGKKKQKLHLWRKRDIQKCCEHQAHRKXXXXXXXXXXXXXXXXXXXXXXXXXRLEKPQPLYFSDRKTI

SEQ ID NO: 33509 - protein, 248 aa, Streptomyces sp.
VVAAAPVGVIADGPTEPVSRRWTFVYSLVWFGTVGIDLGLTHFAVLDDGPVIDSPRFLRRAEKKLKKAQRELSRKQKGSNNREKARLKAARAHAQVADARREFHHQLSPKLIRDNQAIGVEDLAAKGLARTRLAKSVHDAGWAQFVHMLECKAVRYGRTLVKIGRFEPTSHVGAACGAKDGPKPLHIRTWTCVACGVVHDRDHNAAKNVRTAAGLAVTACGAQVRPGLVPAQRDGAGSHGFPSEDCAA

SEQ ID NO: 33510 - protein, 397 aa, unknown
  TnpB Polypeptide
MLMSKKIRLEVSEQDAATLEFMQGKCRALYNWWVMRLRNGEKWPGWEEAKKTLQESKAYDPELHFVYGKLLQEVYFRLDGAMKAFFRRVKNGEKPGFPRVRPRHNFFTLIYPAMYLKVEGKSIRLPTGGRGKNKRYPDVVAALTEEAPNGYREVAISRDGQGHYYASFVHEVKQETGEREGVLALDLGIKTLAVGVNEQGRVYHIGGFKGNAWYNKQLDKLRSKRARCKKGSRRYRHLSQVYKRVSQKKRNKQQDSLHKASHLIGHKTVERTIVLGDLSQRQMVMQQHKERNKHLNRAVYNDWGLYTFMQMLAYKCVLYGKELVIVDERDTSKTCSACGNKQHMPLWKRTYRCKECGLIMDRDENSAVNILMRFLARRGPHVADATRCAEVFTATDM

SEQ ID NO: 33511 - protein, 380 aa, unknown
  TnpB Polypeptide
VNRHCLKIRLYPTRTQTRELEETLETCRLVYNSLVLDRKYQYDVDGQSVGYFQQKAYLPVWKKDHPELKEVYSQVLQDVAHRVHLAFDAFFDRVKKGEGKIERTPGFPRLKGAGQYDSLTYTQGKNFKVGDSTIELPKFGKIKAKIHRRPWGVLKTCTLHRVNGKWFACICQEIEPELLPPSEEAIGIDVGLKTFAALSDGAFIENPRFFRKDEKALAKAQRKLSKQKRGSRERRKARKVVSRIHERIRNRRHDFCHQNARRIVNRFGVIGVEKLSVKNMLGNPCLAKSISDAAWSQFRSILTSKAESAGREVIAVNPAYTSQDCSGCGYRPDGLEGRTKKKLSDRWHLCPMCGLSVDRDTNAAVNILALGQQSLATVVA

SEQ ID NO: 33512 - protein, 397 aa, unknown
  TnpB Polypeptide
MEQLLTIVCKLKPMPEQVAQIEATLQAFATACNYANSVVKSQTTSKTTIQNLVYQELRSLFGLSANLAVRACARVGANRKTAKLQGKPVKAFKPTSADYDARIFAFREKDCTVSLTLMNGRYHIKMNLGQYQTGKLKGKKPTSAQLCKHRDGSYYIHIQVKDTPPDPIKSNQVIGVDIGRTDIAVTSEGEKWSGKQITSVRDRYSRTRASLQSKATKGTRSTRRRCRQILQRLSGNERRFQTHQNHVISKTIINQALASNAMVAIEDLTGIRDRTNQMPRSKTERRRSNSWAFYQLRQFLEYKGLGAGVGVIAINPRYTSQTCHKCLHIHPIRGESYRKGKGFKCGHCGWHGDADLNGAMMIKLLGSSVNRPEGSKLFCSLRAVESPYHSCTQLGGG

SEQ ID NO: 33513 - protein, 397 aa, unknown
  TnpB Polypeptide
MRMFQYRLYPSTKQQTRLYHAFDVCKETYNLLLELNISTYKDTGKGVTKFDFNKHLKGEYPEVFSQVVQNVSDRVSKSFKNFFRRVKEGAKEKGFPRFKSRVYSITYPQKGFKFKSERRLYCSKIGSIPIVLHRPPKGKVKTLTIKRNHACQWFAVFACEVEPKNVKHKGENVGIDVGITPFATLSDETAIKNPRHLLKSENRLRKLQQSLSRKKKGSNNRKKARFKVARCHQGIVDQRNDFLHKLTYKLTKKYKLISIEDLKIKNMVKNHHLSKHIHDVSWSRFADMLSYKAVTCGGEVVKVNPRNTSKTCNNCGHIQDMPLNKRMFKCESCGVNVNRDLNASRNIEDRGGQLRISTSVDTRPPHQHSVGASHVVEAETIHNPSISTKCLRVGGSP

SEQ ID NO: 33514 - protein, 256 aa, Peptococcus sp.
LEKAIKLPKIGRVKAVIHRKAKPNWSLKSATISQDRDGKFYASVLYEYESHIIPIPVSDNAVGLDYVSSGLYVDDKGNVGSNHKYYRENHEKLAKAQRKISRMQGAKKGEEKSNNYMKQLIKINKIHRHIANQRLDNLHKLSTEIANQYDIVCVESLNMQAMSNKGFGNGRATLDNGYGMFLNMLAYKLSDRGKHFVKVDKWFPSSQICHACGRRHPELKNISIRTIMCSCGLIMSRDQNAALNIKIEGLCLLKMA

SEQ ID NO: 33515 - protein, 470 aa, Cyanobacteria sp.
MLTLTYEYRLEPNQQQIEMIEHTLSVCRSVWNFALRERKDWHNSRKSPINACSILQEYIIPFDEPYPNYHKQAKALTEAKKTDERLKSVNAQVLQQVLRTLDRAFANMKAKGLGFPRFKNRYRLRSYVYPQLGKEVVKGNFVKLPQLGWVRLRKSREIPNGFQVKQARIVRKASGYFVMLSLQLDVDVPQPFPHGHARGLDLGFDKFVATSDGLEIKRPRFLKSLQRKLKLLQRRLKNKPKGCGRHLHCVASLLAPGCFPAGIEFQQGRQSNNRHKLNRKIARLHQRISDTRKDWHFQLAHQLCDGAGMIFVEDINFRTWQRGMLSKHSADAAFGKFVNILQWVCWKRDVYFAKVDKDGTSQECSQCGAHTGKKTLDVRVHHCPECGYVGSRDVVSAEVIRNRGLTQARVSRALESRPEGTSALGQGVDVKQNALGDGLTGTEETLSSQVSEKKENLIVRLGISHYSRQV

SEQ ID NO: 33516 - protein, 383 aa, Anaerotruncus sp.
MSLRRTKHTSKTKDRVAYKFRLGALSPAQEEYFAKTFGAVRWLYNRMLADKINAWQNFRENLQLTPAWYKGLSCCPWLKEVDSLALANAQINLDQSFHRFFNHESGHPKFKKKADHHDSYTTNHASVHWENGKLYLSLPKMEEEVRVINHRSIKRGGVLKSAAISRDPSGKYYVSLLYEYAKEPVVHDIDPDNAIGLDMSMHGLYVDSEQRHIDEPEWYRKAEARLAREQRKLSHMKKGSSNYQKQRRKVAKLYSKTKNQRTDFLHKLSNDLTNVYDIIGIEDLNMRAMAQSLNYGKSVGDKGWGAFTAMLAYKAERKGKKLIRVDKWFPSSQMCHECGSLYKKTRDLSIRDWTCPVCGHRHDRDENAALNIKTEAVRVYCTC

SEQ ID NO: 33517 - protein, 450 aa, Anaerotruncus sp.
MQVVGSYSVHVRDDHEALKRTADLFSDAVSHLVHTALSNWNNLSDTDSSFARLRMMECIIHSSDGFVSPDSFDHKFPKFPSYYRRAAIMQALGIVSAYQSALKNWKANGSKGEAPKLDSCKHRMPALYRGNTYKPVIDEQTGEVMPYAAKIKVFRNHDWVWDTVRLSKTDIDYLDKRGRSGDISAPVLEKKHGCWKLRFAVTETVELSAKPVSEQKICAVDLGVNTDAVCSVMDSKGTVLAHKFIMRGREKDSLSNALHRVSVFQSLHGSHDSGRLWNIAKRRNRNLAHQIAREIVNFAIANECDVIVMEHLDTKGRKRGSKKQKLAMWKHADIQKTVESLAHHYGFRISHVNAYGTSRLAYDGTGRVKRGREVSEDTPYDVCVFKSGKIYNCDLSASYNIGARYFIRGLLMESPDLMTKVSGIGSGTQRTLADLWKISRVLCPLLSATV

SEQ ID NO: 33518 - protein, 375 aa, unknown
  TnpB Polypeptide
VKVTRIACSASLNAGKHARLEEQARRLGRVRSKVWREYGSVSGAGVTDRTIRDRWMADGTANAFGVLANAWKETVRDAAGDVRASRESAKVKVRRAVFRRTADPAERKRLCAALKAEEWAGVPYLSRLMRKHWRRGRSKVANQIVVRADNYRTFALAEGGDVWLAIPGLLPRETVKIPLNTTVAPSGTLRLILRGGKVEVRYQVDGSSLKSSARPPGARSIGVDKGYTEVVTDSDGVHHGPGLGILLSAESDWTKGLTAEALKSVPERRGSALVLVNAAYTSQADPRTGALGVRRGDRLYCPGGDVYQADHAAAINILQRASDPDITLFTPHTRVRQILRERADRQRARLPAPDSSPAARGGERNILTCSGASNE

SEQ ID NO: 33519 - protein, 387 aa, unknown
  TnpB Polypeptide
MRKLLKSFKTEINPTEEQKAKIRKTIGTCRYIYNFYLAHNKELYNKGEKFMSSNQFRVWLNNEYLPKHPECFWIKEAYSKAVTQAVNNGQAAFTRFFKHQNSFPRFKKKNRSDVKMYFVKNNPKDCRCQRHRINIPSLGWVRIKEKGYIPTTKDGYVIKSGHVSIKADRYYVSALVEIPNNKIANSFNEGIGIDLGIKDFAIVSNGKTYKNINRSVRLKKLGKQLIREQKNLSRKYENLKKGESTQKANIQKQRLKVQKLHHKIDNIRTDHINKTIAEIVKTKPSYITIEDLNISGMMKNKHLSKAVASQKFYEFRIKLQAKCNENGIELRVVDRWYPSSKTCHCCGAIKKDLKLSDRIFKCDCGYTEDRDFNAALNLRDATTYEIA

SEQ ID NO: 33520 - protein, 393 aa, unknown
  TnpB Polypeptide
MLEECRWVYNQALAVRRNAWKEQGKSLSYYYTCKLLPQWKKERPSLNIVYSQVLQDVLRRVDEAFKGFFRRVKNSEKPGYPRFKGKGRYRSITYPQFGFGITDERKLHLAKVGDVKIKLHRPVEGKIKQVTIRRYPTEKWFACFACEVSLEPLPPSQKAIGIDVGISCFATLSNGERIQNPNFFQKEEKALAKAQRRLSKCEKGTSEFRKAKRVVQRVHERIRNKRDDFLHKLSLRLVQNFGIICLEGLNVKGMLKNHHLAKAISDASWHRFFHFVLYKAERAGRVCVLVPPRNTSKTCSRCGTVQEMTLSERVFNCFCCGLFLDRDLNAAVNILRVGLHSLGKSPRSSPLYRGEQSRNLCYNNKDRTSQYFETRYLVPLLHPIYWSRGFSRI

SEQ ID NO: 33521 - protein, 368 aa, unknown
  TnpB Polypeptide
LDKRSYWHPHSSENSNESLQSSSEKSVRNSKEHPIQSKDNDLILYGLNHKVKFCRMVRRKINGRNRFYLQLILEGTPYQNPERKIGSEEIGLDVGVGTIAIVGDTKAELKQFCSELIPNQKAKRKLQRKLDRSIRATNPNNYNENGTVKKGSKKWIKSNRYKATSNELAETDRKLVACRKSLHGKDINEIIAMGTRIQTEDISYKAWQKMFGKSIQIRAPSMFMSSLKRKAENAGGYIREFPTQTTKLSQICHICGEAVKKPLSQRWHVCCEIEMQRDLYSAFLAKCIDIRTSSLDIARAQLLWQGLEPVLSEAVSRAYKTAISGRNPASFGFNRIQSQSSSLVKPATIVSEAMDVVIQMDESHRELI

SEQ ID NO: 33522 - protein, 386 aa, Streptomyces sp.
MKIVVLVKLTPDAAQAPAVERTLHAANEAACWVSAVSFEYFGLKGSVRELRKLCYGELKVRGFGAQAAQHIIKRVADAYTTLRANIKAGNLGPEQSKRRRKAESKPIAFRPDAAHTYDDRCLSWNYDAQTVSIWTLDGRIKNVRFTCSPKALKQLTESRKGESDLIQRDGKLFLVATIDLPAPEVFEPKDWIGVDRGITNLATTSDADNYSGRRLGRYRRWQARKKAEIQARCTRSSKQLLKKRARRETRHATHVNHKISKTVVAVAQRTERGIALEELRGIRERVTVRRDQRARQSSWPFHQLGAFVEYKAHRAGVPFIEVDPAYTSQRCPRCGHTERGNRPTRDHFSCRRCGLAGPADHVAGVNVRARARSAWVFVNMPDPEPA

SEQ ID NO: 33523 - protein, 269 aa, Oscillatoriales sp.
LQATTLNLTTAYKNFFAGRARFPRYKSKHRKQSIQYPQNVKVLEGIVQFPGKVGKVKAKLHRNIEGTIKTVTISRDPSGKYFASILTESEGENPALSTEGKVIGIDLGLTHFAIASNGCKISKYDNPRHLARHEKNLKRKQQKLAKKQKGSNSRRKARKIVAKVYERVANSRQDFLHKLSRKLVNENQVVVVENLNVKGMVRNHNLAKAISDVSWGTFTNLLGYKLEKKGGKLVEIDRWFPSSKLCSNCYYQIDKLPLNMRRMEQPFLL

SEQ ID NO: 33524 - protein, 412 aa, unknown
  TnpB Polypeptide
MSIVSCQYRIYPNASQRQSLIDHFGCARWVYNRYLSEANDCYQATGKAMRRNDFIVRLVHLKKDYPWLKEVNSQSLQMAARNADRAFVNFFEKRAKRPQFKSKHTGRQSFQCPQHCKVLFPEIGTKGHIVLPKIGAVKAILHRRFNGTVKTVTVVHEPSGKYYASVLVDDGQTALAPDTIDFEHTAGIDAGIKTAFTVVSQDGAEKIDSPSFLKKNSDQLKKQQKRLSRCKRTVTFKENEKGEKVKEVTVSKRYEKVRQELARTHERIRHRRKDWIDQVTRRLVNDSQVTTYVIEDLNLKGMVKNHHLARAISDVGIANFYRALRYKLDAAGKNLVVAGRWFPSSKLCPECGAKKENLTLGERQWSCAHCGHEHDRDEAAAKNLRHWVKLTEKEKHRYGRNGRALEREAIPF

SEQ ID NO: 33525 - protein, 289 aa, unknown
  TnpB Polypeptide
MKTLKLRIKDKHANQLNKLSGAVNFVWNYVNDLSFKHLQRTGHFFSAYDIAAYTKGSGEFLNLHSQTLQAITETHAKSRKQFKKAKLNWRTNNPKAKRKSLGWIPFKKSAIKYLGVKKAGKKSLKSTIQFSLAKGRNLTIDVWDSYNLALYTINTCELVQDSRGLWYACVTVKEHSNIECGYGETGIDLGCKDSATTSDGDTLVTKLTHKYASKLGIAQRAKNKKRVKAIHAKIKNTRQHLIHAFTSKLVKDNNVIIVGKLQSKSFTSTKLAKSVYDASWFEVKRHERG

SEQ ID NO: 33526 - protein, 460 aa, Anaerolineales sp.
  misc_feature (379)..(459): Xaa can be any naturally occurring amino acid
VIRTYRYRLYPTKAQARTLDFLLWQGRTLYNAALEQRITVYKERGKGVSYYQQWAYFRDLRNANPDTLGQLNATSVQQMLRRLDKAFVAFFRRVKAGETPGFPRFKGRDRLRSLEYRHGDGCKLRMGERVMLYIQNVGEVKVKYHRPLPDDAAIKHVVIKRRAHRWYACLMLDLPDPVVPEHRGPVVGVDMGLSHLLALSDGTLVENPRWLRRSLAQLRVAQRRLSRRQKGSARRRKAAAQVARLHERLANQRRDFWHKLTRQLADTYSLIALEDLTLAFMTANHHLALSAHDAGLAEFQHLLAYKAEEAGTQVVTVKPAYTSQACSACGVVVKKDLSVRVHVCPDCGLTLDRDVNAARNILMLAVNSARTGPPERNVXXXXXXXXXXXXXXXXXXXXXXXXXXXXXXXXXXXXXXXXXXXXXXXXXXXXXXXXXXXXXXXXXXXXXXXXXXXXXXXXXL

SEQ ID NO: 33527 - protein, 378 aa, unknown
  TnpB Polypeptide
MFRRMVNESIRIGLAYNVYSLRNLSLLSYNQLAQFDSPSCYKLCAISRAAGILAARNKSVKRGFPTKTPYAVRQQLVSCYGFKRNNEGLEIPVSRGKRLSIPLTKHTLDVISQPGVKVRSFTLSRNKLNLCISRDVVLVECASTVGVDRNLRNLTAGNDQQIRHYDLSETVRIARTTVRIIASLRRDDTKIRTRIASKYGGRRTSRTGHLLHNPTKAIVALAMQQKEAIVLENIEGIRSLYRKGNGQTRKYRGRMNGWSFGEAQRQIEYKARWVGLPVIRLSRRETRGSSVSCPRCGERLQSDKRLKRNLWCSNCRVVMDRDRVAAINLARRGRVRFARSRPPIIEAQGGAVEAVKGNPTPTVIPGVDAPKLTQSTKS

SEQ ID NO: 33528 - protein, 384 aa, Bacteroidetes sp.
MLRAIKYELNPTKAQKTLIKQSCGCCRKVYNVMLDRKIGAYKKDGTTLSAFELINQLPKLKSELEYLKECPSQALQQVIKNLDKAYQNFFRKGGNGYPKFKKKGIKDSFRIPVACAIDYDNWTVKTAKIGTIKIYKGHNKQIKGTIKSYTITHTNTGKYFISVLYETMDKPKLNNNKSVGIDIGIKDFATLSDGTVFENQKHLKSNLKKLRVLQRTASRRYQKNKKREEQSNNWKKSVRQVAKLHERITFQRNDYLHKISTWIANNYSIICIETLNVKGMMKNYHLAQAISDCGWSKFVNMLEYKCDNLVKIDKWFASSQTCFECGYKNTNIKDLSIREWTCPVCGTYHNRDLNAAKNIEREGLSLCGHKVSGCTMLAPRTPPL

SEQ ID NO: 33529 - protein, 422 aa, unknown
  TnpB Polypeptide
MTDKKPKKRTYKDRTNLLSLTERHVITENHPLFQECDALCFLSKNLYNATLYAQRQSFFAGNFENYYQVNLQFTKENQVDYRRLPAKVSKQVQMLVNSNFNSFFALLKKKQAGEIDSPVRLPRYLAKDGRQVLNYEKGALSIKDCDGSRFIKLSKTDIVVKSAIPKEQITNVRIVPRGNHYVIEVVYDVVKPAITPTLSRVAFADPGMNNLLAVTSNVFSPVLYNGRPIKAFNQLYNKELAHALSKLPDEQTWSKRTASITHKRNMRIHDLFHKITTDLVNYLVENDIDTLIVGHNVGQKQNINLGRKTNQNFVSIPFGKLRSMLSYKCERVGIRYVETEEAHTSKCSFIDRETIEHHNTYIGKRVKRGLFIGSDGKGINADVNGSLNIGRKYLEALTLYTDGLHTELLNHLHNPKVRTIRP

SEQ ID NO: 33530 - protein, 444 aa, unknown
  TnpB Polypeptide
MRITSSYKMKLTGDLKALETSINLYRDALRMLIPIINNNWETLSEYEFANQKYNCIEKWIHNTQTNQALYDFNGQFPKFPSYLRRSVIAQALGIVSSYRSNLANWEKEPKGQAPQLSLNHYAYPAYYKNNLFRNFDPIRQAIELKVFKNGDWVYETYKLKTSDCTYYQTYLTGKKQNVPIIQKKGRRFYATFSYEEEVSLVKEESISKICAVDLGLNTDATCTIMGQDGTVYARTFISFSKEHDRLDTQLGRIKRNQKRGSRHNKRLWRGVAGISQDIADKTVKAILDFGNEHGVDVFVLEYLDFKGKNIVKRAHFWRYKRIYKVLAQRAHQYGLRIARVNARYTSRLAFDGSGWSKRGREIAPETPYALMEFPTGKTYNADLNASYNIGARFFIRHLLKTVTATQRLALEAKVPQVAKRSTCTLSDLINLRSELAVLTARTQA

SEQ ID NO: 33531 - protein, 514 aa, unknown
  TnpB Polypeptide
MRAQTPSYVVSTKVQLPESITKRLEKSLRISNSAYNEALSFGLKRFEALKQNSHYQELLEARRLAKAGINKLKKAKKKAKGLVQQVKCYDKALFELRKAYSLTKFELQKYLGQQRRKPDSPYRQIAACEIQVIAEQAYQTLEKVLFYQIKPHKVRFRSKFDFDASYRNRTNKDATRLVPSDKKGIAYRLYIHKASTFVDIPTKAFNKYQQMSLMRSEKIKYVQIIQKTIRGKKVYYLQIVCQGFPPSKATKGEGVVGIDPGISTVAFASPSEVALVDLVPTTITQKEKLLKRLDQKIERSRRVNNPECYDERGKIKKGARFKRPSNRQLRLRNRRRRVYRSLSEERKKLQGQLVSRIVSQASIIKIEDLNTKGLQKRSRDIRINPKTNRPYSKKRFGKAIFRAAPSAFRTALETRASQLGIEVEVISPKDVKPSQYNHITQTFEKKPLSTRVYDLSDNYPGVQRDLYSAFLIGHIEKGHYQQEQLNQDFPDFYNQMKDFLQQPIETERLAWYLN

SEQ ID NO: 33532 - protein, 210 aa, unknown
  TnpB Polypeptide
IRSVKSHRYQVYISSCKEPIPKKRCANKDTSLLQVWRETGNRVQPLLHSVSKRIVEDAKTRRYGIVMEKLTGMRRLYRRGNGQSRNRRARMNGWSYGELQLQIEYKARWEGVKVIYVPARDTSKRCSICGYKTLESTQRLLWCPHCGAILDRDENAARNIAARGLRFSPNGPPGEAMVEEQEPENATLILKVDGGKLSQQATTTIHPTKT

SEQ ID NO: 33533 - protein, 390 aa, unknown
  TnpB Polypeptide
MAVRKVAQRIPFTPSKTQAALLEQCFGARRFAYNRQVEAFNSYDKEANPRPKYPGVTDMKGANEWLRDSPVPSNALGNAIQDFRRAQAAYFRQAQYGKNRPRFASKNDSVQSFRNTMPMRHVDGNRYPLSRKLGSVRIRRRDRIRYPLESLSSWTVKRENGVYYLVLLFNVDVQPKPPVSGEVGIDVGVKDFLTLSTGEKINYPDRLRQLEEKARREQRKLSRRVKDSSNYRKQKKAVAKAYAKLRHFRENFQRQVSHRLIEDNQFIGVETLAVQNMTRRAKKKLDENGKPTRNGQSAKRVMNRSILRNGWSSFAEKLAYKAQWYGRTFVQVDKFYPSSRLCNNCGHKCGGLLLSEREWVCESCCASHDRDVNAALNILGEALRLSQVGK

SEQ ID NO: 33534 - protein, 429 aa, unknown
  TnpB Polypeptide
LSRAQERILLARLEAARQVYNACLGEARQRVRLVRESKAFQRARTLPRDDAARKMLFAQARAQHAFSDYALHAYVQPMGHTWLGDHLDSLTLQKRASRAYGAANRLLVGTARRVRFKGRHQLDTVEGKTNSSGIRWCGDHVEWKGLVLPARLDPRDPVLAHGLACPVKYVRLVRRKLGERSRFYAQLVCSGTPYRKPQHALGTGVIGLDLGPSTIAVVSAHDTLLRPFCPEVAPDAQALRRLERHLDRQRRANNPANYDERGRVKKGTKRWQISRRQCKVRARRREIHRRLAATRKRSHGQLAHRVLALGDTFQLEQLSYRAWQRTYGRSILLCAPGMFVERLSRLAGSAGGTIVAINPWRARLSQTCHCGRVKKKARSERWHTCPCGASAQRDLFSAFLARFVHPATSLLDAGRLHKVGQPRLRAGML

SEQ ID NO: 33535 - protein, 399 aa, Chloroflexi sp.
VRSSLTTTTTPLSREQRAHKTELDLTDWQVTACRKHAGAARWAYNWGLRVKQERYKATKTSPTAIDLHRELNVLKKTDVPWMYAVSKCAPQEALWNLDAAFAQFFRRCALKKQGKWQGKLGYPQLKTKKKGLGSFRLTGSIVVSDKTIVLPRLGRLRLKERKYLPTSDDVRILSATVSEQAGRWYVSVQVEKEQAVLQNTGPVVGIDLGVKSLATLSDGTVIPNPRHLKRLQRVVSRRQKGGKNRKKAGRRLAKLHRQIRNQRHNMLHQVTIRLAKTKSVLVIEDLHVAGMLKNHHLAQAIGDVGFYEFKRQLLYKASWYGARVILADRWEPSSKRCSGCGWLDADLTLSDRTFHCEQCGLVLDRDLNAAINLAKLAGSSSDSQNACRADSFTPVARLV

SEQ ID NO: 33536 - protein, 469 aa, Shewanella sp.
MLTGIKLRANPNEAQKQTLSQWMGCARVIWNGKVDEEKYHRTYARKYCAIGTYPPIDQKAAQFKSQELTPWLSDCPSQILRNSAVNWYQTYQKFMKGLCGRPRRKAKTDKGSVYLTRELFNFEHCYDGNIRLFIGTKTNNIGYLSFKTHREFEIPNSLYVRKERGQYYVSFCYEKGVNETSLSSNAEHLAFLQGAPREFLEQYTIGIDRGVAIPAQAGEQSFDFSANQKHHLSKADRYLQRLQRKLARQQKGSNRRTKTKRRISGYHGKKGNVRRDFNHQTSRALVNSHAKVFVFEALRTAQMTRRPNAKQDEAGHFLPNKAKQKAGLNKAILHSGWHMLESFTKYKAYQAGKAFFKISASYTSQECAVCGYIHPANRISQSLFVCGKCGNTDNADHNASLVIKKRAITLILDSGTELSAADVLTAAADIGRGGKRKAGRVKSSVSSSQRSVKKEKGATAGCALGSSLL

SEQ ID NO: 33537 - protein, 359 aa, Shewanella sp.
MNKKIHTKTLKVRVRDKHVKTLNAWAFAVNQVWNYCNELSHRAIKERQKWLSGYDLQDYTKGANKELGLNSATIQMIGHEYVTRRKQFKKAKLNWRKSRGAKRSLGWIPVRSDCISFKNGQIYHNRHYFKVWDSYSLSQYQFKSGSFNEDAQGRWYFNAVVEVKPEQSSGTASVGIDLGCKEAATDSNGHKVVGRQYRKLEQQLGIAQRANKKTRVKAIHAKICNRRKDDLHQYSRQLVDSNAAIFVGNVNSLGLTKTKLAKSVLDAGWGILKTMLEYKCAHAGVVFEVVNERYTTQICSCCGEIPASSPKGRAGLRIREWSCGSCGATHDRDVNAAKNILAAGHGRLAVGIPHYSQLV

SEQ ID NO: 33538 - protein, 414 aa, Planktothrix sp.
MYATQKNQLRRLSQQEFNALTVLCRLSKNLFNVALYECRQYFFTQRKRLTYESNYHICKSNENYRLLNTDIAQQTMKVVDRSMRSFLGLLQAISIGRCEQKPQLPKYLPKDGYFPLIIPRIKVKNGVFNIPMSQQFKQEYGEVKIPLPERLKDKKIKEVRIHPKYSARWFEIEYIYEDEKIETSVDSEKAIAIDLGVNNLAACFDTDGHQFLIDGKRLKSINHWYNKRNAQLQSAKDKQGIKGITNKQARLNQKRNDSIRDYLNKSARIIIDHCLTYQIGKLIVGYNPGIKQEINIGRSNNQNFVQIPFWQLRQKLKALCCRYGIEYGEQEESYSSKASFYDQDEIPIYNADNPSKQKFSGRRINRGLYRTKDRHLVSADINGSANILVKSKHRLDFERVSSGFLANPLRIYVS

SEQ ID NO: 33539 - protein, 353 aa, Thiothrix sp.
MKTLKLRIKDKHTQTLNHLATEVNFVWNYVNDLCFTHLKRTGQFFSAYDVARYTAGASKELNLHSQTIQAVTEELMTRRKQFKKAKLNWRVSNKQSSRRSLGWIPFKKSAVRYGNGFVQYAKTAFKLWDSYGLDQYHVKTGCFVEDARGRWYVCLVVDNAPKLESKGTESISVDLGLKDLATLSNGQKLKSSKYYRRDEQKLGIAQRARKKKRVRAIHAKIKNTRQNQLHQFSTELVKAYAAIVVGDVSSKALAKTKLAKSVLDAGWSSFKTLLCYKCENAGVWFEEVSERYTTQTCSCCGNTSANSPKGRAGLGIREWTCPECGAVHDRDINAARNILALGHERLAAGILAI

SEQ ID NO: 33540 - protein, 326 aa, unknown
  TnpB Polypeptide
MRLEKSTDTVMPYVITISDPTGGKRIAVPIDTSRHSLHKIEANRLGGTVMLQMRGPVLRIGWSYTVKREKPAVDTYIGVDTGITDALYASDGRHVGSMKRVIDFYHEEVETAFAELSDQRNKKRKICHYLHSHDLSEDVRRSLIQKVDQLEHMMQTMEVPYRKKRHYYQMLDQEIKKAVSSYLNDLAKNTMTVLEKLDIREFNKSKKANGKLSMFARGKLQQKLMITLNWKGYDFMEVVPDFTSQVCPVCGNLDADNRKDKAFKCTCCGHEDDADHNASVNIKERANDKEILAVSKKYEYQHKKLQEALRQIYADRCSAYKKAASI

SEQ ID NO: 33541 - protein, 334 aa, unknown
  TnpB Polypeptide
MSTNNPLISIAHKIELMPNNKAKTHFRKAFGCARVTYNWGLDRWEYYYKQGIDKTYLDLKKEFNAIKKTQFPFVYEVSKYATQQPFIHLNRAFQKFFRDLEQGKVSYPKFKKKKMNSGSYYIGGDQVVIKDEKYLKVPNLGLVKMREKLRFEGKINSVTISQKGDKFFASFNMQISKDEYIKTHPKAQKNQLGLGIDLGLKSFLSLSNGLEVKAPKPLDRLERLLVRRSRQLSKKHHAKTKQEALQGVKRSKNYQKASIKLNKLYRRIANIRGDFLHKTTSCLVKNVQYFCLEDLNVQGMMRNHRLAKAISDVSFSEFKRQLEYKAKYNDKTIY

SEQ ID NO: 33542 - protein, 417 aa, unknown
  TnpB Polypeptide
MLRAHKIRLDPNQAQAEHFARACGVARFSWNWALDQWQKQYQACKADPSLPKPTEGALRRQLNAIKKVEFPWMQEVTKCAPQEAIIALGQAYQNWFKSLSGKRKGPALRAPQFKKKGRNDRFKIHGTQLSIDGSRIRIPKLGWVRMREPLRFAGRVVGATVSRTAHAWHVALLVDTDDQPDRTENQRAVGVDVGISTLATLSTGEQFDGPKALGGLIQRLRRLSRAHSRKVKGSSNRKRSARRLARLHWRIANVRSNALHQLTHRLTRDYAWVAIEDLNVRGMMANGRLARHLADASFGEFRRQLTYKAAQRGVSLAVVDRFYPSSKTCSACGAVNGALTLADRSWQCPTCGEHHQRDHNAAVNILAESIRAAQMDSPAKTDQATAGAAGIACGEEGADAHREMLVKPASMKQEVQA

SEQ ID NO: 33543 - protein, 498 aa, Cyanobacteria sp.
MAKSTTPSFITTVPLIVTSSDEAQLRSRFQAGRQLYNALLGEAMARARLVQKSSHYQLAKTLPKGKARTEAFALSRKQYRYSEYDLQAYATVVANRSKWIAEKVDSNTQQKLATRAFQASEKVLLGRAKKVRFKPPSRFRSVEGKTNKQGIRWVGEQLVWGKLRLTAAIDKTNPVMMHGLTSEIKYVRILWREIKGHRRWYVQLINKGLPYQKPANFVTPGVVGVDLNISNVAYAANSNAGLLPFADKVPTYEREISALQRQMQRSQRQLNPNNYEPDFLGRKGRKNVAKKGKHKKGHRQWNKSKRYHRLATKKRELERRKSAYTKSQNRRLVNEILRSGNQIKIEKVSVKGWQKIWGKAIKAKSPGLFQSELKRKAEIAGGSFYQFSTTKTALSQTHLTGERLKKSLSERVHYDQSGAVMHRDLMSAFFCRHVYDDALSLQDAQLEYPRMETTLLRAWQQYQSSANRVSAPESQCSHSPAEPIRSYLERSSQIASRL

SEQ ID NO: 33544 - protein, 414 aa, Calothrix sp.
MEKAYCYRFYPTTEQEQILRRTIGCVRLVFNKALAARTEAWYERQQKVDYVQSSAMLTQWKKLEDLQFLNEVSCVPLQQSLRQLQSAFTNFFAGRAKYPNFKNKRSGGSAEFTKSAFRWKDGQVYLAKCSEPLPIKWSRQLPNRCEPSTITVRLEPSGRWFVSLRIDDPTDETMRPVDSAVGLDVGVSSLVTLSTGEKIANPKAFDKHYQKLRKAQKSLSRKHKASRNRDKARLKVARLQAKISDARIDHLHKLTTRLIRENQTIVVEDLAVKNMVSQRVGRVSRLEATGEPVRVNNPKLARAISDAAWGELVRQLEYKALWYGRNLVKIDRWFPSSKRCGNCGHIVDKLPLSIREWDCPNCGTHHDRDINAAKNILAVGHTVAVCGASVRPHRHKSKGLLRKSSNGKKQKPKS

SEQ ID NO: 33545 - protein, 167 aa, Sulfolobus sp.
MLRYKKILKVINYNQSGFKVEGDKLILSKIGSVKVLFHRPLEGRVKGVLIVKNATGWYAVFQTEVEKKPMPSNGRRVGVDVGVEKLVTTSDGIVIENPKVFDKIEKKIRLVQRILSRKKKGSKNYEKTRVKLAKLHEHAKNVMNDYIHKITKWLVEQYDEIYVEDLN

SEQ ID NO: 33546 - protein, 422 aa, Sulfolobus sp.
MKRSNIVKLFIDKETKKRLLGLLEVYRACWNTVNYLRMQQFKNHEKVDFVKTEKETYEKFKQILKVNAQQVTRKNTEAWRSFFSLIKEKRQNKSLKPRPPGYWTRGIILVRNDRYTIDEEERVIYLKDFKMRLKYSGKLKWRGKQGRLEIHYDEVRRLFYATIPIEVEDVKLKESGLKASIDLGIVNLATVFIENGKWFLFRGGSVLSQYEYYSKKIVITQKKLAIHKQNRSRRLSMLYKKRSLFMRHVINSLARRVMDILNKEGVSEVRVGYPKEIAKQHGNKLTVNFWRYNIIIQRLKEVGEELGIKVIEVSEAYTSKICSLCGEIHPHGRVHRGLFRCPHTRKVINADLNGAINILHSPESQGSSYRGIGVIGLKTQPVVYRWTNGAGWRDFPSTSYEVMRVKAVNHKPMNRSKGTPVL

SEQ ID NO: 33547 - protein, 401 aa, Brasilonema sp.
MAELTFTLKLPFYRLNQTKALEFERLTVVNTQVANDLLCIDKKERKRLTSSAFQHVEIGSAWINQTIRNTNAKTNVKHIARMWLETNNQNFEISKQGDLYTVAFNLLRGRKGRIPLSVHCASHSQVLDKIMQETAKLGSLKLCKSKAGIWYALISVSMEVPDAMSVEHWIGVDRGQNNIAVAALAKSFGKFWKGGRVKGFRRQFQRTRRKLQSAKQLKEVKRLEQRERRIMTHINHVISKQLVQFAQDFGMGLRFEDLSGCRQTMRQNKKTKSDAGNNRDAWAFYQLEMFTRYKAIRLGIPVQSVPAPYTSKSDHRNGVIGKRNRDWFKGFDGYRCNADWNASQNIGQWLGFSCPLDLWRYRATLRYQNAVAAMATVDTEGGVDDSPLTSKTSNAVARAPH

SEQ ID NO: 33548 - protein, 352 aa, unknown
  TnpB Polypeptide
MVRIKYGSPACVSNHVPVARVSSPVLASLSSAIQFLARFPLVRSACVRYLCTDATTGNSCMSVLLVCHLHRNRIWFAFQVGEKREHLLAYAHGQADLKRYGKAWFLFQTLDVPEAELQETTNHLGVDVGICTVASSNDGKQTLRFPGEQIRRVRSHHHQLRRGLQRHKTKSSRRRVRKLRDKESRTVRTYNHLISRRIIQQAQRTNSTKSSEGKEDLDCTEGASMIVLEALEGIREGVKVHRSQRRERFSWAYAQLQQMIIYKAKLAGIAVLFVPPDYTSKTCSKCHHMSDQNRPTQAWFKCVHCGFCGHADDNAAMNIRFLGAESTCHKRTVWMQEYLHTERRKPLRFSQG

SEQ ID NO: 33549 - protein, 380 aa, unknown
  TnpB Polypeptide
  misc_feature (136)..(136): Xaa can be any naturally occurring amino acid
  misc_feature (149)..(149): Xaa can be any naturally occurring amino acid
  misc_feature (229)..(229): Xaa can be any naturally occurring amino acid
  misc_feature (337)..(337): Xaa can be any naturally occurring amino acid
MLLSYRFRIYPSKAVQAKLQEYMELCCWLYNRLLEELNRAREEGRKLKQADTQALIVRLKREENPSLNGVYSKVLQMVNHQLWGNIRALSQLKKNGRRVGKLRFKGSGWFKTLNYNQSGFRLEGNRLVLSKIGEIXIKLHRRIKGKVKXVVIKRERSGRWYAIFQVEENPDPLPSTRRAVGLDVGIRHFLTDSDGRQVENPRYYERTLQRIRILQRNLSRKQRGSQNWXKARVKLARAYEKLVNQRDDFLHKLSRFYVNNYDLIVVEDLAIQNMARNGNLGQKILDASWGRFFQMLLYKAARAGRAVVKVDPRGTSKEGDKRLDRDYRASLNILRRXLVGPGRPEVTPVERRPLLCIPALAVVAGQVFSVKQEAPCVSEG

SEQ ID NO: 33550 - protein, 443 aa, unknown
  TnpB Polypeptide
LVAARVGAGATRRPAIKNLRRGRPVFSREGNAEQCPATINNAKTRRIWYTYGMDRTLRVCLQPTPEQAALLAETTRQFTAVFNAVCASGYARGEKNGVALHHATYRPLKDDYPALVSDHHIQARVKATEAIKSALTLAKQGRKVSAPRSRSCPPRYNVHTFKADWVAGSVRLSTTGGRITVPFVVPAYAAPYVGAKTCTADLIHRDGTWFLHIVVDFPAPEVAHADDVIGVDLGVAQPAVTSDNRFLGKRAWRNTENRYFKQRRALQARGSKSARRHLRKVRGKQARFRRDCDHVLSKRIVRGTVPGATIVVENLTGIRARVRTRRGKQARRVHGWSFAQLRSFIEYKAESRGCTVVGVDPRHTSQACPRCGHTARNNRRTRALFVCRSCDYSLHSDLIGARNIAAKYRDTFGIPVGVGRPVNPPTVSDSGTLPGAPGPSSRV

SEQ ID NO: 33551 - protein, 395 aa, unknown
  TnpB Polypeptide
MQTVLDSLCDYRRYCWNQGLELWNTLYEQRLVGLPDELRAKIKASLTDKTIEFSEEEQALRALFPAPSVYVVQNELVAQKADWQYELSARVLLRAIKDLANAWNLHFNSPKTTNKPGFQSRKKLKQGFKTDRARVINGRLVLDKPHAYKGGWSSIRFKGASIPDGNLKFCAVTRTKGKYIATITMDVETATLPKTGKKTAVDANVDHFDTTEGQTSLKPESLDRLYEQVRTYQRQLARKRKVNKNYRHSKGYQATRAKLQATYERIRNVQNDLLHKFTTDLYHQFDTVVIEDLDVKGMQMKKKAKNLHRSLFGRFRQFMEYKAEKFGKTLIIADRFYPSTQRCSNCGYVKTGDEKITLSGNQKHGTKHHEYICYQCGYEDDRDHNAVLNLLALAK

SEQ ID NO: 33552 - protein, 266 aa, Synechococcus sp.
LAYPATWHNRYADGWYLPARLPARKNRPVKAFKAGFVTYAARIFSFRAKDWTVSLTTVEGRERLELSIGNYQRGMLAGTNPQSATVVKRKEGSYSIQICVEHDLPEPQNTAKVMGVDLGRKDIAHTSEGDNWHGQPLNQVRDHYFWLRAILQQKASQGRRSSRRRCRELLQRLSGQERRLQTWVNPCISKAIVSRAKATDSTIAWADLTGIRERVNSQPRNKTERRRSNSWAFYQLRQFVYYKALRAGVKVVVGRRLQRSVSISEA

SEQ ID NO: 33553 - protein, 401 aa, Synechococcus sp.
MLLGFCTRLELNNRQKTLAAQHAGVARHAYNWGLAICKQAVESKQKLPTAIDLHKRLVAEVKKENPWYYQVSKCAPQQALRNLEQAFKRWRSGLGKFPRFKRKGVRDSFYLEGSIRISGDRIKVPILGWLRCAELLPTATPKNVVISLRAGHWYVSFKYEAPAPQVEKTGEVVGVDLGINRLATCSDGEVFENPKPYYKAKKRLARLQRRLSRKQKGSANRKKAVAQLAKAHKRVADIRQDNLHKLTTYLAKKYRVVVIEDLQVKNLLKNHKLAGALSDCGFYEFRRQLEYKARLYGCQVVVADRFYPSSQLCSRCGHRQKMPLQERMFCCPCCGLELDRDLNAALNLLRWYRTTSSSGGSDACGDPSGGVVGVNSAASHGSLKQEESSDAGQSSALFSVA

SEQ ID NO: 33554 - protein, 141 aa, Synechococcus sp.
MNAASPYIPPYTGGLGGGGIRERSHRPPRSKTERRWSNSWAFYQLRQFVHYKAARAGIQVVVVPPAYSSQTCHQCFWIEQREGKHFRCVNPLCGWEGDADFNGANGIALLGVAVNQPPYIPPPPCPRIRGLGAGRGAVGAG

SEQ ID NO: 33555 - protein, 191 aa, Synechococcus sp.
MPVVLHRPLPEGFVPKTCTVVRKADGWYVCISLEDKSVPLPEPVSIKRAVGIDVGLDRFLTTSDGEVVPIPRYYRQAQKHLARQQRQLSRKVKGSANWKKQATKVACLQLHVARQRKAFHYQVAHWLVGQYDLLVVEDLNVRGLARTRLAKSILDAAWGRFLDILTAVAVKRGKQVLRVDPRGTSQILLCL

SEQ ID NO: 33556 - protein, 288 aa, Synechococcus sp.
LPPCPPYTGGWGASRGAGAHLEGETLRLSKIGSMPVVLHRPLPEGFVPKTCTVVRKADGWYVCISLEDKSVPLPEPVPIKKAVGIDVGLDRFLTTSDGEVVPIPRYYRRAQKHLARQQRQLSRKVKGSANWKRQATKVACLQLHVARQRKAFHYQVAHWLVGQYDLLVVEDLNVRGLARTRLAKSILDAAWGQFLDILTAVAVKRGKQVLRVDPRGTSQNCCVCEERVPKALSERVHDCPRCGSWDRDLNAAIEILKRGLRSPRIRGDIGGRWDCRSLAVEDPGLPVR

SEQ ID NO: 33557 - protein, 553 aa, Synechococcus sp.
MQYVHHLVEREGMTSTATLASGPLTRTERPRRTNESFCTPESAVEGRNQTWRDRLQDWLTSILEPKWSERLAAVSTSKDQSSLPYWNEFVQEISERLWSLTGIDSAGLDLSSLSGTAVNTGAKSWFSMTITFLPNRNWLRISSPSCTASAVGSTDSENTGLQSRKIRIYPEPALAKVWKRWQAACRYCYNQAIAYQRQHGAPKTARKLRDIILRSDLPGWVKDVPCHIKQNAVVEAWLAFRRSKDARFRSVRDRSHTLQFNAGNFRNGTWYPKLTRGLAFRASEEMPREWARGTELMRVKDRWYAIFPEPVNEQCSLAKGVIALDPGVRSFLTGFDGAGFVDIAKGDFGRIVRLCYHLDDLQSRLSKAPRSKRRRMRQAAFRLRERIRNLVDECHRKVAAFLTDNYRLIFLPTFESAKMVAKAGRKFGSKTARAMLTWAHYRFKQFLKFQAKKKNVVVVEVSEAYTSKTCTKCGHIHTKLGGAKVFRCPKCNHRLPRDWQGALGVMLRALRDTAFLFGLRPANAVASASRSNNGNGQNAIASPLSSNAQQCSA

SEQ ID NO: 33558 - protein, 120 aa, Synechococcus sp.
LNQKPRSKAERRRTNNWAFYQLRMFVTYKAAIAGVPVVLVPPAYTSQTCHKCLHIHPEQGKSYRSGKLFKCGHCGWEGDADYNAAQVISLLGATVNSPEIPKLSCPLGQLGIGIKPAPCA

SEQ ID NO: 33559 - protein, 423 aa, Synechococcus sp.
MIITYEYRILPSDDQAALMTEWLELLRRQWNDALGQRLDWLTATRCPIDRCSLVSCPLPVSEAPLEPNYYRQAGSLKQIKQLFPAYRGIYAEVLQQNLMRLDKAWKAWQVPDSTGKRRGRPRFKKAGELRSFTFPRINCPKAGAHLEGETLRLSKIGSMPVVLHRPLPEGFAPKTCTVVRKADGWYVCISLEDKSVPLPEPVPIKKAVGIDVGLDRFLTTSDGEVVPIPRHYRRAQKHLARQQRQLSRKVKGSANWKRQATKVACLQLHVARQRKAFHYQVAHWLVGQYDLLVVEDLNVRGLARTRLAKSILDAAWGQFLDILTAVAVKRGKQVLRVDPRGTSQNCCVCEERVPKALSERVHDCPRCGSWDRDLNAAIEILKRGLRAVGLPLSGCGGSWFTSPLKQQLREVILGSSRLQPVRA

SEQ ID NO: 33560 - protein, 384 aa, unknown
  TnpB Polypeptide
MIRGHVIELNPNHKQATYFARACGVARLAYNWALAEWQRQYALDKAYRDHCKAQNIDINQDKLNRPSQAKLRRKLNAIKGDKYPFMLEITKCAPQLAIMQLGDAYQRFFKGESKYPKFRKKGVNDRFNLSNDQFAIKDRRIRIPNLGWVKMREALRFDGKILSAKIFSRGGKWFVSIAVEITTPIKFTKKTGKSVGIDLGVTDLLTLSDGRKIKAPKPLKLYLKKLRRLSKALSRKQKGSKNRAKAKTKLSRLHYKIRCTRQDSLHKLTSSLVHDFNTIAIEHLNVKGMMKNRRLSRAISDLGFYEFKRQLIYKASEQGKSVKLVDRFYPSSKTCSNCNHILGKNELTLNRRAWTCLRCQTTHDRDINASINILNNASVTLTNT

SEQ ID NO: 33561 - protein, 476 aa, unknown
  TnpB Polypeptide
VFPFVLCRRVPGCFVGGGWCAGCMPRCRSPRSPRVVYRTARAGLRVTRGQRRRLLGLLASGGDVWACVLELDAWRRARQDQPLSSYQGLCRELATSGPGTFGELDAVGARSVLRRYSDAWFAAATRRRDGDQRARFPRRRRALMPLRWYHGTFTLTGRVLRIPVARGRPPLWVRLDRDPPYPPDQVRSVTLLYEAGRLWVDVAAEVPVASYPAGQEPDPGRVAGVDLGIIHPYAVAGPGGQGLLVSGRAIRAEHRMHLADRKNRARAAARRAPKPGQKGSRRWRHYRRRQRLVEARHRRRVRQAQHEAARTVIAWAVDRRIGTLAVGDPRGVLSVKAGRRHNQRTRDWRIGHLIAALKDKAEAAGISLQLVDERGTSSTCPACQSRIPKPPGRVLACPGCRFTGHRDLTAAASIAARFGGGITPVIPADVTHRRAGAHLPGVAPSRRDPRRRAHHRGARGSPGRHRPAHTSPPRLT

SEQ ID NO: 33562 - protein, 255 aa, unknown
  TnpB Polypeptide
MIVLEFKLKGKAQQYRVIDEMIRTAQFVRNKTLRYWIDHQGVKLVDLYKQCAIMAKEFEWAGKLNSMARQAMAQRAIFAIQRFFSNCKTKKPGKKGYPQFKKQTRSVEYKTSGWKLSADKRCLTFTDDFAAGTFRLLGSRDLHFYAPGEIKRIRVIRRADGYYAQFCIDVERTEELLPTGKAIGIDVGLNHFYTDSAGKTVPNPRYLRKNEKALKRLQKRVSRKKKGSGNRKKAINKLGRKHLKVSRQPIRLRSG

SEQ ID NO: 33563 - protein, 373 aa, unknown
  TnpB Polypeptide
MLLSFKTELKPNNKQVTRFRQHCGVARHADNWANSIILETLTIRETDKSVNIPSAIDLHKRLVAEVKPLYPWYYESDKASPQQALIELRIAWDRCFKKISKQPRFKKKGVSGDSFYLEQGTKAKPGINNDGKRIKLPKIGWVRLHEPLPIMAFHNCVISRKADRWFIAFKCEIEQPATPPDLKIVGVDIGIKELAVCSNGQTFANPKADRRMSRKMKRLQRRVSKRVKGSNNRKKVVSKLAKLHLKVSNIRKDAIHKLTTYLAKNHSEVKIEDLHIKAFLKNHKLAGAIADCGMYEFKRQLEYKTQKFGSELTLIDRFFPSSQICSNCCNHRHKMPLKVRVFECPNCGNIQNRDLNAAKNIERWFEGIFIPES

SEQ ID NO: 33564 - protein, 435 aa, Fischerella sp.
  misc_feature (226)..(229): Xaa can be any naturally occurring amino acid
  misc_feature (247)..(250): Xaa can be any naturally occurring amino acid
  misc_feature (427)..(430): Xaa can be any naturally occurring amino acid
LRGATRASIVCYCRVSSTKQRDDQGRQIAYMQSLYPEAEIIKDIGSGINFKRKGLQTLLDRLMRGDKLTLVVACRDRLCRFGFELPRSIWSNKTVDKSWFSKTLYTVPNQNLPRIFSPSSTSSLVECTDSGNTVKKSRKIRIFLKATQKQIIKQWFGVSRFVYNTTVKLLQDSTIKANWKAVKTDILNGLPDFCKSVPYQIKSIAIKDACKAVSNAKKKFKNGGGXXXXVSRQQSENQGRVVALDPXXXXSKVKFRSRKDPIQSCYIPKSAVSDKGIYHTILGEVTFKEALPQSFGDCRLVKAYGDYYLTVPEEVSRQQSENQGRVVALDPGIRTFITFFSESSFGEIGISANIQIQKLCFRLDKVISKIAKAKCKSKRRLKLAATRLRGKIKNLVDELHKKTARFLVDNFDIILLPTFETSRMSKXXXXRLKTL

SEQ ID NO: 33565 - protein, 542 aa, Streptomyces sp.
MGSLRGLATPFVALGPSGVAVRTRLGQLTTTDVEVLRQVGAHLGKLASRDLRARCRDGLDHDAGAWAVRKRELTPESSARWAGAITKATHDQWALARRGAHAHVQSLEAGVRTLEHRLSLPLGQKGTKHAPGGYRSRREWHAKARRLHVLEDRLARARADREAGRVHVVRGGKRLAHARHHLTDAGLTEAEWRERWEAERWFVQADGESGKRFGNETIRVTPDGEVSLRLPAPLAHLANAAHGRYVLTGQVVFAHRGQEWVDRVAAHRAVAYRIHHDTIRARWYVTASWQKPVTRTVPLATALAEGVIGVDMNADHLAAWHLDLHGNPVGNPRRFSYGLTGPATHRDAQVRHALTRLLHWATTSGVKAIAVEDLDFTADKTREKHGRLKRFRQLISSMPTARLRARLTSMADATGITIIAVDPSYTSRWGAQHWQNPLTSTTRKTTRHDAASIAIGRRAQGCPIRRRTAPPRTHQSDGCGHRTIQAGPETSGREGPRPRIPGPRTRSVPPDTARTRATRTPNTVRDVRSEQEWVQDPLLLTE

SEQ ID NO: 33566 - protein, 376 aa, Salmonella sp.
MKRAYKYRFYPTTEQAELLAQTFGCVRFVYNSILRWRTDAYYEQKEKIGYLQANARLTALKKEPEFAWLNDVSCVPLQQSLRHQQTAFANFFAGRAAYPAFKSKRHRQAAEFTASAFKYRDGKLYMAKNKIPLDVRWSRPLPSVPSTVTISKDAAGRYFVSCLCEFESASLPITSSMVGIDVGLKDLFVTDTGFRSGNPRHTAKYASRLALLQRRLSKKAKGSKNRAKARLKVARLHAKIADCRLDALHKASSKLINDNQVVCVESLKVKNMLRNPSLSKAIADASWGELVRQLQYKGEWAGRSVVAIDQFFPSSKRCSCCGFTMKKMPLDVRKWQCPECGTDHDRDVNAARNIKAAGLAVLAHGEPVNPESLKAA

SEQ ID NO: 33567 - protein, 178 aa, Thermotoga sp.
VQEGIEKVQKAYSCKKGFLRRIKNQINDVMHKITSNFVGLCLKKQISIIVIGNITGIRERVDYNDGANQKIHQWQFRKFVEMMRYKAEQFGIEVRLISEANTSKTCSVCGEKNDPNGRRYHCKACGFEYHRDRVGAINIWKRYSGTGQVVMGLVPARGVRFNPHLYGHGASLAPWKVA

SEQ ID NO: 33568 - protein, 461 aa, unknown
  TnpB Polypeptide
VITPRAYRFALDPTAAQRQSLASHCGAARRAFNWGLEQVGASLALREFELCMFGEMRTTPLGWSLYALRREWNQEKDKVAPWWRENSKEAYNSGLDALARALKNYSDSRQGKRTGPRVGFPRFRKKGRPIGFRFTTGAIRVDGARHVVLPRLGRIRACELTTALGERVSAGRPRILSASISCEAGRWFVSFGCLVQRELPAGNGHQDVVGVDLGVLHLATLSTGEVIEGPRALRAGLRKLRRLSRHCSRCRRGSRNQRKAAGRLARHHARIAHLRRDHLHKLTTTLAKNHGVVVIEDLNVRGMSRSARGSQAKPGRRVRAKSGLNRGVLDAGFAEFRRQMEYKCRWYGAELAVADRFFASSKTCSRCRTVNPTLRLGDRVFHCAWCERRIDRDLNAARNLEWWGEQHLVAGSAPETENACGGGVRPGRGPATPAEAGTGDVPEPAGMTGGRTHRAGPPPAP

SEQ ID NO: 33569 - protein, 390 aa, Lentzea sp.
VCQGGVQRRAEGTAGRTSQWIAVLAGCGVVEAGHRGEGHAGTGMADLNVAYRNFLASLSGRRKGPKVAAPRFRSRKDNRQAIRFTKNARFKVLDNGRLRLPKIGDVPVRWSRPLPAEPTSVTVIRDAADRYFASFVVRTTNDVLPPSDSAMGIDLGLTHFAVLSDGTKVAAPKFLRRAARKLSQLHRALSRKTKGSNRRRKAAVKVARAHARVADTRRDWQHKLSTSIIRDNQAVYVEDLCVAGLGRTRLAKSVHDAGWASFTEMLEYKAALYGRTFARVDRYFPSTRMCSDCGRINDKLMLDVRSWECPCGSTHDRDINAAKNIKAAGQADFNDRGAQVRPAAMPAPRGEAVTHPHAVCSTHSVEGISVRQGGEDVKGPSSSRVRRAVP

SEQ ID NO: 33570 - protein, 401 aa, Lentzea sp.
VRTAYKCRACPTPEQAAVLSRTFGCVRLVWNKTLDERTRRYRSENASTSYRDTSATLTRWRRGEELAFLSEVSCVPLQQTLRHQHTPFQNFFSGRARHPRFKSRTGRQTAHYTRSAFRMRDGSLTLAKTSTPLRFTWSFDDVDVRELDPTMVMVSREPDGRWYASFAVDIAGNRALPAAHAIEVDLGLKNFLVTSDGVRIANPGHLARKARNLARYQRRLARCQRGSSNRHRAKAKVARAHRKVRNARQDFLHRTSTALVRSADVVVIEDLNIAGMIRRRNLARAISDAGWGEFRRQLEYKCERTGRALVVIDRWFPSSKTCSTCGHLLAELELSARHWTCPGCRTRHDRDLNAAKNILAAGQAVARGDSGDACGADVRRQGLSLPQSAVKQEVRTVRIGS

SEQ ID NO: 33571 - protein, 373 aa, Clostridium sp.
MILARKVRIIPNTEQEQQLWKSVGTARFIYNWTLARQEENYKNGGKFISDGDLRKELTILKKTEELKWLNEVSNNVAKQAVKDACEAFKRFFKGLADKPRFKSRRKSKPSFYNDTSKLKVKSNIVLIEKVGWVKTAEQIPMNVKYTNPRISFDGKYWYISVGIETEQPVVELTDESIGIDVGVKVLAICSNGMTFKNINKTKKVKKLEKRLRRLQRKISKKYKLNKEGRKFVKTSNIIKLEKQIRLLHRKISNIRSNNSHQATNKIVKTKPSRIVMETLNIKGMMKNKHLSKAIAQQGLYEFKRQLQYKCEFNEIGFVEADKWYPSSKTCSECGHVKPKLSLSERTYICEECGCIIDRDYNASINLSRYGLVV

SEQ ID NO: 33572 - protein, 468 aa, Deinococcus sp.
LVFTQCHHIVLHVKVVRTAKLKLICSPEQKAALDVVTFAFRDAQNTCSKWAFENAKTASNKKIHDACYATLRTQHGLSSQLACSAERLVASTYKGLWTRTIDAAKRRREAVARKASGQKIRIPSLYKGLDSAPLFKARTLEYQLGRDYSFKKDQHVSLMTLEGRLSLPYVGWNRHVAELGLADTVIGAAKLWYQKSRKQWYLLVSFTVELPEPKSSDFKQVVGVDVGQRFHAVTKVNDPSRVVHAVLHSGAEHDRRKRTYERNRSNLQAKGTRSSKKRLASLSGQERRFTACTNHQLASRIIQAHPHALIGMEDLVHLRDRVERRSSNKASKKRKAANRRSSQWSYAELRRYVGYKAQLTGSLVVAVDAYMTSQTCPPCGHVSRENRPGNGVRFVCQSCGFEEHADVVGAMNIGMRASFLKQQWSFTGCLSATPVLSGDVDVPRDEVEARRAARAIFLELRWSVGTSP

SEQ ID NO: 33573 - protein, 173 aa, Deinococcus sp.
VLTEVFMRRPCSFTPPDVLPNLVETLDKLTTALIREYEIICTEHLKPSNMVKNHRLALNISDAGWGEFIRQLEYKVLWYGRLVSKISPYFPSSQMCHDCGFKNPEVKNLAVRQWTCPNCGEAHDRDENAALNIRREGLVVVGMPNTLNAHGDGVRPANLGDGLRSENHATLVV

SEQ ID NO: 33574 - protein, 363 aa, unknown
  TnpB Polypeptide
MIKSYKIKIYPNKEQKELIFLSFKATRFVYNYFLNVRIEKYKKEKEVYNFYKCCKDLTTLKQKEEWLKKPDKYALQNALRDLELSYSYFFKRGYKGFPHFRTYKKHNSYRSSFCNNNITLENKILKIPKVGKLKTKGFENIEGNILNCTISFKNNNFYASITCNDVIIEKKEKTNDFVGIDLGLKTYIVTSDYFEYKNNYFIKKYSDKINNLNSILSKKKEKSKQFYKIKNKLNSVYQKLINSRNDYIHKITNELVSKYDIICIETLKPSKMKKNKNLQKYIYDASWNNFIEKLEYKCNWYGKTLVKVNQYFPSSQLCSVCGYKNPEVKNLKIREWRCPNCGINHDRDLNAAKNILNEGLKLL

SEQ ID NO: 33575 - protein, 411 aa, Okeania sp.
MKLVERHVITKNHPFWSEIDHKAFLSKNLFNLANYYYRQYFFTNKKKLNFNQLYHQVSKSSDYQALPTKVSKQIIRRLDRCWTGYFSALKEWKKQPSKFLGKPKIPKYKHKTKGRNILPYPDESIYKKAFKKGICHLSMSEIKIPTSQTEIIEARIVPKSSCYIIEIVYEKSEESTKNQQVAGVDLGVNNLMAVTTNQTGTAPLLIKGKPLKAINTFYNKQRSCLQSQLKTNHNQSNSRRLKKLTHKRNSRVENYLHTASKRVIDWCINHEIGTLIIGQNQNWKQEIKLGKKNNQEFVNIPHYRLIEMLTYKAQLRGITVIITEESYTSQSSCLDGDNLPKYGDKKPKFSGKRVTRGLYKTRENKLLNADVNGSFNIIKKVIPDVFDQGIKGLPFNPVAIDPLRTTKFSDF

SEQ ID NO: 33576 - protein, 248 aa, Okeania sp.
VSFSLEDNPPLTLPGRGTEGVGLIPTDNIQTAIGIDVGLKKILTTNTGETISVPNLYRKVQSNLGRKQRKVPRKQNGSNNWKKAQNRIARLYQKIARQREDFHYKTAHKLVKQYDLIAVEDLKIKGLAKNTKLSKSIYDVAWRTFIEKLNAVAVKRGVHIVKVSPHNTSINCSNCGQKVPLTLSVRTHSCHKCGTVLDRDENAAINILDKALSEVGIILPACGGVRRLSTCVRLALRQQSKKLLKPKK

SEQ ID NO: 33577 - protein, 552 aa, Okeania sp.
MVEKAYKFRFYPTPEQESLLRRTLGCVRLIYNKALAARTTAWYENKERVSYKQTSAMLTSWKKQEDLDFLTEVSSVPLQQSLRHLQTAFTNFFSGRAKYPNFKKKRNGGSAEFTKAAFKWKDGQVSLAKCAEPLPIRWSRQLPPGCVPSTITVKLEPSGRWSVSLRVNDTRDLKLKPIKKQVGVDLGIASLLTTSDGEKVANPKNLQKLHKKLRLAQKSLDRKPDKKSNNYYKARLRVAKIHAHIKDSRLDYTHKLTTQLIRENQTIVVEDLAVKNMVKNHKLARAINDANWGELVRQLEYKAEWYGRELIKIDRYFPSSKRCSNCGHIVEKLPLNIREWECPECGSHHDRDVNASINILRMGTRVGERRKGTPTKKAAGLAVSVCGATVRPEESKSRQAGAMKQKAPTSDTTVAGELTEMFRISQSIRFWGASNLAQQGGIAVLSEKCQQECQEIVNYYLENARILREGLEAFGLTCFGGTNNPYIWVKGAEGMSSWDVFNQLLFKAGIVGVPGSLFGSSGEGFLRLSTLGRREDMEKARCILMGFAARLD

SEQ ID NO: 33578 - protein, 438 aa, Okeania sp.
LLVIEAKLKGRQNQYKVLDEMILTGQFIRNSCLRYWMDNKDVKRNDLQKLCSQLAKDTNFPWAKKLNSQARQASADRAWQSIQRFYKNCRLKLPGKKGYPKFPSECCANKKFTRSIEYKTTGYKLSPDRKKIKFKDGFKAGVFELWTSRDLAWYSEQQISRVRVVRRADGYYCQFLINVERKETHNFEGNVVGIDLGLNAFYTDSNGDAVENPKYLRKLEKRLKKLQRRVSRRHEKGKKPQSNIRRQSDGSPNHKARIQLARVNLKISRQRKDHAVKTARALIQSNDLVVYEDLKIANLVKNHHLAKSISDASWYQFTEWLEYYAKLHGIACIAVTPHFTSQNCSNCGQAVKKSLSVRTHKCPHCGYIADRDHNAARNILAKGLEMLGAIVNSTEGHSESGGDPKATGESDLWISDSNMANLSCLCERRIINDENPAS

SEQ ID NO: 33579 - protein, 447 aa, unknown
  TnpB Polypeptide
MRLQKLVSKGKGCVPFWNPQLTEISSGLWLPTETDSISSDGLLKETTENSWFSSKLIYPQSKNLYKICLQPSIFSHAECTDLDIIKTKLLRLSPTKEQKKIFKEWTDCSRYVFNQAISYIRTCQNFNPSWMGVRKDLLKQLPVWCKPVPFAVKGMAVKEAYEAFWKAKGKSKFRTRKASEQSCYIVKTAIKPKGIYPTISGKGLYFQEKLPDDPKDSRLIWRYEKWWLAVPYKVKLSYSENQAEIVSLDPGVRSFITFYSHKASGHLGKNDFSRIQRLCFHLDKLISKRDLMKNKQKRRAFTKASRRMRAKIKHLILELHHKTAKFLTDNFDVILLPTFETKQMVKKAGRKLYKKSVRSMLTFSHFKFKQFLKWKAFQTGKTVVDCNEAYTSKTHPQTGKIKNIGSAKWIKLLDGSRVDRDIVGARNIFLRALADSPTTFCCAINGG

SEQ ID NO: 33580 - protein, 389 aa, unknown
  TnpB Polypeptide
LPSIYSPFFLTSYRFSYIIILDGMTMKKVFKYRIYANRLTLSKTEQWLETCRFLYNLALEQRIKAYKYHRRSISKFEQMRQVTELRHSFPEYQEIYADVLQNVIKRLDKSYQFFFSRKNGFPRFKKPERYNSLTFRKNGGGWTIKGKYIVVPRLGKFKIKLSRPIEGEIKEVIIARKPTGQWFVSFVCDGVKPTILRKNKKEIGIDMGCESFLTQSDGVKMENPRFFKKSQDVLAYHQQRLSIKAKGSNRRKKAKILVAKKYEKIANQRRDFHYKTASKLIKKYGTIYIEKLNGWTTEWRSLNRSMRDVAWINFISILKVKAESAGRTIIEVDPHNTSQTCSQCGERVKKDLSCRVHSCSCGLVLSRDTNSAINILNLGQRLRCHSIQN

SEQ ID NO: 33581 - protein, 359 aa, unknown
  TnpB Polypeptide
MANSVVAQKLHRSYKIKLYPNRDKFDTVRYTIKRFNDYSNMFLGRIFFGQNKISTRGMSALANEALYKSKNIVRVMREAHKATGAKMNVPFVKNIACYAKIEKSKNSSFDYWIVVSNQWTKAEVVRLPAKSHRAFNKALNQGWKFSSLCECKIINENLYAIVFVSRDAPKIKKYRKTIGCDVGIKHSVVTSDGHFGYGLSKAIKVQRNRLAERQRQGHKASKNMKSCIKQILDIEAKALIRRSMRAKAKLAVESPKRLANLRSGNLQGWARSYLANRLTILGKESGVTVLYVNPYQTSITCPKCGTVDKQSRVDRDTFSCVSCKYTGHADYVAARNIAQKGTQFRMRKFSGKMSNPISQ

SEQ ID NO: 33582 - protein, 443 aa, Vibrio sp.
MIFMFGKKTKSEFDDTSRVLMCNIKNGSANFHASKRLTQITRRLSNRANFIMRKDLFTDRKPNQSKVDKLLKQGKLNVLDKDLYRRLPAAISQRTIQIVGDNWRSFAAAKADWKKNPDKYLEMPRPPKYVKWAKTVYIPCSSFRIENNKIIFAKNLNLDPVSLEKGKFTDQKFNPKASEKVVNEIRIVPTGSGFRFEIVYDKHKLNQSKLLSDNTRSVLLDKSSFLSLDLGLNRFAALVSNKAGFVPLLINGGELKRINQWYNKRCAELRSLGKHKHIAAVSAKRNRRIKDKLHRFSRYIVNLCLKEDIGTVIVGKNKLWKQDINIGKRNNQNFVNLPHAMFISILSYKLREIGVRIIEQEESYTSKASFVDNDEIPTFDKNEPNKKYEFSGKRYKRGLYRTKEGLIIHADINGSGNISRKAGYEGANLVSGGVVFTPILIGI

SEQ ID NO: 33583 - protein, 468 aa, Vibrio sp.
VKIEKAYKFKLEPTSEQAGKLAQMTGCGRVVFNDSLEYVLNIIKKSIPITDKKALYKHLNDLSYQDRKLLKKSFPNSAFLNKQLTSWKKLNHRLWLDDAFTDCLQQRQRDFVKALDEWSKGKRGFPIWRTRKLAHHSTMRFPAPKKQISIHNKHIKLPNGLGLVRYRNSQPVIGELRNATVSLNAVGEWYISIMCLVEIELPTHVQGEMTGIDMGIAKNMTLSTDCCGNEGVFEGVHSFRAHQDKLAIEQRKLSRKVLGSESWKKQKLKVSKLHQRIANIRNDFQHKATTAISKNQCASVATQTVTQGMSHPMVNGCKALYLPERETSKGKKACIEKMREGKLSSPICVEAKIDMAKPDWLNPRQDWDNADPIPTTTNGYVCTSEVYVVCTPEYHCAEIIRDKRNSRTGCLSRSRNGCAVTGGSSKGSNPYDDGVSIVADDLTVYTGHVMMPEGKGKQDKLRKEGELW

SEQ ID NO: 33584 - protein, 375 aa, Vibrio sp.
MLRATKIRIYPTIEQAEFLEAQFGAVRFAYNKALHIKTHFYKKKNISLSLKKEIKPLLSLGKKSRKYSWLSQFDSISLQQSIINLDKAFSNFFNPKLKAKFPKFKRKHGYQSSYHCTGLKILENAIKIPKCKPIKAKIHREISGTLKSITISKSSTGKFYASILVDCGNEAPAKPKHITKLSGFDLGLTDYLISDKGEKIANPRFLINAYKNLRRKQKALSRCKKGSKNRAKARLLLAKAHERVANARNDFQHQLSKRIIDENQAIIVETLKSSNMLKNKRLAKHIADAAWGAFVSKLAYKADRYGKWLIKCDQWLPSSKTCSCCGYKMDKMPLHIRVWTCPSCNEVHCRDTNSGKNLRNAGVIELKAAGLTVSA

SEQ ID NO: 33585 - protein, 120 aa, Vibrio sp.
MVICEALKVANMSKSAKGDIENHGKNVAAKSGLNKSILDQGWHELRRQLEYKTRWKGGVYDEVNPRNTSRECASCGHTEKENRKTQAEFICQSCGHSDNADKNAAKVILNRYLRELEQAA

SEQ ID NO: 33586 - protein, 380 aa, Vibrio sp.
LFLKDIPVQLLRNAASLVFSDAEAARKGLRKFPKIKNKFKKRSVVLTKEMFFVEPFENGSRIVINNHAKAKRRIVFSLVVPHKSEQIGNQIRLSRQGAKFTLSGSFDDGRLVLDEKQILSDLSYLSYEELELKTTGVDRGIALHLCSSDGFSVTYSPEEVARKKRRAKKIAHYQRILARKKRLNKNKTKACETNQQRIVQARISRIQAKESDCRNNHNHHISKALVESANQIIGLEDLNLTGMTKRAAPKKNEDGKGYTRNRARAKSGLNRSLLGVALGQLATYIAYKARKVGKIAISELNPMNSSKECACCGSLNTERPDQATFICLSCGNRDNADSNAAKVLKKRLIHYIKENTFAKSKTRKSIVKRKKNWLTEPTPV

SEQ ID NO: 33587 - protein, 380 aa, Chloroflexi sp.
MADDTRLRRTYRYRIYPTVRLRLALEAQLGFACQLYNAALEERRYAWRGRRRSVTLYEQFRELTAVRAAKMGPPNMSCSAMRDPLRRLDWAFAAYFRRVKEGVTPGYPRFRSVRRYDSLTWNSGWGVRDGRLALPGIGQIKVKWHRALPASAVVRTVTVRRVAERWYASFSLRVCGSRQGLATQLPAVGLDLGIHHFATLSTGEQIPGPRAYIAAMRRLRIAQRRLCRREKASHRRQKARLLLARHHERVRNHRHDHAHKLTRRMVCDFGLIVVEDLNVGGLARGRLAKHVTDQGWATFLRMLEYKAAEAGARVIRVPPGGTSQACSGCGAFVPKLLSERIHRCPQCGLIIDRDMNAARNILRLGLSRQASTWPTGACVA

SEQ ID NO: 33588 - protein, 339 aa, unknown
  TnpB Polypeptide
LYHTDRSERRGGQLQAEWIRKECAQEVRPATHDDVQRRRTSRCPPRPFHERRATTRPQARERYRVVRQNPAPRGLSPLDASTTESRTTGLVGSVERGDATMGESRLFERDGTWYLHVTATRDAEGGSEVSDEERTPIGVDIGEASLVTVCHRDDHGCPTAPELWADEGKTVRRLRKTYFTATRRLQTRGSERIAESFGDDLWNQIDDVFHRVTREVVDYAESVKNPVLVLENLTYIRESMDYGEYMNRRLHGWGFAKLHAQIRYKAVEKGIPVKTVNPRNTSKECHACGGRIPPTTGDVQVYERCVLDGRVPSGRERSGEHRRPLPQRRESFQRTRERR

SEQ ID NO: 33589 - protein, 253 aa, unknown
  TnpB Polypeptide
VDESAANLLHQTTDHFLDAANYVVDVAWKPDWKITSKQKLHDQTYYDVRDESPLPANLVQAARNRAAEAVKGCVERWKKGKKASKPHFTSRFASYDARTGTVNDDHATLATIDGRVTADFILPDERRDTPHSAYLFNDDYDVNGATLHYDEVEDCFYLHVRTKPAVENDEAEQGDAKHVSVLGVDLGITNIATTSTGRFWSGGELNHWHREYEKRRATSNKPGLDGHTRMFSGSVANKLGASSSFFTRSRTNL

SEQ ID NO: 33590 - protein, 337 aa, unknown
  TnpB Polypeptide
MLKLKKENKLPPFITGVNPPRYKKKNNRRILWTILRKDQYRIEGDKIVLKGLGAIGRMALRYKGLIHLSGRQGRLEICYDQDRRRWYAHISFEVSEKAVRGMWTSIPRNPRGNLVAGIDIGINNLMAIHVESGLAKLVNGRPLKALSHYWRMKIAEYQSTLNRYGLKTSKRLRLLYAKWRRQVKSCIDSRVRQAIEWLYSAGVSVIKVGYPKYIAQENGNFNNVHVWTYNYLLRRIYEVAEEHGIIVVYVDVDEAHTSSKCPIHGEKCGNRVKRGLFKCMKLNKVFNADLVGAYNILITPSPTWDRGNGPETRPGVKPSGRGDVIPNLPALAGTLAL

SEQ ID NO: 33591 - protein, 399 aa, unknown
  TnpB Polypeptide
MIKTHKIALRPNRDQIAWFYQQCGYAKFAYNSALSDFKAELSADNFLSMYDLNKRFNEKKKEYDWTQAQDQRAAMYAVHHLGSAIDNWKAKRTKFPRLKKRGCKHTYTTDEQAVRIEGKRIKLPKIGWVKTFQELRFAGKIVSVTISRTAHRWFASVSVEVEEPIRRCPAPTEFVNGYVSHTDIGTPDKIERSIYPTIGIDVGISTLATLDDGTKYENPQPLKRYERKLAREQRKLSRKVFLSANWYKQKRIVERLHYRIACIRRDAHHQATTDILKCVSKIGIETLQVTNLLKNRKLAKALSDAALGGFFEKLKAKAKALSIPIVQADRFFASSRNCSTCGHKKDDLTLSDRQYQCRNCGASIDRDVNAAINLRRKASDRDHRDGTLPLTLAAGHAES

SEQ ID NO: 33592 - protein, 292 aa, Methylacidiphilales sp.
VNACSLRSCYIIPADAPRPTFASQCKSLTAARKESEYLQRVNAQSLQQTLRRLEKAFVSMWEQNHGFPRFKKQGRMRSFSFPQLSVNPLENAKSSGGNTPPGKFRGCVKLPVIGAVKVRQSRSIPDGGIIKQARVVRKVSGWYVMLTVQWDVNPPQPQPHGEAIGIDVGLTSFVATSNGLLVKRPRFFVDAVRKLKLLQQHVSRKRLGSNNWKKALYKVAKLHEYVANCRKDWHRKLSHQICNDAGMVFVEDLNLIGLSRGMLSKHCLDAGFGQFFNILEQTCFKRDVYFQR

SEQ ID NO: 33593 - protein, 311 aa, Lactobacillus sp.
MFALEVKQMIKTQVVELRPNKIMQRELERLCNYRRYCWNLALATWQDMYEARTLDKDNNPSPNEHRVRDELVNNKADWQFVLSARCLQLAVKDLANAWKNFFDKTQPDWGKPHFKSKKAPRQGFKTDRAKIINGKLRLDKPRGIKSWFDIPAYEALKMEEVKIASIFRERGHYYAALSYEEEAGLKAKTGKKTAIDVNVGHFNYTEGKINVLPAKLQKLYKRIKHYQRVLSKKRRVNGKSASQSNNYLQVRTKLQRDYRKAANIQNDLLQKFTTELVNNYDQIVIEDLNVKQMMMTHVASKGMQRSLIWQV

SEQ ID NO: 33594 - protein, 370 aa, unknown
  TnpB Polypeptide
MRKSFKYRLFTNKAQESKLESLFNSARFLYNCALEHRIMCWKQWNKSINYYDQANSLKEIRSFDEGLSRLNCSVSQDILRRLDKAFRAFFRRIKTGDKPGFPRFKGQDRFNSITFPAYGDGVKIKNGKLYIQNIGSVRIKLHRDLEGKIKTVTIKRQNGHFYASFSCDNVVPQTLAPCNIEVGIDVGIKSFAAMSNGEIIDNPKHLKHSEIKLKDLQRKHSKKRTRKTKKKLGRLHTKIANQRKDFLHKLSRDIVNCFGFIFVEDLKPKKMVNGNHKILNRYINDAAWSMFFDFLSYKAESAGRTLIKINPKNTTQTCSACGKIVPKDLSVRVHECSCGLTVDRDINAALNILALGQSVLGFPKEAVCFN

SEQ ID NO: 33595 - protein, 475 aa, unknown
  TnpB Polypeptide
MAMCGIKMRAWPTGQQKQTLSQWMGCSRLIYNGKCDEQEYFFRFKCRFPELTGQKVPVDAAYAQFKTEQSLFLNKCPSEILRGAAFIWYNSIQRYFSGIAGRPVRKRKGSRESMWLTRELFSLTQDPLTKEWKLFIGKKRNNIGFLSFEAHREFRIPASLTISKSNGEYFVSFNYEDPKIITKTQEELIERLGGQSQDQLTLQTLGLDRGVVIPVQSSTGQSFDFTSEQKATIERKQRRIRKWQRRLSRQRLGSNRRNKVKHSIGKAHQKIADVRRDFAHQTSRTLVGKKDENGQIVENGAQVFVLEDLKIKNMTKSPDAKSDEENPGHFAPNKAVAKAGLAKKILNSAWGMVALFLTYKANHAGKVCIKVSPRFSSQECAKCGHIHPDNRQTQSQFVCQNCGHAENADQNAAEVIKKRGVEEILKQVTRGIREGARGGNRKTLKVLKPKMQTQRSENRGRRRDDAELIPRSSGL

SEQ ID NO: 33596 - protein, 480 aa, Bacillus sp.
MERDGGKEYRTYQMDVKKGHRLFSYFEELCANGNNLYNATNFYIRQVYTALQSDKPLQPLQKEVLETIYRNIDKMNEKKTMAYYKKLQKLKGKENQKELKLFTLPTKEKAFVGYNFLDALFKTIKQKDYYSLPGQINQQVIKNVVQNWDSFFKSLKGYNENPQKYKGRPNIPGYLPKGSQKEVVLSNQICQFKSEKYLRFPKTRGKLNIGKLANVSGKFQQVRIIPKYDTFTVEVIFFLGKKVEINPKKKRILSIDLGVENIATLVSNVEVTPILFKSGKIKSVNRWYNKLKSYYYAALRNGRSSKEGQRYSKRLSKLDSKRHNQIKDFFHKVSFNIVKVAKEHHIDTIIIGKNMDWKQKVALGSKSNQNFVQIPHSMLVSMIRYKANTEGIAVIETEESYTSRASFLDEDPIPTYKSGEKSDGIFSGKRISRGMYRSKKGILINADVNGSANILRKVVPKAFANGIAVVCTQPLAVNVH

SEQ ID NO: 33597 - protein, 397 aa, Actinobacteria sp.
MARYRLLPSPAQEAVLRDHCAHARYVWNLAVEQHSHWHPGRKSAPGYLEQCRQLTQARAENPWLAAGSQTVQQQALRDFTQAMTAFFDPGNPAGLPSWRKAGRHEGFRIVGRGRQWDVRRLSRKTGQVRVPKAGWVRFRWSRAVPPGVKSYRVTMDRAGRWHVAFAVLPGPVPAPGNGQVVGIDRGVAVAAALSTGQLLHCPALTGRERTRLRRMQRRLAHAKRGSHRRGRVKHAIARLRARETDRRKDWAEKTSTGIARQFDVIRVEDLQITNMTRSAKGTRENPGRNVRQKAGLNRGILRSGWGLLVRRLEEKAPGRVEKVSPAFTSQRCSACGEVDRASRESQAVFRCTACGFAGNADVNAAINIAAGHAVTARGGDGVARPVNREPQLLLQSA

SEQ ID NO: 33598 - protein, 328 aa, Streptomyces sp.
VPAIGAQAAVRVVKKVCDAYAALKGNIKAGNLGREGSKRRLRAESKPIVFREDAAQPFDDRILTWNPDARTVSIWTVAGRLKHLPFVCSDEAMVLLASRKGESDLVLRDGMFFLIATVDLPEPEVFEPDGFLGVDLGIVNIATTSDGEILAGRALNRYRERHRDLRRKLQKKHTKSAKRALKRVRRREARHAANTNHIIAKRLVATAERTSRGIALEDLSGIRQRVTAKKDQRARLHSWAFAQLGRFVEYKARREGVPVVFADPRNTSRQCSECKHTPRTNRVTQARFVCRSCGAVLHADHNGSRNIAHRGEAVWKRGAVSRPRTSPR

SEQ ID NO: 33599 - protein, 167 aa, Lyngbya sp.
MSTVTVIKDAANRYFLSFVIESNQQLLPSSPDSVGIDLGIKTFAVLSSGEKVDAPKPLKKRIKRLQKLSRNLSRKIRGSNRYERARVRKAKLYARMKDTRKDFLHKFSTRIINENQVIVLEDLNVSGMVKNRKLSKAISDLGWRQFRTFLEGKAEKYGRDFRVISRW

SEQ ID NO: 33600 - protein, 431 aa, unknown
  TnpB Polypeptide
MTLEIKDGEYIFHGKCLSNITEKKNELLEPYGKIVLNYGIVLQLIPEKHETQINQQIGNARFVRNNYLTERKNRYNETKETLFVSDYLKYYYPLLKQDNEFLNLSDKFAIESALDNVDTAYKNFFENLKQGKKSGFPQFASKYKPNGNSYTTKYTNNNIELLEINGLPYIKLPKIGKVRFVLPKDKTLQTIKQKNTKITRATIKKDKSIYTVSLQMETVVDKPLNLIRVNARDIIAADMGLKDFAIYGNKEYTEKIENPRFIKIHEKRIRRLSQSLSRKKKGSKNYEKSKEKLAKEHRKIKNQRKDFHHKLSKKIADSCCVFICEDLNIPGMMKNHKLAKSIASVGWGQFLNFVKYKMERKGGKFIQVDRFFSSSKLCNCCGYKNTDLELKDREWICPKCGTHHDRDGNAKNNIFDEGVKFLLANNIFVIM

SEQ ID NO: 33601 - protein, 396 aa, unknown
  TnpB Polypeptide
MIVLEFKLTGATRQYAALDEAIRTTQFIRNKCVRKWRDERGVKPYDLNKYCAVLAREYAFAGKLNSQARQAAAERAGAAIVRFYQNCRTQKPGKKGYPSFQKDCRSAEYKQTGWKLDEARRAITFLDGFKAGTFRLKGTRDLVGYALDQIKRVRVVKKADGYYSQFCIDADRRASVEASGKAVGIDLGLSHFYTDSEGVTVENPRHLRRSERALQRLQRRVSSKVKGSSNRAKARDKLARKHLKVRRQRKDFAVKTARALVMSNDVIAYEDLRVSNMVKNRSLAKSICDAGWRAFVSWLVYLAHVYGKVVVAVPPAYTSQDCSGCGERVRKSLSERTHVCPRCKTMLGRDHNAARNILALGLRALEETTAGHAESNAWGQSALYPPGATLVEKAAG

SEQ ID NO: 33602 - protein, 385 aa, Lactobacillus sp.
MLPLMMLKAIKTRIYPTAQQQEKITANFGYCRFVWNQLLDMQKQRYANGGSYVNEFGMNYLIKCLKQEYPFLKAAESTSLLHVSRDLHHAYQKLFKEHKGFPKFKARKFPKQSYQCNAVNHNIQLVDQHHLKLPKLGCLRFKAGRQPVGKIKNVTIRRSATGKFYAVILVDTDIESLIKTTKAIGVDMGVADLMITSDGVKYPTIRFDKRLSKRKHYWEKRLARRRHQAQAAIAWDHHNKVIEPRELTDFKNYQKAKHMVARYNEKIANQRDNYLHNVTKELVEQYDVIKIEDLKTKNLMKNHKLSRAIANQSWRKLRIMLEYKCAWYGKKLVTVNPRKTSQLCSVCGYDDGKHALDIRQWTCPNCRINHDRDINAAVNILKATA

SEQ ID NO: 33603 - protein, 369 aa, unknown
  TnpB Polypeptide
MLKGYKYRIYPNKTQEEIINQTLGNCRFVYNHCLFLKSEKWKDGKQKFSYNDMCKHITDLKKYQEYEWLKKSDSIALQQSLRDLDSAFQRFFKKQSKYPKFHNKHRKSSYRTINQNGTIAIENGKLHLPKLKTFVKVKQSRIFTGKIKNATVSKTPSNKYFISLLVEETDNFKTSLSNEIGIDMGIRHFYNDSYGNKYDILPMLIKLDNKLRRKQRKFARTMKRSKNHEKLRIEIAKIYEKIYNVKTDFLQKLSTKLVNENQVIAIENLKIKSMLKNHKLAKSIQDSSWGMFFRMLEYKAMWTTNCKVIKIDTFFPSSQLCHVCGYRNKEVKNLAIKEWKCPYCHTVHDRDKNAGINILNEGKRLLSLA

SEQ ID NO: 33604 - protein, 366 aa, unknown
  TnpB Polypeptide
MIKRKTYKYRIYPTKAQETSLYRTLNTCRLIYNKTLEIRKKTYENEKKAVSYIDTVKLLTQWKKSDIALETIHSQVLQDVQKRVDIAFQNFFRRIKKGENPGYPRFKRWDRYDSFTYPQSGFKLGNNFLKLSKIGNVKLVNSRQLQGKIKTLVIRRSSTNKWFACFACEIELEPKQVSPAKIVGVDLGLLHLATLTDGTHIPNPKWYRQEEKELAKAQSKKKNKKVISRINERIKNKRNNYLHHISTNIVKNYDIICLEKLKIKGMLGFSKGLNKSFNDTALYQLTQMIVYKAEEAGKYTILVDPKNTTKKCSQCGKLVEKDLSERIHNCPFCELKIDRDLNAARNILALGLQSLGKNLKSSIHLE

SEQ ID NO: 33605 - protein, 244 aa, Eubacterium sp.
LRLPKIGQIRLKQHRIIPEEYRLKSVTVSQTPSGKYYASILFEYEDQVQEKEMQKFLGLDFSMHELYRDSNGKEPAYPRYYRNAEKKLAREQRKLSKMQKSSNNRNKQRLKVAKLHEKVSNQRKDFLHKQSRQIANAYDCVCIEDLDMKAMSRSLNFGKSVSDNGWGMFTTFLRYKLEEQGKKLVKVSRFFASSQTCSVCGYKNAKTKNLALREWDCPRCGTHHDRDVNAAVNIRNEGMRLVNA

SEQ ID NO: 33606 - protein, 395 aa, Thermoplasmata sp.
MKRTVQIKLSFEDREYLDQTVKQFKEACQVTVNEGWNSNGLKTYNRNKLHHMVYERLRERTDLQANLVVRAIARGAEAIKGCVERLKNGLKVSKPNFTSDSIAYDKRTLTVKLDENKCTISTINGRIDGDFVLSKDENDYYKKYLNGEWSITHSTIEKHEYERNSPYYLHLGLEKEVEDIDITDPTVMGVDLGINNLAVTSTGKFYSGSELNYKRKMYEEIRGKLQEKGTRSAYLTIQQMGERENRSTCDTLHRISKDIVKEAKNKDVDVIAFENLKYVRKRMPKEKQFHTWAFEKLYHYVKYKAREIEISVKQVDPENTSRICNRCGHTEKGNRTNGRFKCRECGYELQSDYNASKNIGLRFLRREQKSSVRTGYGQLALKSGVLKPSGKFTPR

SEQ ID NO: 33607 - protein, 441 aa, Selenomonadales sp.
MNWWKKMIRMIKSVRIKLLPNNKQKTKLFQFAGCARFAYNWALDKQIENFREGRKLQSDGDLRREFTILRNSGEKPWLLEVSNNVTKQAIKDLCTAYKNFFHKQKKKGYVKYSPKKIAHYARTGKKLTVYDMNNHPKFRSKKNGNFRFYQDNVKIKFTKTHVKFEQIATSKRRNRQKANWVRLAEKGKIPTDAKYTNPRISFDGENWWLGIGFVIRYKLKAMRGLKFVRKQPKHLCTEGVGIDLGIKDLAIISDSIKVKNINKSHTIRTLKKKRRRLQRQVSRKYQMNKKGESYCKTSNVIKSEKQLLRISHRLTNIRTNHVHQATRAIINRKPRFVCLEDLNVQGMMKNKHLSEKVQEQNFYEFRRQIGYKAHWAKIPVVIADRWFPSSKTCIECGHVKKDLKLSDRTYVCPVCGNVIDRDFQASLNLKRYGETELSKSV

SEQ ID NO: 33608 - protein, 452 aa, Lentzea sp.
VSCVIQAYRFALDPGPALERVLRSHCGGQRRAFNWGMARVKANLDQRAAERTYGLGEAQLTPSVSWSAYGLRKDWNQAKDMVAPWWAENSKEAYSSGLANLATALGNWADSRKGTRKGRRLGFPRFKGKRSGLSCRFTTGAFGLADDRRHVTLPRIGLVRTHESTRKLARHVARGSARIRSATVSYRGGRWFVSFSVEITRADPAPARPGSVVGVDLGVRSLAVLSTGETIANPQHLEPALRQLRRLQRQAARRTGPDRRTRRVPSNRWRRTQDRVTRLHAAVANARRDGLHKLTTRLARTHGTVVIEDLNVSGMTRNRRLARQVAGVGMAELRRQIEYKARWAGVHVHVADRWYPSSKTCSGCGVVKTKLRLSDRVYRCEACGLVLDRDLNAARNLAALVHRQTSSPSCGATRNEPAGNPGKTRTARATGTATGRPAPGAGQRRRRKAPAA

SEQ ID NO: 33609 - protein, 406 aa, Streptomyces sp.
MLSGRRYRLELTAEQAEMCEEFGNICRSVWNTGLHQRREYRRRGAWMNYVPQAAELADAKKEHAWLKAAPSHVLQQTLRDLDRACRDHGTFKVRWRSKVRWSPSFRFPAGNHIEVERLGRKWGRAKLPKVGWVRFRWSRPVGGEIRSATVSRKAGRWYVSFLVDDQAVTPEKHAMPGAAVGIDRGVKVAAVTSDGDFHDREFITAGEAGRYRRLQQQFARTKKGSANRSKTRAAMNRIMGRVTDRCADFCAQTASRIVAKNALVVLEDLRIKNMSASASGTIEAPGSRVAQKRGLNRAILDKGWHRLELALVGAARYTGTTVVKVNPAYTSQRCSACGFACEENRESQSVFVCKAEGCGHTAHADVNAAVNIKHAGGQPVSACGDLGASRSAKQEPVSRATGRTPS

SEQ ID NO: 33610 - protein, 394 aa, unknown
  TnpB Polypeptide
MYDYTTSMDIQRTIPIILDKNTLVDETVLEFNRYQKTISPVCFNGGTPLRALELHHAVYHKVQTILTSQMRCNAIRATAAAYASAKSNGKPATRPFVFRRPTALFLYSKDFKFRRDGSLSISTLQGRQKIGWRIPEHFRKDFDAAKSIDSLRIARGKAFLCITLETPEPRGITPVGIDLGVNNALVASTDKKTLFVSGKRLSIRNTKSRKVRSRLQAKLAGKKAQHRDTRSVRRVLKRLSRKHHNRNRTFCQETAAQLCKWAPVDSVLVFEDLHFKPKTKKEHIRKGTRRKLNSWFFNLMMMAVRNRAERQGLSLAYMNPAFTSQLHYRCGLLGSRKGHKFFCPHCNQVEHADVNASQNLRLKFTVLRSSGLLSTSLEARSQDSGKLPASAGSR

SEQ ID NO: 33611 - protein, 410 aa, Moorea sp.
VRLAYQYRLRLTSSQVTEIERWLDMLRHQYNYLLADRFNWYEQNRCAINSCHLVCHLPELRNKPDYFLQKRNLPQLKKDRPWYKAIHANVLQDCVKRVDLAFKRYLKGDSIGNRSGRPRFKNKNRYRSLTFSAFSKNPIQGNRFNLPKFGWVKMIYHRPIPDGFKIKTATVTRKADGYYVTLSIQDDSVPDIISINSVVNPVGIDMGLKSFLIKSDGTQIPIPQYYRKAQKRLKKIQKAVSRSKKGSNNRKKAVSKLGKAHKKVADTRKYFHFKTAKELLDNHDLVAHEKLNIKGLAQTKIAKSVLDAGWGQFLSILSVKAENAGLITKAVNPRNTSQNCSNCGNKVLKKLKDRIHSCPHCGYVADRDVNAAINILKLAVGHPVGSKAYRVSEQIGGVGKKPTLNRQRSV

SEQ ID NO: 33612 - protein, 263 aa, Beggiatoa sp.
MFSHVGCTHDEITRTKSVKLYPNPKQSSIFKKWQDCSRYVFNQTIDYIRSCVNFSPSWMDIKKDLLKQLPKWCGPVPFQIKAIAVKEAHQAYWKAKGHPRFRSRKAPMQSCYIPKSALKEAGIYPKISGQGLRYSEPLPEVPLDSRLIYQYHEWFLSVPHKKTTHVAENQGRVVALDPGVRTFQTFYSEHLAGQIGYDDFGRIQRLCHHLDKLISRTSKATGKAKREMKRAAARIRKKIKNLIKEIHFKTARFLVDNFDVILC

SEQ ID NO: 33613 - protein, 405 aa, Lachnospiraceae sp.
MKTGYSIRTWRMHLFCPEPAWLELTEEYFQEVVDFYYTLLKDHPALWTGSLFDIQRTLEIMTLAGRDGRVPEHPLPLGKVPVYLRRAAINKAASTVKSVLAAEEPSDTSEHLLKFPENLESNVTFFKGMYSDITSESIRLKLWNGKKWVWLDCRLKGRQLPAAGQVMSPTLVKEGRYYMLHIPVKQENADGRTAKERMAESTRLCSIRFTNTDIFALCCVLDEEGETAAVHACRGGKEYRHRCEILGKKIRKSRPNTDQDNVAQPNRKYYLHLKNLSDHYAHQVSREILNFCLREKAKVIVLPDYEPSYTRMAMVKSGNYSPLHLSSRIRSYLQYKAWSEGIIVLELRTDGLKDKCAICQGKIRRKGSQFLCENGHQGSRFLNDARNLGQKCQDSFQKALPGSPE

SEQ ID NO: 33614 - protein, 547 aa, Streptomyces sp.
VAAPSGARIRDRLRLESADEKVLRLVGEHLGRHQRADLAERVRIGQVAAKDTRRAERKRKLTMVSSSRWAGAMTRASEDQYQLSMRCLYDERAGLRRAVGAIGRRLAVPCGMRSGNGVRGYADQNERAQKQRRMQVLQARLAVVERKTAAGRPSVTVGGRRLARVRHHLADAQLTEAEWRERWEATRLFLTADGESGAPHGNYTITVNPGDGTVSLVLPEPLRHLANAHRGRYRLSCTVRFSHGRGEWLDRVSADRAVRYDIVRDPARGRWYLDASWTVETAVPPTPDEIKTRGARLLGVDLNADHLAACVLDTHGNPIGEPVTVPLDLTGPAATRDGRLRAAISQLITLARQRGCAGIAIEDLGFAEARATGRETMGRGRRGKRFRRTVAGIPTARFRERLRGMAYHAGLVVLAVDPAYTSRWGAQHWTQPFQHQSTKKKTRATRHHAAAVAIGRRALGHGIRRRPGVTAHHRRMVEWRATGQAVPLPRARGTASPPRTSGTPVRDGKTRPCRGDQLALFPDPQDRLEGHWTITGPVYGLLASAGQ

SEQ ID NO: 33615 - protein, 348 aa, Geobacillus sp.
MCYNQIIHQTKKEGMLMLRGQKVFFRASKADLDRLYACNRESARVWNECLRLAKEYFLQHGCWITKSELQKQTKRKFHLHSQSIQAVCHKYLFARQAAHHSIQQGHPARYPYKKKKYFPTKWAKDGFKVYENGKIELSMGIHHGKREKPIVVYASHLPKGTIKEIECCFDHGLYLAVTYEDRQKAKAYKPDSSVGVDLGEVHTIGAFCENGQALLITGRKIRSLHRLRNKKLAEIQQRQSKCQKGSRRWKKYKRAKQYALSKSERQLRDALHKTTKQFVDWCLKQSVSDVYIGNVEGVQRNTRKKKRTSRKQAQRLSNWSFGKVKKYLAYKLAQHGIRLHEIEESYTS

SEQ ID NO: 33616 - protein, 414 aa, unknown
  TnpB Polypeptide
MPERYVAYKTELKLNNQQASFCARHAGTARWSFNWALRRCIDVYQATEKRPTAIDLHREIIAMKKTPEYSWLKAVSKCSPQSALRDLDQAFKNYFNSLQGGKLKSRHPQFKRKRIGEGSFRLEGTIHIADGWIQLPKLGRLRLKQRGYFPTDDQLRRAGEKVLSVTVSERAGHWFCSIKILRKVPEPIRSENQTVGVDLGFKNVAVLSDGTVYPSHQFHIRQLKRLRYLNKKVARAQKGSQNWRKAMMQYRRLHYRIANQRNDQLHKITTHLVRNFGTVVIETLNVSGMHRNPRLSKRAHDSALYEFTRQLEYKAEWAGVEIIRASMWYPSSQLCSRCGERHRELTLRDSTFCCPACGFTVDRDLNAARNLKDLAKASMAAGAAVTACGDIVRPGRSSAASGRTSAKQEIGRAT

SEQ ID NO: 33617 - protein, 416 aa, Pseudobacteriovorax sp.
MQYFKYKLKPNKAQKDVLNQWIGACRCLYNIALEQRKMIDCKEQKARSFATLEIRSKLDKSDIKSWEKYHSINYDYQAAELKALKSEFPWFKDVPGQALQYSLRHLDTAFQRFFKGEGSFPKKKKKTQRAGVKIPKGRTKKNPKGNFQVLEKHINLPKMKDPIRFIRSRDMEGEVKSLTITKDGDSYFVSILCDVGDKYDGLSHESRTHVGIDRGIAKSIAISDGNHFDLPKLKIKKLEEKIAREQVKISRKTKYSINWYKSKRKISRFHKKITNIRMDSLWKEAVRLSKNHAVIALEDLKIRNMSRSSKGTIDNPGKMVAQKSGLNRAILREGWYDFAQKLEWQAKKRGARIIYCDPKYTSLTCNKCGHRAKENRQSQAEFQCEICHHKEDADTNASRNILDKALGTGVFSLEAS

SEQ ID NO: 33618 - protein, 424 aa, Halosimplex sp.
MKRTNTFEAIPQTESDRELLLRFLDASAACWNEVNYRRRQRFFEGEDVWEVDGVYDDYVGVLGGATAQAMIKRNESAWQSFFALLDDPSEDPSPPGYWGNEEDGRTLQTYVRNDAYDIQWGERSRLDIRVGQDLKEEFEMGYYERLRLDVRGNPHWDGKSGRLTIEYDDIDDTFRVYQPVTVAVDPGSESAGDEIAALDLGVNTLVACSTTTGRRYLYHGRDLFERFRETTEEIARLRNQLEDGQNTSRRIRRLYRTRSRRRDHAVDACVRDLVERLSDCGIRTVVVGDLSADFPVTGSSRANEMVHNFWSYGELTDQLRNVCEEQGITVESRSEAGTSQQCPDCGQAERTCRHQSTLTCACGFEGHADLVASRNLLTRRIDNRTIARPMARPVRFQWDNHEWRSTTDASQSPTNSARTRKMSL

SEQ ID NO: 33619 - protein, 431 aa, unknown
  TnpB Polypeptide
LEKHLKTLTRTVVLYCYANRHARKALREIESAYREMLVEMIDYAVKYKASQETLHRVFYDKFRERYPWLPTRVIKGAYRDVARRAKSFRERKKKGKVYKDKPEVRRVAITYSDSQDWGLEGGVIKLKTHRGWVVLHYRNHRQLHKYIYGGWKLASELRLKILGRKVIVYLTFTKSFEVGYDPGNVVAVDVNENNVTIALFKDGVLSDVYRVETSLGRIVISYSERRKRITLGRSTKIREARKKLKKLRERERKLDALKKTARFVEDLTIENRAVIVIGNINEKAKEKMERSVGNKLRHRIHQWSVKKLIELLDEKPVHVVKVSEKGTSSRDPFTGLIINKYRPLMIRTAVKGLERVKAMKIVLRVTWVNGRALERDVVGAINIGLRYLYSDGSPMALGSTGAHGVRVKLVIPHRSPTPQTYLNLSTAIHKY

SEQ ID NO: 33620 - protein, 594 aa, unknown
  TnpB Polypeptide
MLNEYYTPMQAARLLGVHPESLGRWERERKLTSIKTEGGHWRYLKKEIDRLAGEEPTVRTVCYARVSTNSQREDARATNLSSCAATTQKRNLFGKLEADSILDGENKEPFWSELSREMSIGLSLPTETDSAGLDGNWLSKYASVMRSSSWFSTSSISALNKSLYKICCPSSTASVLGYTVKENIEQKKARSYGKNPFKRSQNITPNSVLKIPLFPEPELHAIWKRWLAAYRWVYNQCVEFYNNERSLQPKQSLDQYIQQLQNLPANEWTKCLGNTRQEAVCEAQNASKQSRKANGGKCLLRFRSCQNKSQAIQFKNSAYKSGTWFRSKIVNLQFAVAKGYELPANCVYGTELLYQRGQWFACFPQYIPEVTTGSDRVIALDPGNSTFLTGYDGENILEIGKGDIGRLTRLCLHLDKLIGKKMKATGKSKKRLRYKLNKAIDRLRFKIRALVDDLHRKAASLLVNSYKLIFLPTYQTSQMVVKANRKINRKSVRNMLTWAMGRFASHLEQAAKRQGVLVVRCNEAYTSKTCPKCGHVHKNLGGSKVHFCPACGHKAPRDWVGALNIMLRALQAVAFDVRDGVITISDADVVVAQG

SEQ ID NO: 33621 - protein, 354 aa, unknown
  TnpB Polypeptide
LHACRSTLEDPRDLDRAFRAFFRGLKDGRNVGFPRFKKKGRDDRFRLTGAIHVLDRAVHLPRLGVIRLKEAPAVQGRIRSATVSREADRWFVSVTVDQEISDPVPVEGPVCGIDVGLRHFATIVTSEGEVVKVQAPKPLERYLRILRRRQRQHRRKQHGSHNRKTSALRLARLYRRIRNIRQDFLHKVSTHLAKTKRVIVVEDLNVAGLVRNRRLARHIADMGWGEFRRMLAYKCRWYGSWLVKANRYFPSSKTCACCGQVLEVLPLDVRDWDCSGCRTHHDRDVNAAKNLLALALAGEGTGQLPPVRRDVTPADTGGCRPQGQCRWMRQEATGTGVMGHVSTSCRTVTTSTYE

SEQ ID NO: 33622 - protein, 396 aa, Nodularia sp.
VRLYPTKEQQTLLAQAFGCSRWWWNYALNKSIETYIETGKGLGRSALNALLPDLKKAEDTCWLAECYSQILQATTLNLTTAYKNFFDKRAGFPKFKSKHGKQSIQYPQHVKIENGNVKLPGSIGIVKAKIHRPIEGKIKTVTVSKTPSGKYLASILTEVEGEHPTQAEGKIYGIDLGLKHFAVVTDGEKVSKYDNPKHIAKHEKNLKRKQKKLARKQKGSNSRNKSRQVVAKVYERVSNSRQDFLHKLSHKLVSDSQAVIVENLYVKGMVRNHNLAKAISDCGWGTFTNFLAYKLERKGGKLVEVDRWFPSSKLCSNCFYQVSEIPLDVREWTCPHCGTHHDRDGNAAINIRAEGIRMLKAEGSAVSAVGGEVRPKMGRKSHLWHSPVSTEAQTSA

SEQ ID NO: 33623 - protein, 430 aa, Nodularia sp.
MATKRVTFRLYPSKAQANKMHYWRRLHKDLYNSCVEHRRTSYKRFGNSVDYFNQQNCLPDFKEEWIEYKELGSHALQDTVKRVDFAFKRFLKLKSGYPKFKSSRHYKGWTYPCNSGWKAGTNGKNGYLKISHLGNIKMRGQARDWGKTKTCTIIFQQDKWYASITVDCVPTRPQTDVGAIGLDFGVYHAIAESNGNIIENPRFVKLAQDKINKIAKTSRRKKPPQKGVKASRRWRKANKAVAKIQSKVARQRQDWQHKVSTQIVSCNSLVATEKLNIKGMTRKAKKRRSVVLGVSPMNNCVKKGSQRKRQKTGLNRSLLDVGIGNLKDLIKYKVIEAGGFYIEIPTQKVKPSQTCPNCGHQKQKTLAERVHHCERCGYQCDRDIAAAMVILNYARGMERASTDADESTSTWCGSFKQVTQMTRRKRTSQS

SEQ ID NO: 33624 - protein, 420 aa, Nodularia sp.
MAKPKKLMGVQQNRISTDKDTEAILEYLCTESNKLSNCAVYYARQIYFKTRKFVSSFDLVKAVGKNKHFSALPSEVAVQTCLSVGESVKSFSELIKKSGKGELSQKPKFPNYRKPGLNLIAFPKRGLKLINGKIRFPLGWQIKAWFGIKEFFLPMPSNLCFDLIKEVRILPRNRELYIEFVYEGAASTVRLDKSKVLGIDHGINNWLTCVSNVGTSFLVDGLHLKSLNQWYNKSVAKIKENKSQGFWSNRLAAITEKRNRQMRDAVNKAARIVINHCVENNIGSIVFGWNQGQKDGADMGKNNNQNFVQIPTAKLKTRIEQLCEQYGIDFIETEESYTSKTSFLDNDVLPTIGAKPEGWKSSGIRTNRGLFKTLTGIKINADCNGAANIIRKVAMMVTFDLTGISRGCLSQPKKVLLWTL

SEQ ID NO: 33625 - protein, 358 aa, Nodularia sp.
MLLSIKTKLKLNESQKTMMSKHAGIARFTYNWGLATWQNLYNDGLKPDKYLLKKFFNNHVKPEYTWIKEKGICQKITQYAFDNLGNAFQRFFKGQGKYPRFKKKGINDSFTIDASGKPIPVGGKSIKLPTIGWVRTYECLPHTTCKSITISRTADSWFIAFTYEQEHELIAKKHSVVGVDLGVKELATLSTGVVFANPKHYKQNLAQLKRLSKRHCRKEKGSNNRHKSKIKLAKHHAKITNLRKDTLHKITTYLCKNHAKIVVEDLNVSGMMSNHNLAQAIADCGFYEFKRQLEYKAQKFGCEIIVADRWYPSSKTCSVCGHQQEMPLKQRVFQCGNCGYSIDRDLNASINLSRLAKA

SEQ ID NO: 33626 - protein, 403 aa, Nodularia sp.
MQKAFKVTLTPNHSQEVLINKSIGCARFVYNHFLALRQQLYLTEQKTLNYNACSQQLTLLKKEVEWLQEVDKFALQNSLRNLETAYKNFFADLKKAKGKRNVGFPKFKKKHGCKQSYKTNLTNGNIQVIQNGLKLPKMGWVKFHKSQDITGTIINVTVTRTNRGKYIASILCETEIEKYPQVAQNIGLDLGIKSYLVASNGEVVDNPKYYRTQKRKLRKAHKKLSRTVKGSSNRVKAKIKLALTYERITNLRDDFLHKLSTRLIRENSIICLEDLRVANMVRNHKLALSISDASWTKFITMLEYKSVWHDRVVQKVGTFYPSSQTCNHCGFINPLVKDLKLREWSCPSCNSYNLRDKNAALNILGEGLRLLTAVGTPEVIKNACGEFVSPEVIQAEIVEAGIA

SEQ ID NO: 33627 - protein, 355 aa, Nodularia sp.
MINASGVIYNHAIALHKRYYRMWGKHLGCAKLQSHIAKLRKRNPFWQSVGSQAVQNICQRIEKAYQLFFQHHKKGVRPPGFKKVKKYKSFTLKQAGYKFLGGNRVKIGHRVYQFWQSREIEGTVKTLTIKRTPLGELFMVVVVDEGGKPKVEVKTGKIAGFDFGLKTFLTCSDGTKVESPQFFKQSLHLIKKAHRHHCAKSKGSANRERARKNLVRRYEDISHKRRDWFWKLAHELTDKFDLLCFETLNLLGMQRLWGRKISDLAFGEFLQILEWVAQKKNKRVIFIDRWYPSSKTCANCGHLLDSLDLSVRQWRCPSCQSVNSRDENAALNIKMVGASTIGLGDVRQALPAIAV

SEQ ID NO: 33628 - protein, 442 aa, Nodularia sp.
VAKNKISMGVQQILLSPNHETKALLEYLCQQSGKLYNHAVYFARQTFFKTGKLLTSKFDLIYEDSISKSLVAQSIPSTPMQQTLISVTEGFKSFKQLRSLFLKGQLHFQPKVPDYLTGSKLFKVAYPNSGGQRPLIVNGQLRFSLGLTVKRWFGISEFFLPMPSNVDYSQVKEFTILPKNGAFYLEMSYEVEKPKHDLDINQALSIDLGTADNLAACVDTLGNSLLIDSRAMKAMNQLWNKKVSTRKENQPEAYWDNWLDRVTRKRNHQIRDGINKAAKLIIDHCLKSGIGTLVIGWNQGFKSNANMGRFNNQKFVQMPLGKLKDRLKQLCDLHGIRFQITEESYTSKASYLDGDSLPVYGSKPDGWKASGKRIERGLYRSANGSVVNADLNGSANILRKVASNLGIDLSLLGRRSLTTVARVRLWVLPKVALSAESQWLQP

SEQ ID NO: 33629 - protein, 426 aa, Nodularia sp.
MQKAFKVTLIPNHNQQILINKTIGCARFVYNRFLALRKELYNTEQKTLNYHACSQQLTLLKKEIIWLKEVDKFALQNSLKNLETAYKNFFGELKKAKNQKCFDFPAGRYANAQHKGVGFPKFKKKHGCKQSYKTNLTNGNIQVIENRLKLPKLGWVKFHKSQDITGKLVNVTITRTNSGNYIASILCETEIDKYPQVTQNIGLDLGIKSYLVTSQGEVVDNPKYYRTQKRKLRKAHKKLSRSVKGSNNRVKAKIKLARTYQRITNLRDDFLHKLSTRLIKENNIICIEDLRVANMVKNHKVALSISDASWSKFVTMLEYKALWHDRIVQKVGTFYPSSQICNCCGFINPLVKDLKLREWSCPNCGNYNLRDVNASLNILSEGLRILTLRLRSVPTAAVGIPEALNACGELVRPEAIQAQIVEAGIA

SEQ ID NO: 33630 - protein, 359 aa, Shigella sp.
  misc_feature (226)..(255): Xaa can be any naturally occurring amino acid
VKRLQAFKFQLRPGGQQEREMRRFAGACRFVFNRALALQNENHEAGNKYIPYGKMASWLVEWKNATETQWLKDSPSQPLQQSLKDLERAYKNFFQKRAAFPRFKKRGQNAAFRYPQDVKLDQENSRIFLPKLGWMRYRNSRQVTGVVKNVTVSQSCGTWYISIQTESEVSTPVHPSASMIGLDAGVAKLVTLSDGTVFEPVNSFQKNQKTLARLQRQLSRKVKFSXXXXXXXXXXXXXXXXXXXXXXXXXXXXXXILDQGWYEMRRQLEYKQLWRGGQVLAVPPAYTSQRCACCGHTAKENRLSQSKFRCQVCGYTANADVNGARNILAAGHAVLACGEMVQSGRSLKQEPTEMIQATA

SEQ ID NO: 33631 - protein, 376 aa, unknown
  TnpB Polypeptide
VWDAISYIPDADELCSHLKNHERYADLHSQSSQRVLQELGEAFVSWYKQDDPDANPPGYRKHGDEHPRSNVTWKNQGFKIDTDYNRVWLSKGTNMKESRYAADYILCEYALQTDEQTLEDVESVQTVRSVWTGEQWELHFVCEIQIDQPESPSEKTAGIDLGICNTVAVSVSDETLLYPGNALKEDAHYFGQEEYDTEGENGPSDHSEWARQNKSRRQDHFLHALSSDIVEQCAERDVGTIAVGHPKNIRDDSDWGRHGNKRLHDWAFETLLSHIEYKAEERGISVKRVSEGKLKTSKTCCECGTEADSNRVERGLYVCEDCELVANSDLNAAENMRATVTLSPSQNRGNGCLAQPSVRLFDKPTGRVRPQEQIVS

SEQ ID NO: 33632 - protein, 311 aa, Rhizobiales sp.
LKALDEAYRRAWKGLGGFPQYKRKGVHEAFGFVGREVHIEAINRKWARVRLPKIGWIKLRLTYPIEGDIREATVVQTALGWQISIGCLIDRDIADPSGIVGIDRGVAVPLMLSDGSSYVLPTQLDALDRQARRAQRIATRRKRGSKRHTIALRRVARLRAKQARIRKHWAHCATTDITRRFGTVVIERLRTKNMTATAKGTLEFPGRNVQQKAGLNRAILNVGWHQIERQLLYKAARLIKVDPAYTSQTCASCGTIDRQSRKSQASFVCASCGHRDNADRNAACNILHRGNTPGVEPSRWAGDEAHTIQVA

SEQ ID NO: 33633 - protein, 485 aa, Streptomyces sp.
VKKFRPQPGFVVQAFRFALDPNAVQEAALRSHCGAARAAYNWAVAWVEASWWQRRAEESYGIAEDGLTRWRPWSLPALRKAFNEAKHTDPRFAAWWEENSKEAYSTGLANAAAAFDNYAKSKRGQRKGKRVGMPRFKSKRKARLSCRFTTGVIRIDTDGRHVTLPRLGAIRVHEPTVKLLDRVRAGTARILSATVRHERGRWSVSLQTEVKRDLTRVARPDTAVGIDLGVKTLAVMADSTGEIRTVANPGHYDAARKQLRRASRTVSRRQGPDRRTGQKPSRRWEKANAQRNKVHHRVANLRQDALHKLTTSVAAEYGTVVVEDLNVAGMLRNRRLARRIADAAFGEIRRQLDYKTRRRHATRLVVANRWYPSSKTCSGCGAVKAKLALHVRTFECDACGLVIDRDDNAALNLAALAAACVTGTGVAGDQDTAPAVSKPRGADRKTRATRPRHKAEAGRAGGAALPHQRQEETRDRPQTEALMLW

SEQ ID NO: 33634 - protein, 391 aa, unknown
  TnpB Polypeptide
MRKVVHGGVYFKQETKNRIFELMKAQCSAIHSAFQAIHKYEQTGNAVKKYVKINFMKYLNQRYVSDACTVASSIISEHVLFGGKRTWEELQTGRITKEQWLQKRNSQLFSQGDAAKDGNPNIRIKGNKIYVNDPAIRGKWLEGSVFIPIKFKGWISQCYNARLIYKNNKFKIVISFEVETPELIITSKKQGVIGIDTNPDQLAVSETNKDGNLINHYSSKLQRIQFARKEKRDYDVQVAAKNIVNSAIDKGKPIVIEKLNFKKDNKGTKKFKRMKHNFLYRKLTEAIKTQAAKHGVLVEEVNPAFTSILGQLKYRGMLSLSSHESAALVIARRGMGFRERQTFNITKDPKKSGYWNLEGRKYSKSIGTKALDYLKDCFLKPPLTAVDLVPL

SEQ ID NO: 33635 - protein, 416 aa, Thermococcus sp.
VKIVLAYKMTHDWSVQELLTEYQKLLQRAIDKIWENATWKEKKVKHRYSIGNGKYKYYETTRLIPYFPKSNEFRRGLRNELLEDWPLAKHYVDSAIKTAYSILESWRQNYLRGRRKRKKPVVKRKFVRVKTTLMKVEGSKIRVTVKPREEYLELDYSNEWFYERIKDWKVGELIIREKDVYLTFSREVEFSERIRIGIDSNLMSLDVYHPEQGWIKVDLSELHRIAETYDGIIDKLKSIQKKAPKRIGMLLKKYHTRRRNRIEDYLNKLAVQLSMEFPDAVFVFEDLNKFNMFNGNGRKFNRKLSRSTWSKIVQKLSYRVPIEFVNPAHTSSTCPRCGSRLESRNGLVECSNCGFNADRQFVGAFNVFVRGLRVALSGGEAGDLLPDEPGGELRLMSPKSVVRVDLNGRMFIHISP

SEQ ID NO: 33636 - protein, 378 aa, Clostridiales sp.
MANKAIKYRLYPTTEQSIMFAKTFGCCRKVYNLMLSDKLEAYKSTGKFPMVTPAKYKTEYPFLKEVDSLALANVQLNLQAAFRNCFSRDRKKKNGFPKFKSAKHSRRSYTTNNQHGTVSLSDKSIRLPKIGAVKAVIHRRPGDEWHIKSATVSQESDGKYYASVLFEFADPVNTYVADMTNAIGLDYASDGLYVDSNGSIGSNHKYYRESQKKLAKAQRRLSRKQGSLKNETKSNNYMKQLRKVNRIHRHIANQRLDNLHKKSTEIANQYDVVCVESLNMKSMSNKGFGNGKATLDNGYGMFLSMLEYKLSDRNKYLIKADKWFPSSQICHCCGTLHPEMKDLHIRTIRCGCGLTMNRDQNAAINILTEGLRMLAEKA

SEQ ID NO: 33637 - protein, 545 aa, Aquificae sp.
MSSAKRILTIRISGKERKRRVRKLLYDLAHFRNMLVILIRKYRLTYKKALLHESILYALLSPKEYRGKYKEEFEEALRNIENSKELRELLNSLRKQKEKINNPHFIQTLIKQVIKDFKGFFKALEKFREDPSKFSGMPRPPKPKKLRYLMNFSAEGNINTFKREGDSLLIRLRGKQHLKVRLSKDFPHKVSSVRLKFYGEDLYVDVVYEWEKTETQPKGEYRAGIDIGLDELLSVVSENPELRSFIVSGKEIKAFNQWFNKEKAKLQAQIDYLSNEMESGDYEATEKLKSKLREFELKQRVLSSHRKRWIEDNFHKIARKIVDILYETGHKVIYIGKNALESKRGINLGKRINQEFVSIPFRRLIELIKYKARELGMEVIEVDESYTSKTSPFADIKKVQELGKEKFKLIRKLEREKAKSEEEVDEEKVKALEDKIDRLREEIDKLSQGERRGNLFKDKIVDKVFHSDLVGALNILRVGAKLLKFSFYENSKALFVKLCNPVRLELVELIYQVSPEFLLGIGGSSATEGLRGRTGIPRRVNRFCA

SEQ ID NO: 33638 - protein, 418 aa, unknown
  TnpB Polypeptide
MIIMKNIEKFEVKNDDKESKIKVTKSLIVEYEENEEMEKLLEDFKDMVNFCIEKGLKYGCSLKKLHQNCYKELKKRYNYHSIFFPEAYRIAQSIIRSWKANKGKEKPVARKKLLRLHKAIFKIDLENSQLIVNYKPKQKIYLNLKLSDYQKQQIKSASEIGEVLVNEKHVYIPLAHEINLTKPEKFVAIDVNENNIAFVSSDGKFGKIVTGVKELKVGYAEKRRKIQKIRNKRRRERLLKKYKEREQNRTKDALHKISKFIADNFKGYGIIMEDLKCLRRTVNRKVKKLNKYNHKIQKVSVNSDFLKFRLNSFPFRMIQFYIQYKSLLNSSPVYFVNPKNTSKICFRCGGSINSSKYCPKCGLDRDINACLNLLKMWGLPPPESLFNANMTLSLTIKIKDEEKVEDLRKRNWGLYKRF

SEQ ID NO: 33639 - protein, 362 aa, Desulfovirgula sp.
MRRTNVVRVLPGKQQRQVLETIGDRCAALWNAVQYRCRQAFFKGEPVPSYAALCSEFKEHPAYRALPAHIGQEVIKKARKAWDSFFACLRLYRKGELERPPRIPRYWKDRRTGKRTFCVIPVKAPTSYTLNSRTLSLTLPRDLREKHGGRLVLRTKGVLRFHGTPKTLELRYDRAKKRWYAHQVVEVPEPERKAKPEKYAALDLGARILAALAIEGVSRQILFSGRKVWKDFLYWTKRIAEEQARLARAGRKTSRQLRKLYQTRARRLRHAYLALAAEIARTLSQHRVTTLFLEDPPDGHPGGHGLRAEEPPGAQLLGRETAEKPHRGRLYAGRDTGSARGAARHLFRVCRLRFPRQASRQA

SEQ ID NO: 33640 - protein, 434 aa, Desulfovirgula sp.
MRRTNVVRVLPGKQQRQVLETIGDRCAALWNAVQYRCRQAFFKGEPVPSYAALCSEFKEHPAYRALPAHIGQEVIKKARKAWDSFFACLRLYRKGELERPPRIPRYWKDRRTGKRTFCVIPVKAPTSYALDSRTLSLTLPRDLREKHGGRLVLHTKGVLRFHGTPKTLELKYDRVKKRWYAHQVVEVPEPARKTRPEKYAALDLGARVLAALAVEGLDRQILFSGREVWKDFLYWTKQIAEEQSRLNQAGRKTSRQLRRLYQVRTRRLKHAFVALAAEIARILKQHRVTTLFLEDLTGIREDMDFGPKNLLVHNFWAVRQLRNLIEAACTRAGIRVVPVEPRGTSSRCAVCGSPVKRPARYKVVCERCGCVWHADANAALNILLWGSSKGHGAEATPLKPLALRWDRHRWVSRFESAAGTLYATSGSRMAARAA

SEQ ID NO: 33641 - protein, 397 aa, Erysipelotrichaceae sp.
  misc_feature (54)..(116): Xaa can be any naturally occurring amino acid
MVCRYPKDKTVGVGMNKGVKFRAYPNKKQQNLINQTLGCCRLIYNKGLAMRNGXXXXXXXXXXXXXXXXXXXXXXXXXXXXXXXXXXXXXXXXXXXXXXXXXXXXXXXXXXXXXXXRGFKNFFEKRARHPQFKSKHNNHQSYRTINQGDSIRIIGKYIKLPKLGYVKIRQSMEVGHINNVTVERTPAGKYFVVLNVDFEPELRPNAGCMIGIDVGIKEFYSDSNGNVVNNPKYLEKSMRKLVREQRRLSRKQKGSNNRNKQRVKVAKVHEKITNQRNDFLQKQSTMLVSENQTICIEDLNVKGMIRNHKLAQHIASCSWSKFFAMLEYKAAWYGNDIIKVPTMYPSSQTCSCCGYKNPLVKNLSIREWECPNCHAKHSRDTNASINILNKGLSLSVS

SEQ ID NO: 33642 - protein, 335 aa, Bacillus sp.
MMINKAYKFRIYPNKTQATLINKTIGCSRFVFNHFLSLWDNAYKETGKGLTYGTCSAKLPAMKKEFVWLKEVDSIAIQSSVRNLADAYTRFFKKQNSAPRFKSKKNNVQSYTTKQTNENIAVVGNKMKLPKLSLVRFAKSREVKGRILNATVRRNPSGRYFVSLLVETEVQELPKTQSSIGMDVGLKDFAILSDGTTYKNPKFFRSLEEKLAKAQRVLSKRIKESTRWNKQRIKIARIHEYMKNARKDYLDKVSTEIIKNHDVIGIEDLQVSNMLKNNKLAKAISEVSWSQFRTMLEYKAKWYGKQVTVVSKTFTTTTRIFTTTNFHIVIELFFE

SEQ ID NO: 33643 - protein, 244 aa, Merismopedia sp.
LQFIKKSDGWFVNLRLEDVTVPSFAPNEIVPDWDNSIGLDAVLHEDSYLATSENTKLPSLKVLRNSLEKLAQISKKKNLRKKGSASRRKLAKKQGRQHQKIARARKDFQYKTAHKLVQTGKKVFFHEGLNLKGLTRRNAPKQDETGAYIPNGQSAKSGLNLSWADAAFGQFFEILSHIAGKAGAKVIAKNPAYTSQLLSYRDEFVFTDCGIREYWDDVEKLLVDRDVNASIKCDSFSRNRAIGG

SEQ ID NO: 33644 - protein, 541 aa, unknown
  TnpB Polypeptide
MPRTRTPSFIAEIPLQATGSQEQTLEVRFRMAQQAYNACLGEALRRLDLMRERTAYQAARKLPAGNARRDAFRDLRALFAFSEYGLHAWATRYVSHTVLGDHLDVNTIQTIATRAFRAVEQYGFGVRGRPRFKGQNQIDSVEGKGNKQGLRWKEGALVWGDLTLTGIIPPNLSSDPSSNPVLAHGLTHPIKYVRLIRRRLNGRVRFFAQLVCEGQPYRKAQHIVREGVVGIDPGPRAFGVAGPDWGAQVDLQTPLTQSRQVIRRLQRQIDRQRRTNNPTNDNSTGTVKKGKLAWVISKGRRRNQVTLAEMHRKATAHRTSLHGRVAHAILSRGSTIVIERNSYTSFQKTYGTSVGTAAPATFVAHLTRLAESAGGSVVRAPVMLRLSQTCLCGTIRKKLLSERVHHCDCGITVQRDVWSAWLARFAVATPTKKGTGRGKAGKDLVTWRLDAEAAHVAWARLPKLGCGPACGVSPPLTGAVRRVGGAMGQARTSERSRRQVGPRCRGRGCVSCDGVGGGRRERSTENQGGHGCCSARTPLAL

SEQ ID NO: 33645 - protein, 587 aa, unknown
  TnpB Polypeptide
MLFNTLMFMKLYLLDYFEKNNSLPTIDRLFVNSCMKIMCKEAINGRPPKKEVRELKDKLLAFYNTDFKPFIQEETLDYTHLNNVLEYLTISLMTMYENNIKMHYVEYVERYINVVWKKKDIIRQIKEEYTDTTIQTNLINEFCRQLRKLKLDILDVSNVYKSDEKYHSWIKEVKAYITPNKQKYQKDNLYYDLQCTPQDYLPCMIRMMKEVEKEGVMIYNIFPMRNDVIPHSIKLDTTTLVNLLFTDKQGKKHHYLTEGNLKKNEDKIWNFFFRTERKCFNKPKYSFHHMIETDGVSSSILMLRNDMIGKRIPTTKISLNTEQYIDELKDYSNIKNKKIVSIDPGMSDIIYCVDNDNKYANEFRYTQDSRRKECKIKKYSKLILQFKEEKVDGKTIIQHETELSKLNRKTLNINAFKEYISAKSLLNHKVYPFYQRFIFRKLKLNAYINKKKNEQKMINKFKKVFGSQEDVIIAFGDWEQKQHMKYKEPTKGKGIRKLFRESGYKVYLVDEYRTSCMCSKCCEGKCEKFIIRKNPKPYKKANILVHGALICKKCNAVWNRDVNGATNIFRIVKNIIDKRERPKYLCR

SEQ ID NO: 33646 - protein, 374 aa, Symploca sp.
MKTLKFKLYSHKRNRYLKQVINAAGIIYNHCIALHRRYYRWWGKHLNCARLQKHIAKLRKHNRFWQLVGSQAVQDICQRIDKAYQLFFKHHNKGVRPPGFKKVKKYKSFTLKQAGYKFLGGNRIKIGSRVYQYWNSREIEGTLKTLTIKRTALGELFLIVVVDGYSTPAVISETGKIAGFDFGLKAFLTCSEGFKIESPEFLNSSLSALRSASKQHSRKHKGSTNREQARKQLVRCHEAISNRRRDWFWKLAHKLTDQFDVLCFETLNLKGMQRLWGRKVNDLGLGDFLQILEWVAHKKGKQIIYIDPWYPSSKTCFCCGHVLDELDLSIRRWRCPSCQSVNDRDENAALNICMVGSSTLGVGDVRQAQPAISV

SEQ ID NO: 33647 - protein, 448 aa, unknown
  TnpB Polypeptide
MLKQKYTTVTQLHEINNKDIIEYFENASVYFCKLQRKAFHIFKNENIKGNKIDYNILLKKFMTDYKISRRTANSILKDVQGRIKALVALKKYEIFQKQTKIKSLKEEIGKLDNKILEFQETMKNKIKVRHLKYWNLKQSRAFKKMKLNKFQMRLEQLKWEIKTGNYKLCFGTKKLLKSDKKEFILQRDSQIVYIGSQDETARNHMFQLSYNNRNNQFNIKIRKDFGFDTETKRVFGKCYFNNHKKKLIEALKNKNSTPLTYSIIRKNNRYYLHCTLEYRLENESMFLTRKTYGTIGIDFNKGFLAISEIDSNGNLIKTDVLKYRFGKGNKTKSDLEKCISLILKRASETGKNVCFEDLTFKYKKSKTSKGKTDKDKKYNNMLHSLAYSLYDNLITTIAFRNKIGIIKVNPAWTSWIAKNKFCDRMKLNIHKGAAFVIARRGLGIKDTI

SEQ ID NO: 33648 - protein, 393 aa, unknown
  TnpB Polypeptide
LNEWFDTTLYVYNKTIECIKKGSNPLDKQGLRNILVTNETRIQNEEYAGLKLQLKNLEKEKEKNKEMILSIKQQIKNLPIHKNPIEEWELNTPKDVRASVIDDIVTAHKSAFTNLKNGNIRYFNIDYKKKDINRRCLSLPKTMVKNLNGKIKIAPTYLKGFSEFNMGKRTIKKYKDLKIEHDCKILKENKDYWLLIPIPLIVHPKEKAVNYCGIDPGVRTFMTTFGNKGCFEYEHNENYIKRIDKRIQKKLKRTEKRVRKRTLQRLENKKKNLIDELHWKTIRSLLKENDVLFYGDIKSHDIVKDGKNKTLNKDLNNLKMFKFKTRLLFKTKEFNKLTYVISEAYTTKTCSSCGTLNDPKSSKEYHCVSCKKTMGRDMNASKNILMRGIKTFL

SEQ ID NO: 33649 - protein, 419 aa, Halapricum sp.
VADDYVRRTAITRLEVSDEQRALLEDTISEWKRGCQIATDMAWGKCNAKSDVQPLAYDELREQTDLGSQHAILATHQAAQAITGCIERLSAGKKVSKPTFSAPTVKYDTRTMTLFDDGTVSLSTTERRVRCDLALPDADDGYQRQYLDSDEWSVTESTLTARDGDYFLHIGFRRHKTDAERNTAEDGTVLGVDLGIENLAVTSTAYFFSGRELTHDLHEFEKVRAGLQQTGTRSAHRTLEQSSGRELRYIRDVLHRASNAIVDEALRYECDVIAFEDLTDIRDRTGASWGHTWAFRTLYEQVEYKAQAVGVSVKQVGSAYTSKRCAECGFTADENRATRNDFRCVKCGSEANADYNAAKNIGMRYVRRGQQSSRRTGNSQLALKSGTVNASGDYTAHRDSVRAGVHGQAPSSNASVSER

SEQ ID NO: 33650 - protein, 429 aa, Halapricum sp.
VSSCEEYHRRTAVTRLAVSEPDATVLRQTVSEWKEGCQIAVDMAWDHCQSKSDLQRLAYDTIRDQTELGSQHAILACHQAADNIASCIAQRNAGQEVSKPNYTSPTVAYDSRTMTLYRDAEQVSLTTSGDRSRVRADLVLPPDEDGYQDQYLDSDEWELAESTLHHRGGEWYLHIGFRKLKPERQTTENGTVLGVDLGVSQIAVTSTAGFYSAGKLNHERREFDRLRRSLQAHGSRNAHRTLESVGEKEGEYVKHTLHRVAKELVEEALRYNCNGIVFEDLEGIRERLPAADWHSEWAFDRLFNYVEYKASFEGLFVDTVNPKNTSIRCAECGYIHESSRQSRSEFECGNCGNRNHADYNAAKNIAETYLWREQQSSRRRGVSQYALKSGTMRLNRGFIPYSEQSEVESMDKSRSNSESTRMSDHGRDS

SEQ ID NO: 33651 - protein, 385 aa, Halapricum sp.
MTDLVVRTVVARFVEPTAHKQRKIEALRDTYREALHEAFEHNATTMSAVNDIVTPYELPYQAKDALKSFVPTLYRGTKAQELNENHPVRFVNRAATFDRSSDRTHEFCWRVPQAGRGNAFWIPLQINPTQYEHWESLCEDPKSAGELRLLQRQDRWELHVDIKYVSAVSPETDPTTVLGFDVGESALVTGCVLCNGIPTQPLLVDGSRAKRLRKERETTIRRLKRRNAPRKRLREQYTSFANAIEDIIEKSSRQAIEYASHFEDPLIVMEELTHMRDDIDYGAYMNRRLHGWAFARLQRRIEQKAVDAGMPVTYVRPEYTSQICHSCFHLGSRPSQAMFECRNEECHITTFQADINAAANIARRADPWGESCPWKPDQHRRTGDC

SEQ ID NO: 33652 - protein, 411 aa, Halapricum sp.
VADYHHRTAITRLETTDRQAARLEHTIAEYQRAANIAVDAGHEIGERRKTRLQARVYEDIREGTELASQHAILAIHQAAEALRGVHQLRAHGRSPSKPKFTSPTVTYDSRTMTVDRDDESVSLTTTDRRIQCRLVLPTDDDGYQQQYLYSDEWELTESTLTARDGDYFLHLGFRTEATDDTTECGTVLGVDLGIENLAVTSTAQFVSGRELTHEHREFEKVSGGLQQTGTQSAHRTYVKRGSAQARFNRDYLHRVSNKIVHEAVEYGCTHIAFEDLRYIREGMPGRRKFHQWAHRQLVRCVEYKARAEAIEVVFVEPANTSRRCSECGYTSSANRIERDLFECQDCGSEANADYNAAKNVGLRYVRSGQQTSGRTGDSRLALKSGTVHPDSGFVQYGSQDTDKSTPSEATS

SEQ ID NO: 33653 - protein, 447 aa, Halapricum sp.
MDITLRCRAYPDEETASEAWRHIEIHRQIRNHAIRDYYSHDYGNRPTAYDQHRKLTDWKQRWPLFSDVSAHAAQQTVSEIHKNVETQKGRRENGHKAGRLKWQGSGERRSVAYQSEGFNVNHTTGQDGYATVRLSKIGHIPIRAHRELPATEQIKRVVLKKERTGDWFVSLVTEQADDDLPEKPSPDTLDPADCVGVDLGILSYIHTSDDTAVDMLDLSDEYDRYGREQRKLDRKEHGSNNWEKQRQRVATAKRQIKRKVLDYQHKLTTWLVQEYDLVAVEDLDVKPMLETSQNAKNKQDAAWSRFLDLLEYKGDLYGTHVVRVEPAGTTKECSECGVETSKPLWIREHSCPACGHTEDRDLNAAKNILSRGRKQIGAGRSESTSPETEDFWCENESQSDSLTPVQTALPTGTISVPAKRVVEAGSPEVVRKTESSVMTRDEASRTT

SEQ ID NO: 33654 - protein, 382 aa, unknown
  TnpB Polypeptide
MHRAHRIRLNATPEQAAYFWRCAGVARFTWNWALGEYNAALARGEKPSLAALKREFNRRRSEDGFAPWVGEVQSYAYQYAFQDLQAGISRYHERRNADKLKPPPGWKPRKDDRPFGWPRFKSRDKTIPAFGLANNGGIRCAGHLAQIQRCPGGPVNMAEELRFAGRILSGRVSYNAGHWYLAVTVDLPDPQPEPLPGRVGVDLGIKSLAVTSDGVIYENPKHLRNSQRKLAHLQREFSRRQKGSRNRAKTKAKIAKVHARIANQRREVLHELTTDLARSYGTVVVEDLNVGGMLLNHHLAQSIADASFGEIRRQLEYKAPAHGSQVVIANRWYPSSKTCNDCGQIVDLTLADRTWTCPRCGVVHDRDVNAACNLRDYAAVTG

SEQ ID NO: 33655 - protein, 412 aa, unknown
  TnpB Polypeptide
MLVRGVTFQLESDLPSEARFLLEDFRLAVNNAIRAGLQARVSSKYALTKLAYKDFRKDHPGMYSQHLVSAFEVAGSALKSHRRRLRKSNPSGVPYVKRLVMKAENQAYKLDRVNGVIDLPIRAGLHVQLKLVVSQYHRRYLDDTTLTLGSLTVIPDRVVIAFRKGEKKPYVPETTLSLDTNEGSLDGVFFEGGVCTPAKAAFDEVAVIQARHQDRRRRLQKKKAHDRRTSRRLCRREGRREHHRIEYRMHQIANAVVDFAEERKAAVVLEDLRGVFKPRRDKGLNRRLSMWPRRKLHQFIEYKAAWRGVPVIKVNPYNSSRRCPTCGTIQHSRMGARFECECGWQADKHVNAGINLLQTAFPKGLAGGLRFSPGAFQHDVVMILYDPVRGARSEPNGASQLSKWSEGLPHDC

SEQ ID NO: 33656 - protein, 635 aa, Streptomyces sp.
VEEKTGVVLSAAVLAQRVGWAADLVSGMAGELLAEHWNAADVDVLASGEDAGGRRLPSNAWMALRRLGWTVAPAEGVRANDRIVRMAQEQAGRALRSAHWRAELTSAVLRTWPCDPGRRTPEEWDRVREAVPGGRYLPSSVIRSRTRQITAFAGKHGRLPADVFELEAPPRAARMLLLSACDGQQATIERGEGDPQRGLLRLQLPTRPDPRSYRDWTWVACPVTLPPTVPPGAVLHLPTLRLAGAKVRADLAYTHAVPKTSRTGHTVALGVDWGLNTLLSAGAARLHDDGHITALGHGAQFRAAGVLARQYRLRRLSEHLHAKAAQYQRLIGADTQHELSGRHQVLQEEIRCVSERRSNLNDALAWAAARWAVDQAVAAHATVVYLEDLRSMEAGGMGRTHNTRMSQTVRGRIADRMRHLAAEAGIAVVTVPPRNTSRHCPRCLTLLRHRKAPDRPTAPGWKWALCPDRAGCGWQGDRDHGAWQRITARGLTHQDKTVTDRTTGQMVIHTVVDTFETQAVITPTAQTSRADRSKTGPTRRKTTCHAPRRRRAPSPTGPSGPAGKRPEGHAPTGRRTLPRAAHRHQGVTAISTPTTRRHRPRGAALGAGFHLHAHATPPRWAQTMPDATSGMGSPS

SEQ ID NO: 33657 - protein, 323 aa, Saccharothrix sp.
MDQPLAIVWSRPLPEGAEPSTVTVSCDHAGRWHVSLLVETAVAHLASTDATVGVDAGITSLVTLSTGEKITNPRHGNRDRARLALAQKGLARKQKGSNNRAKARRKVARVHARITDRRRDFLHKLTTRLVRENQTIVIEDLNVSGMLRSGSLARAISDAAWSEFRSQLEYKAAWYGRDVIAIDRWFPSSKTCSDCGRLLDTLPLGVREWTCPGCGTAHDRDVNAARNILAAGLAVAACGGGVRPTRQQSVRRSPMKQETQPERVGIPRLQAWGGSQSTRPSAVVTGQRGSSSWLAQVSRIQVCAGSSQNARDRSAPGPANTFR

SEQ ID NO: 33658 - protein, 385 aa, unknown
  TnpB Polypeptide
MNKAVKYRIYPTNSQAVMFAKTFGCCRKVYNLMLSDKIESYKKTGRFALVTPAKYKAEYPFLKEVDSLALANVQLNLQEAFSNRFCKTRKARNGFPKFKSAKRSRKSYTTNCQYPKPSNNLRHPTIRIEENAIILPKIGRVKAVIHRRPDIRWILKSVTVSQEADGTYFASVLFEFEHKTISAPLSDNAIGLDYASNGLYVDDQGNVGSNHKYYRESHKKLAKEQRRLSRKRGSRKGEERSKNYMKQLRKVGKIHRHISNQRLDNLHKKSTEIANRYDVVCVESLNIRAMANKSFGNGKATLDNGYGLFLSLLEYKLSDRGKHFIRVDKWFPSSQLCHCCSLVHPEMKSLKIRTMHCTCGLTMSRDQNAAINIKNEGLRILKSTA

SEQ ID NO: 33659 - protein, 475 aa, Catellatospora sp.
VAAGGRGVKATRIAHSHRLNPGKYRALAEQARRLGRVRCLVWQRHGSVGGAGLSGRLVRDRWLAEGTHRGFGVLANAWKETVRDAMADIAANRAAAKVKVRRAIGRHTSDPAERRRLFTALKAELWAADAYLARQMRRHWRRGRNRTHDQIVVRADQHNTRADARGRLWLAVPGLQQRAMVKIPLRTTFAPTGTLRLILREDRVEIHYQIDAATMNTSRRPCGSATIGVDKGYTEVLTDADGEHHGTGLGTLLTTESDRRKDKGRRRARLRSIANHAAARGEKAKADRILRNNLGTVKKNRRDKAWRARVRTETFAAVHRVVDKAATVVAEDLTKTFAVRKPLGRNVNRRLAAWTKGVTAEALKSVSERRGSALVSVNAAYTSQACHRCSGLGRRNGDRLHCTWCRVVWQADVNAAINIQARAGDSDIALHTPHHRVKQILLERADRHRTRLPVQDSSYHPAAESETSDLLSYEQ

SEQ ID NO: 33660 - protein, 277 aa, Campylobacter sp.
MNTFFKMRYHRDLPNTYKFNQITIIKNHNKYYLAFSIIYDESNVSLISSKDFDIKKAVDIDLNINEITLSSGELIATNSKLLSRAKYDLAFKRLQRKQSKRILKIKKEKTKLSHNFKKTQLKLNKIYEKSSNIKKDSYHKITSKLIQEFDLLAVEDLQIKNMSKRAKLKNIKAKSGLNKSILNISFYQFSQYLEYKAKHNGKFFIKVNPQYTSKTCSVCGNIKKNLMFKDRVYLCEKCGNTLHRDINAANNILKRGLKSFGLGISLEDYKLKAFRIS

SEQ ID NO: 33661 - protein, 435 aa, unknown
  TnpB Polypeptide
MHYAYRFRLKPTAQQRELLDYHRDTCRQLYNHALGEFNEIPESAGTLNQRVRQVRDQLTDLKEWWDDLNDLYSTVAQAAVMRIEDSIKALSELKEKGYNVGSLNWKAPKDFRSFTYVQSGFEFDKKNGQTVLSLSKLADIPIECHRRIPDEESVKEVTLKKEPTGEWYASFAVDDKEEPAKPSLEEIDADEMVGIDVGILKYAHDTDGTAVGSLDLSDERDRLEREQRKFSRKEHRSNNWEKQRQRVAECHLDIKRKRRDFLHKLSAYYAREYELVAVEDLDVKGMLESPGNSRNTASAAWNTFTDLLEYKCKREGTHFVEVDPEDTTKECASCGVKTDKPLWVREHSCPACGFEADRDANAAWNILLRGLSELGVGHSEETSPEIEDFWCANESRRDSSTPVETALPVDTAVVSAKRVVEPGSPCLKEPPLAAP

SEQ ID NO: 33662 - protein, 392 aa, Marinospirillum sp.
MLKATKVRIYPTSEQAEFLNRQFGAVRFAYNKALHIISSQYKRHGLKLKAKKDLKPLLAVAKKSRKYHWLKDFDSIALQQACINLDKAFQSFFDPKLPARYPKFKRKHGKQSSYHCTSVSCGNDWIKVPKLKQPIKARIHRALAGKLKSVTLSCTVTGEYYASLLHEDGAETATPMQSLDESKVLGLDMGLTHLAIDSNGTKELNPRFLKKASANLRRKQKALSRCKKGSKGRAKARLKLAKAHQRLANARANFQHKLSRTIVDENQAMIVETLKVKNMLKNQKLSKHIADASWSGLIHKLEYKAKEQGKHLIKIDQWFASSKTCSCCGYKLEELPLEVRNWQCPACSAWRDRDINAALNIKAQGILKLKAAGLSVSANGGKRQSGRAPVAA

SEQ ID NO: 33663 - protein, 370 aa, unknown
  TnpB Polypeptide
MEYSYKFRIYPTRKQENLIQRTFGCCRFVYNYYLAQRIAQYNETGTSPTRFEQDKDLTQLKRKLEWLREADATALQAALQILDTAFQNFFRGVKEGRHIGYPQFKSKRNRGKSYKTKRVGENIAIVGNRVKLPKLGLVKCAVSKEVKGRILSAVVSQAPSGKYFVSICCTDVEIEPLMPAGAVVGVDLGIKALATTSDGTYYANNRHLYDADRKLRRLARRLSRKKKGSNNYEKARIRKARLEEKIANQRRDDIQKATTDLIRKYDVICLECLKTKGMMQSHRLARSLSDASFSEFRRELEYKAEWYGRKVSVIDTFYPSSQLCSCCGYKKQGVRDLKVREWTCPQCGTHHDRDRNAAVNILQEGLRLIS

SEQ ID NO: 33664 - protein, 401 aa, unknown
  TnpB Polypeptide
MELTKTVVLKLRETDNSLDKTLEKYAEGMNFASKVVYENKKPLSANKLQKITYKHLREKIGLKSQMSCNVARQVAGAYKTLQKQLKEGKTRWQQIKFKPTNITFSYRRDFSINKKEVSITTLDGRKKYKIANYRYAEKYFDSSWKYLASKLVKQKDDSYYFHLSCWKEMIEEPDITKASNFMGVDVGINYLAVATTTDKKKNRFFSGGEIKNIRNIFSKQREMLQKKGTRSAKRVLKHLSGREKRFMRCVNHVVSKKVVAFAKENKVSVIGLEDLKGIRDRARVRKKQRYRHNSWAFRQLQNFIEYKALEQGIGVVYVDAKYTSQTCSRCGHINKNNRNGLNFLCKTCGCGLNADLNGARNIEHRTRDFRHVLESQGCVVNHPYGNGYCLAEFQAPSEREG

SEQ ID NO: 33665 - protein, 433 aa, Persephonella sp.
MATTVLDKKQKIKESLKKTKEKRKNQIPKVYQLKISYSNLNNQQKHWLERVFLEAKWLYNYCIADIPNRLTPQTEKIKQIEVKTPKGIETRQITCLSSQMKQGILDRIKKNLSDLSKAKQKGIKVGKLKFKSDYRNIPLKQNGITFKILKDKNRIKLQGLKKPVRVLGLHQLPENCDIAKAELIKKPDGYYIYLTCYIDKKQIKEEKINKPIAIDFGIKHQLTLSNGIKINYRIEETKRLKRLQKKLSRQKKGSKNYQKTKQKIQKEHQKIYNRRKDIQNKIISLLKRYEYVLIQDEAVKQWHSGLFGKQVQNTGIGGIISRLKQNLETLISVDRYEATTKTCSNCGSRKEDITLSDRTYRCEKCGLVIDRDLNSAINILKIGLQKVEKTTIKNIGLDRPELTPVEREASARIFKDNPYIRVSYASLKQEARL

SEQ ID NO: 33666 - protein, 449 aa, Massilia sp.
MLLSHRIRLEATSEQRDYFARAAGTARKVWNWALAEWQRQTALGQRPDAMKLKKQFNGIKYTHPDWLDAESKPWLRTIHRDAHAQPFAHLQRAWRRYVEQQQAGKKAYPPTFKRKGRCRDSFYIANDKIRFEGKCAVLPKIGEVLLAEVLRLPGKIMGACVSREADHWYLAVQVKLPEQLVRLQRQGDGVVGVDLGVSAAAVLSNGEKIAAPRPLRASQRRLRIRSRRHARKLKAEKASAGITGTIPKGVRLPVSRNRKKDAHALARLHAHITHVRTDFIHKLTTRLCRENQAIAIEDLNVSGMLANHRLARAIADVGFYEIRRQLQYKAQRYNTLLVLADRWYPSSKLCSICGAHYTGLKLGERHWTCICGARHDRDVNAAINLQRLATGALVARTALPEASHAATYGTAAGLVPAAGGKVTPVRYEYGQQDGSGQEENGVHLCAPFR

SEQ ID NO: 33667 - protein, 447 aa, unknown
  TnpB Polypeptide
MGYTVVQRVVTPDEWVYGYLDIFARKAKLLYNAALFRIRNIFTGYRKDHRTENESGVFAEVQLLQTAYPGKTVRRVITYYQLEKLLRVTENPDFFAGLPMQTAQAVVKSAVTDFKNWLASLKAYKKHPEKFLGKPKMPGYKKSDLCTFAFSNQDLVLYPQETGVQVKLPMTKTRLSFSNISADAFLKEVKVKPYYGRYLLFLTFQEADPVPADDRPYSCAIDFGVDNFAAIVCGDHSSVIYKGGAVLSSCQWFHKQRARLAGILTKGHTYKQVSSRQMTNLSYHHANFVKDQCHKISRSIIHYCLEHKIGTLVLGVNKLWKQKTEMGKQNNQSFASMPIALLRGLITYKALNAGIKIVEQEESYTSKADVTAGDTIPTYGVDDEKAVFSGNRQGRGLYRCHDGKLINADCNGAANILRKAFPDIWKDTTDFGFLATPAVVGFHQLNP

SEQ ID NO: 33668 - protein, 389 aa, Thermosporothrix sp.
MKQKRAYKYRISPTDEQKHRLARTFGCVRFVFNWALRQKTDASYNEHKWIYYKDLSEMLTALKKQDEYAWLNDASSVSLQQRLRHLEKAFITFFEGRAQCPTFKKKRHQQSATYTSNAFVWRNGMITLARMNEPLDIRWSRPLPDGSKPSSVTVSKDSAERSFISILVEEDSEHLPPSVQSVGADLGLKSLVVLSAGEMVGNPKCFAKDEKKLAKAQRRHAKKKKGSNKARKKVARIHARIADRRRDFLQKLSTRLIRENQTICVETLAVKNMVKNEKLAKAISDVGWPEWVSQLEYKANWYGRTLVKMDRWYPSRKRCCACGHLLDALALDVREWTCPACEVHHDRDINAAKNMVAAGLAVSACGEAVRPDAVKTKAGTPRRSRKARP

SEQ ID NO: 33669 - protein, 318 aa, Thermosporothrix sp.
LQEQEAWQEGLSQIPTKQPERRVQADWLELDADGRHILFTDGCGIGRLKLVGNPHQRIQEFPMKQIKRVRIVRRADGYYSQFCVDTERKVEHVLSGKQLGIDVGLKSYLTDSEGNTVENPRHSRKAEKKLKRLQRRLCRKQKQSANRKKARKALARQHLKVQRQREDVARKMANASVSSSDLIAYEDLQIKNMVRNRTLAKSIHDAGWGTFIRWLNSYGALHAIPVVAVPPQYTSQNCSACGTTVKKSLSVRTHICTGCGVVLDRDHNAALNILMRALQYVSNGTVGHTGTRELDSRNASGDLAAPASSKRRRGKSGR

SEQ ID NO: 33670 - protein, 361 aa, Thermosporothrix sp.
MKQTMLLKLAPTEEQHQALLETMHAFNQAANSVAEVAFREQSANTFALQKLVYGELRATYKLPSQLAIRCISKAAEAYKRDKSIKPSFRETGAIVYDPRVMSFKDLHQVSLLTLSGRVLVPFRIGGYQEARMGSIKGQADLIYRNGTFSLAVTLEVPTPDPSEPEGGMLGVDLGIVNLATDSEGETFSGEAVERNRKRMNALRQRLQKRGTKSAKKHLKKLSGKEARFKKNTNHVISKRIVQKAKDHRQGIAIEDLRHIRSRTDSTVRKSQRNRHASWAFGQLRFFLSYKAALAGVPLHTVDPRNTSRTCHACGHCAKENRKSQASFVCRACGLAAPADWNAAINISRAQVKMPIVSSLSA

SEQ ID NO: 33671 - protein, 404 aa, Thermosporothrix sp.
MLLYEYKLSGSRQQDAAIDEAIRIVQFIRNKSLRLWMETRGTSKNDLQCYCAVLAKEYPFASRLNSQARQASADRAWFAISRFYDNCKNKKPGKKGYPTFQRNNRSVEYKTSGWKLDPDGRHIIFTDGCRIGRLKLVGNKKQSIETFPVKEIKRVRIVRRADGYYVQFCVKTERKVEHVPTGKQLGIDVGLTSYLTDSEGNTVENPRHYRKAEKKLKRLQRKLSRKQKKSANRKKARKALARQHLKVQRQREDFARKMANASVSSSDLIAYEDLQIKNMVKNRTLAKSIHDAGWGTFIRWLNSYGALHDIPVVAVPPQYTSQKCSECGTIVKKSLSVRTHVCTGCGIVLDRDHNAALNILHIALQYVSNGTVGHTGTRELDSRNASGDLTSAASSKRRRGKSGR

SEQ ID NO: 33672 - protein, 346 aa, Thermosporothrix sp.
MLLYEDKVSGSRQQDAAIDEAIRIVQFIRNKSLRLWMEQRGTSKNDVQTNCAVLAKAYPFASRLNSQARQASASRAWFAISRFYEHCKNNQPGKKGYPTFQHHNRSVEYKTSGWKLDADGRHSIFTDGCGIGRLKLVENKQQSIETFPIKAIKRVRLVRRADGYSVQFCLKTERKVEHVPTGRKMGIDVGLKAYLTDSEGNTIENPRHSRKAEKKLARLQRRLSRKQKQSANRKKARKALAKQHLKVQRQREDVARTVANASVSSCDLIAYEDLQIRNMVKNHKLAKSIHDAGWGIFLQWVKRYALLHGIPVIAVAPHFTSQKCSECGTIVKNRSVFAPMFVLAVE

SEQ ID NO: 33673 - protein, 413 aa, Thermosporothrix sp.
MATRVRGYKTELDLNNEQRTACLKHAGCARFASNWGLARSQEAYRATGKRPTAIDLHKELNALKKTDYPWMYEVSKCAMQEALRDLEKAYKNFFRRVELKKQGKWKGKLGFPTFKKKSKGIGSFRLTGSIKVLREAVQLPRLGRLRLHEHGYLPTNAKVLSATVSEEAGRWFVSMQVEEEQNAPERTATTALGVDLGMKTLATLSDGTTFENQRALKQAQKRLRRLERQKSRRKKASQNRKKTCRKLAKQHARVAHIRCNATHKLTTYLTKHHALVAIEDLHVSGMLKNHKLAQAIADSNFGEIRRQLTYKADLYGTCLVVIDRFYPSSKTCSSCGSVKPVLDLQERTFVCEACGMVLDRDQNAALNLLHEAMRTTGSSSGSDACGVGSSGFSDGKSETLHVEAGTNPHLGMS

SEQ ID NO: 33674 - protein, 334 aa, Thermosporothrix sp.
VKATETVKSALTWKIKKEKVFLKRVEKAKKQGKPMPVFKPVRCPHSESVCIRYDQRSYWIKWDTMTCRLATMNGRVELPFTVPAHLQQYLGHRICSADLCFRKGRYTLHIVVSIPKPVVTPSQEVIGVDLGLNRLAVTSQRHFLAEKRWKEQERRLFRLKRKLQAKGTRSAKRHLKKLSQKQFRQRRDQDHVLAKRIVEHATPGSTIVLENLTNIRERTTQRKSAQQRRLHSWSFARLYLFVEYKAQARGIAVVRRDPWHTSQTCSKCGYQHRSNRRSQSLFLCRQCGYQLNADLNAAYNIRDKYLACLALSGRSRESGPTCHVRRAIVSVLRG

SEQ ID NO: 33675 - protein, 408 aa, unknown
  TnpB Polypeptide
MSDLTKTIKLRINISPEQELLLRQMTEQYRQACNFVSKHIFDNQFNLAYQSLNRELYSNLRSQFGLKSQLAQSAIKTTIARYKTVKQQLFQNPYKYKDENGNWKYSTKTLEWLWKPVLFRRPQADLVRNRDYSFVDDGKTLSINTLNKRTKCTFRGEHFAEYLDGSWSLGTAKLVELKGVWYLHIPATKVVEEFQKENVRHVVGIDRGLRFLTVSCDEQGKTEFISGRKVAIKRHKFQEVRCQLQSKGTKSAKRKLKAISGRENRWMSDVNHQISKTLVQKYGKDTLFVLEDLTGVSFEESNLSRTAKQKYDLRSWSFYQLEQFLTYKAHENRSEVLKVSAKYTSQRCPKCGTIHKENRDHHRHLYSCLCGYRSNDDRIGAMNIQLLGTLWISGDNNPRYERITTASE

SEQ ID NO: 33676 - protein, 375 aa, unknown
  TnpB Polypeptide
MEQTITAKLQILVNPSDKQILCNTMKAYSNACNYVSEYIYKTHNLSRYSVQENTYYQVREVFGLRSQMAVSCVRTVIAKYKTILENQKEWIKPVFRRPQLDLVWNRDYSLNTKNDIFSVNTLGGRIKVSFYKKGFERYFANDCKFGTAKLVNKHGKFYLHIPVTCEISELKKSEISNVVGIDRGIRFLAVTYDSNGKSVFYDGNIVKQKRAHHKALRKQLQKVGTPSSRRRLKAIDQRENRWMQDVNHQVSKALVETNPDGTMFVIEDLTGIRSATERVKEKNRYISVSWSYYDLEQKLSYKALGHHQLVKKVNPAYTSQTCPKCSHTEKANRNKKIHFFCCKNCGYKSNDDRIGAMNLHRMGIELLVPDAVATE

SEQ ID NO: 33677 - protein, 399 aa, Kribbella sp.
MSRFRMYPTPAQRAALLEQCKHARYVWNLAVEQWSMWTRDKGPTPGYVKQCRQLTEARAAFSWLRLGVQTIQQQALRDFNQAVKNFYRGTHQRPTWRKVEIHEGFRIVGPEASKVVKLNRKWAAANVPKVGWVRFRLSRAVPEAKSYRIKRDRTGRWHIAFAAIPDPIPGPGTGAVVGVDRGVTVSAALSTGELLKCPGPSESEQARLKHLQRRLARCSPGSKRRRRVKAAIAKLYARAGDRRKDWTEKTSTDLARRFDVIRVEDLRIAQMTRRPKPKPSPEQPGSYLPNRRRAKAGLNRGILVNGWGMLVRRLEHKALGRVQKVNPAYTSQTCAACGHCAPGNRESQAIFRCVACGHQVNADVNAAVNIAAGRAVSARRETPVRVSPKREPQLATPAW

SEQ ID NO: 33678 - protein, 421 aa, unknown
  TnpB Polypeptide
VPSFYRSQTLKIEEQPIFSVVRSASADVWNACCYQMDMYQWQRGYPHAHRDFYFGKDCEGWIDKRLSNPILHSQSRQAVRERYFKSWKSYRAIKKNGSGHNPKPPNKEKEYMTTRWKKSGIRFVEGTLFGKRVELSLAQGQPKIDIPLPSNFDTSKAEHIATIDLCYNYGQWTLHFSYKYETETTEIGQEVVGVDIGEIHPIVSHDGQDTHIYNGRYIRSLYRLRNKVLADFSQTISRCKRHSKRWWRLTRRKWKRIRKIDNQIKDAVHKHTTKFVKYCHTKGIGSIVLGDLTGIRKSISYGKRANQKLHQWAFGKIAELITYKAKTLGIKVKVIDESYTSQTCPSCGNRKKPNNRNYTCKCGFKYHRDGVGAINIRTKYLGHFGVPVVAEMGSTRMTPPLGFRLTVPKVQVALSQIKECS

SEQ ID NO: 33679 - protein, 399 aa, unknown
  TnpB Polypeptide
MSRYRLLPSPAQEAVLRDHCAHARYVWNLAVEQHAHWRPGRAAAPGYLEQCRQLTAARQAHSWLAAGSQTVQQQALRDFAQAVTAFFNPANPARRPGWRKAGRDEGFRIVGQRGRQWAVRRLSRYVGQVRVPKAGWVRFRWSRDVPPGVKSYRVTEDRAGRWHVAFAAVPYPVPAPGNGQVVGIDRGVAVAAALSTGQLLHVPGPTARERARLRRLERKLARARQGSKRRARVKHALARLRAREADRRKDWAEKASTDIARRFDVIRVEDLRIGAMTRSAKGTRDSPGRNVRAKAGLNRGILRSGWGLLARRLEQKAPGRVEKISPAFTSQQCSACGQVDGKSRESQAVFRCTACGFACHADVNAARNIAAGHAVTARGGFRGAGPVNREPQLLASFRR

SEQ ID NO: 33680 - protein, 157 aa, Microbispora sp.
RVARAHARVADARRDFTHKLSTRIIRDNQAVVVEDLWVKGLARTRLAKSVHDAGWSALVNMLEYKAARYGRTPVKIDRWFPSSKLCSACGTLAGSMPLHIRSWTCPCGASHDRDVNAARNILAAGRAERLNACGGTVRPAAQRRAGPGETGSHRGAA

SEQ ID NO: 33681 - protein, 185 aa, Bacillus sp.
LHATIRRNPSGKCFVSILVETNVQEMPKAESTCGMDVGLKDFAILSDGTTYKNPKFFRTLEEKLAKAQRILSRKTKGSSNWNKQRVKVARIHEHIANARADYLHKLSTEIIKNHDVIGMEDLQVSNMLKIESLQKRLVKYLGHNFELCWNIKQNGMVNKLLWYLKHLLLVNYVPIVNTKTKKLKI

SEQ ID NO: 33682 - protein, 235 aa, Bacillus sp.
MPRFKSKKNTVQSYTTKQTNGNIGIVGNTIKLPKLGLVRFAKSREVEGRILHATIRRNPSGKCFVSILVETNVQEMPKAESTCGMDVGLKDFAILSDGTTYKNPKFFRTLEEKLAKAQRILSRKTKGSSNWNKQRVKVARIHEHIANARADYLHKLSTEIIKNHDVIGMEDLQVSNMLKIESLQKRLVKYLGHNFELCWNIKQNGMVNKLLWYLKHLLLVNYVPIVNTKTKKLKI

SEQ ID NO: 33683 - protein, 390 aa, Aphanothece sp.
MEKAFRYRFYPTPEQESLLRRTLGCTRLVYNKALHERTQAWYERQERVGYPETSTMLTRWKKQEDLGFLNEVSCVPLQQGLRHLQTAFTNFFARRAKYPNFKKKRNGGSAEFTKSAFKFKDKEIYLAKNSEPLPIRWSRQIPKGCEPSSVTVNLHPSGRWHISIRFDDPTIQPLPVNENAIGIDLGVTSLIATSNGEKIINPKHFKKHYKRLRKAQKSLSRKQKGSRNRAKARIKAARIHLKISDSRKDFLHKLTTRLVRENQTIAVESLAVKNMVKNHKLALAISDSSWSELIRQLNYKCYWYGRKLVAIDQWFPSSKRCSSCGHLVDKMPLSIRNWICPECGCNHDRDINASKNILAAGLAVSVCGATVRPEQSKSVKAGALKQKLKS

SEQ ID NO: 33684 - protein, 384 aa, Aphanothece sp.
MANKAYKFRLYPNQEQQAFLQKCFGCSRFVYNHFLRVTTDVYAEYKKHFRYKEWANLLVQLKKEFNWLSEVNSQSLQQTLKDLESAFTRFLKKLGKFPRFKRKSNRQSFRVPQHFSITEDNKLKLPKMDAISMVIHREVEGTVKSVTISKTPSGKYFASILTEQDIPKVPLNGGKIGLDLGLKDFCITSKPEKFKNAKYFQKSLRRLKIRQRRLSRKEKGSNNRNKARLAVAKVHEKVANQRLDYQHKISLKLTHENQVISCEDLNIKGMVKNRKLAKQISDVAWGQFLNLLEYKGELYGCDIYRVDRFFPSSKRCSNCGYIKEDLTLKDREWSCPECKAHHDRDVNACHNLLAFSERTSHGLQATSRPVSSSKILSLMTGIYA

SEQ ID NO: 33685 - protein, 458 aa, unknown
  TnpB Polypeptide
MPKKHKKDKFSMTVCGEFFPEVYPAFRSQKWGRGEEDPLETEMRLFCACQRWAFNRLLEGASRDEIKKLGQDLFGINSRYVDDARLKAQAVLGSQKELLELEIEETKNKLSRARKKLGIAMKKLAKAEEKGDAPDIVGKLRLVVKGRNNRVASLEKKLAELESYRENGTVPKVVFGGRKLWKKVCKGRATLEEWRASRKNRLYSRGDETKGGNPNMKVTYREGEFYLAVTISHLSEKLGEDALGRPKMSRAPRVEGRLWLPEKHRDLVRIWLAMELPYTAELVRTVDGRYLVHLTFDLGEERGPDFTKGCLSLDTNSDGVSLCNVGPSGQPEPWPGGFSVPYPSNLGKYEGEFQVITYPNGFLYIRVPDLAYASGDRRDYLIGVLAKVVVDIALFLVKPVVIEDLDFGKDRLDTNRKFNRMASNFPFAKMVEAVCRRSVKEGVPFKLVPARHTSTIGF

SEQ ID NO: 33686 - protein, 442 aa, unknown
  TnpB Polypeptide
MRTVSSYGVEIRKQNIPVRQTMEIYRQAVSYLTEIYAQVWEELREIPETKKRFNTAEHMVHMTKKNTARFDFDLRFPKMPSYLRRSAIQHALGSVSSYETRLGQWKETGVLSGRPKLTCRNHAMPVFYRDVMYREGTEGKDEAYLKLYDGHDWRWFRVCLSHTDMEYLRRNWYGKKASAPTLEKRHHKYFLRFSYIEEVTLTQTPVKEQIICSVDLGINTDAVCTIMRSDGTILGRKFIDFPSDKDRLYHVLGRIRRFQREHGSGQIKRRWTYAKRLNMELSRKIANAIVTYAGKYQADVLVFEYLEIKGVISGKKRQQLHMWRKRDIQNICEHQAHRHGMRLARVCAYNTSRLAYDGSGMVERSKKNHSLCVFKNGKTYNCDLSASYNIGARYFIRELLKPFPETERSLLEAKVPSIKRRTSCVYADLRVLHDVLADSKSA

SEQ ID NO: 33687 - protein, 433 aa, unknown
  TnpB Polypeptide
MLEAIRVSLDPSPEQERLLLSHAGAARFAYNAALAHVKKALDAGEKPEWSFYSLRKWWNHNKDELAVDDDGVIWWANNSKEAYSYGVESLAKGLSNWSKSRKGARKGRKVGFPRFKAKGKTVPSFAYATGSFGLIQNDPKALKFPRIGRIHCMENVAARVGDARVLRMTISQHTGRWFASLTVEREDEPPMQALKGGTVGVDLGIKTLATLSDGTVIENPRHLKKSEQKLKRTQRALSRKTPGSNRRAKAKARVARIHAHVANQRQDSLHKLTTYLTNKYSEISIENLNVLGMARNHHLAKSVMDASFGEFRRQLEYKTARTGARLHVIDRWYPSSKTCSRCGRVKAKLSLSERTYRCEGCGLVIDRDLNAAINIMVAGSAPETVNAHGGTVRRNDLNGHATQDPLKCEPSCGGSRVRLGAGDCKDALRAIIK

SEQ ID NO: 33688 - protein, 234 aa, unknown
  TnpB Polypeptide
MEARLVVEVKARKNNGTGKVAVDLGETVLMACAFDDGRVMLYSGRFIKSVRRYWQKVRAKLQQNSRRWKEIAHRERKQVKQLLHASTSHFTKECIQRGVEEIAIGNLNGIRQGINYGNRLNQRLHTWPYRKLIDMLKYKGALAGILVQDNIDEKNTSITCHACGEIAAFNRRHRGLYACSCGWRTQADVNGALNIYERAYQVSPVKWSSGRVAWPAVVSCLLGWHGIASAEAQR

SEQ ID NO: 33689 - protein, 390 aa, unknown
  TnpB Polypeptide
MKAYKFRIYPSKAQESEMMHHLWIAKNLWNELLFHAKMMYRDYERFPTRDAFQKMTKGSGLYSQAQQEIAHRVEGAIWRFCRLRKISRRAGFPRFKSLDRMKSIAYVQKGFRLGAKLKVTPFGEINMVKHREMEGGAKTLALKRESSGKWFAIFCVEEPPKVVKLNSGPRVGIDLGLQTFATLSDGNKITNPRHIRKYEERLAFLQRRLWHKHRGSRNRRKAKLRAARLYEKVKNSRRDFLHKTSKKLSDIYSLIALEDLSCQEMAETKLGKYINDAGWRTFSSMLCYKAENAGGKVVLVNPRGTTKTCSSCGKMQELQLSARVYACRGCGMVKDRDLNAAENILARATAGHAGSYACGEGAKETPLEEAGNQGHLPWCATTSLSHERAP

SEQ ID NO: 33690 - protein, 367 aa, unknown
  TnpB Polypeptide
MEKAYQYRIYPNKQQKIQIAKTFGCVRFVYNHYLDARIKAYKSDKTTLNYYDCANDLKNMKSQYDWLKEVDSTALQSSLRDLDSAYQKFFKEHTGYPKFKSKKTHRFSYKAKCVNGNIQYLGKYIKLPKLGTVKTKNTLVPQGRILSATISQEPSGKYYVSLCCTDIVIKELPATNKHIGIDLGIKEFAITSDGIKIPNQKYLQQSLKKLAKLQKELSRKAKGSSNWNKARIQVAKLQEHIANQRKDYLHQLSTDLIRKYGIICIEDLQVKNMIKNHKLARNIADVSWSEFTRQLEYKAKWYSKQVVRVDKWFASSQICSCCGNQFPITKDLSVREWICPNCNTELDRDINAAINILNEGLRMLSVT

SEQ ID NO: 33691 - protein, 404 aa, unknown
  TnpB Polypeptide
MLVKGVVFYQESDLPSEGKFLLEDFRLAVNNAIRAGLQARVTSRNALSRLAYKDLREQHPRMYAQHLVSAFEVACGNLKNHRKRSRKCVTVRIPFVKRLMMKAENQAYKLDRRSGIIDLPIRAGCHVELRLIVSQYHRKYLDDMALSLGSLTVLPDRVIVTFRKDAPKPFVPESALSLDTNERSLDGVFVEGDVVKAVKAEFPDIAIIQQRHHDRRRRLQKKKTNDRRTSRNLCRREGTREHRRIDYRLHQVADSVLKFAEERKSAIVLEDLKGIKSKRSKELNRRLSIWPRRKLHQIIEYKAQWKGIPVVKVDPRNSSRTCPICGRMQYSRMGTEFACECGWHLDRHINASINLLQTAISKGMAGGLRFNPGAFQHDAMMTLYAPSRGARSEPNGTSGIAGVT

SEQ ID NO: 33692 - protein, 425 aa, unknown
  TnpB Polypeptide
MISVTLVAESKLYLKDNIPLYDYFDDYSKLFNFLVRRCVHHLRHKLNGESESQYRTDLMLEFNITNRMAKAVIRTARNQLKLLKESARYRYNNLYKCKRSLYKRVAKLKAILSSSFATLKQRKLAKLRLFWTQMKLNKVNQLMDNGLKLHLTFGTKHLLRTNKQKFLAKRDNQVVYIGDKNETCGNLQFQISFNSKYNRFDYKLRLDNRWESGSNKYIFGSFVLQNKEAKRQILKTLSEKKSNPLTYRILKRDSNLYLQIMYRRETTDITRHNHGVLGVDFNKGFISVSEINSKGELQSLIRYNYLHRGEVTKTKTSMLDMVSKLVAQAVSVGKDIIIEDLVSLDSNKKQEKTTSKTYNRMINSLKFGLFKRCLLNKATKEGVSVHTVNPYNTSKLAKASYTDRMKLNVHDAASYVIARRFYQYD

SEQ ID NO: 33693 - protein, 442 aa, unknown
  TnpB Polypeptide
MKLSMTYRVRTKGFNHIFNETVRLYRQAVSFFVDVCLKEWNRISVIQGQKIRSGFVESLTVKTKQNPVVPYDFSAKFYKFPSYLRRAVIAEALGKASSYQSNLENWEAAEPEKRGAKPSLPQTGFVYPAMYRSGMFIRTGMYQATVKVFIRNTWDWVLVDLRKSDVDYIEHHCANYKECVPTLQKRGKKWYLDFVFQTAVQLPGTDIRNTRILAVDLGLNSACTCSIMTPEGAVLGREFLSLPGEYDSLEHAVSHIKHAQKLCARKTPGLWKQAKGINDDIAVKTARFIVDTAVKYDVNCIVMEYLDLGGRKRGSKKQRLHLWRAKYVQAMVTDKAHRNMIRTARVCAWNTSRLAFDGSGRVMRGKEADLPSYSLCRFPTGKQYNCDLNASYNIGARYYIRELLKTLPATAGQAVTAKVPELAHRSKCTLSSLIKLNAALAA

SEQ ID NO: 33694 - protein, 420 aa, Planktothrix sp.
MKVTYQYQFYPNTNQKISLNQWLRICRYWYNRQLGDRFDWWEMNRTAINACPLKTSIAAPREKPNYYSQKQQLPIIKKDLVKVFHSSELLDFKQVDSTVLQDVSKRIDKAFERFIVGDGKGTKSGRPRFKTEADYRTMTFPTASNNWIKLIRKNWIYIRLPKLGIVKVRMHRPIPNGFVVKQISVTRKADGWFIQLILEDISVPQFTPDQVIPNWDNSIGLDAVLHEDVYLATSEGEKFPSLKPLRKNQSKLDRISIKRNKRKRGSKSRRKLAKKEARQHQKIARSRKDFHYKTAHKLARSGAKFFFHEDLNLKGLTNRNQTKQDEDGKYLPNGQSAKSGLNKSWQDAAFGQFFTTLDYIAGKAGAVVISQKPAYTSMVLSYRNEIIFTDCSIRDYWDEQNSLIVDRDINAAINLKRLGP

SEQ ID NO: 33695 - protein, 379 aa, unknown
  TnpB Polypeptide
LNNVGGWLKYDKDEIEIYERKGKKRKVKVLEFHKKLARKIFKHLIGKNRRPRFGNISMHLDGKVVELSKKEENGAKSFDYWLKISTLEKGNPVYIPLKANTYAEKVDGEFLNYCQVIEDDNGSLEFRIIKQLKKKEYVPAIDEIAIDLGLRPLFATDKGDLFGRNFFDTLKAFDEKITKRMTSLQKRGIKPRDDKKYRKYVDNLRNLLENEINRLINVVIKIYRPKRIIVERLDFRSPELSKRMNRMVQNFGKRYIREKLERLKQLYGIEIIEINPAYTSQECSSCGYVDKRNRKDTQDFKCKACGNKINAQVNSAKNILRRSSLGNLTKKQVLKMLIEKYLERLKGCKSPPLNILEGNPYFKGYLEDILNPRQSLTPS

SEQ ID NO: 33696 - protein, 235 aa, unknown
  TnpB Polypeptide
VPTNYTNFFRNTKAFGFPRFKSRKNKQSFLCPQHCRVDFEKGTITIPKAKDIPAVLHRKFKGMVKTVTVSMTPSGRYFGSVLVDKAIGEIPVPPIQGDTALGIDLGIAVGDASFGTFLTQLEYKCRWYGVNLIKIDRFAPSSKSCGKCGYVYKGLKLSERSWTCLECGTHHNRDFNAACNIKEFGLKALPTERGKVKPVDCPTVDERPRVLKSRGSKKQEKRGGIGISEAAKSLV

SEQ ID NO: 33697 - protein, 571 aa, unknown
  TnpB Polypeptide
MGKVEVPDGWEFQGFVFALDCPARRVRRLASHVGAARFAYNWALQEIEQRIAYRNVQRRLAWLQGATPQEADAWVEQLTPLKWDQIWLRRLFNEVKDEVAPWWPANSKEVYSNAFANLADAFKNYYKWRDGGRRGRRVGWPQYKRKGRDDPGATFSTGAIHVLDRHHIQLPRLGALRTLEPTDQLRLKIDHNQARILDATAAYHDARWHVAFNVICLKDLPQTPPAGGPQGHDVGIRQLVTSSDGRIAPNPRTHPRPVRPRRVGYFRRAERERQERQAGTARARDKIGRDEVRLQRKLDRQHRTGSPRCFGPDGQHITGHCYWNDRSKRSRETQRQLQKLQAHGANMQRDAVHKTSHRLATQNLVNVLECLFVAGIVGHGRGKRGFNRAAQQANLALLGRQMGYKHRWYHGVLLLADRWFPSSKTCSRCHHINRQLKRSDTVFRCLEQGCGLVLDRDLNAARNLEWLAQLAGLVLLCQMSTGVPVDWSVLPVRPWGWQPPRPDRTRSHTRSSRGSARAHHHPAGMAGGGDVRHPSSQPPAGPATALSFDREDRRPPQRGARPGGRSESVTA

SEQ ID NO: 33698 - protein, 571 aa, unknown; identical to SEQ ID NO: 33697
  TnpB Polypeptide

SEQ ID NO: 33699 - protein, 413 aa, Mycobacterium sp.
VERRVSFRCLVGVDGYIAGMARYRLLPTPDQAVALAGHCRHARLVWNLAVEQQRHWQPGRHAPGYSEQCAQLTTARAEYEWLAAGSQTVQQQALRDFAHAMRNFFSGTHRRPTWRKAGVHEGFRQVGVRTHHVKRVSRRFGRVWVPKVGWVRFLLSRPVPEGVKSYRVARDRAGRWHIAFAHIPDPIAGPGDGSVVGIDRGVAVSAALSTGELLHAPTLTPGESKRLKVLQRRLARAQRGSRRRAHAKLAIAKLVAREADRRKDWVEKTTTDIARRFDVIRVEALDVRAMTRSARGTLDRPGTRVAQKRGLNRGIRRSGWGLLAVRLQHKAYGRAERVPAAYTSQRCSACGHVAPGNRKSQAVFECQACDAGPCNADVNAARNIAAGRAVTARGDLGSSRSANREPQLCTPAV

SEQ ID NO: 33700 - protein, 391 aa, unknown
  TnpB Polypeptide
VLKAIKVRLYPTVEQQVALAKSFGCARWYWNYALNACIKHYEEITKSLPLKVYKGLLPGLKVEYPWLKSDCYSSVLQCVAINLNKAYTNFFEGRSKFPKFKSKFDKQSIQYPQSVTVVGSKLNIPKIGEVKAVFHRSVQGIIKTVTITKTATDKYFASILVEVESTVHESSGDKILGIDLGLKDFAIVHDGEKVTKHSNPKHLYRHQKNLARKQKKFGRKLKGSNSRNKFKKLVAKVHEKVSNSRQDFLHKLSRKLVNESQVIIVENLNVKGMVRNRKLSKSISDVGWGMFVNFLDYKLKERDGKLVEIGRFFPSSKTCSSCGHILDKLPLDVREWDCPSCNTHHDRDGNAALNIRTEGIRILSNGGGNPVIAELRRSKSNSAERWKGICR

SEQ ID NO: 33701 - protein, 447 aa, unknown
  TnpB Polypeptide
MTIVRKYRIYPNEQQQQAILQTCGCCRVVYNTCLTTYTDNYRKWVENGKPQGEFDDTIPTAKEIQLDGKPWMKQADALALSCARMNFVNALNTFFKSKKGKRKGRKVGFPKLKSRRKSRFAYQTSNQGSNIRFNESNTQIKLPKLGWVNVVQHRPLPDNGTIKRVTVSMTSAGEFHVSLNIECEKQLPLLNRYNSISDPNVVGLDMSLPKFCVSSESSDDTRIKYEHNYRKEEEHIKKLSHVLSRKTHYKKVIVDGVEKKVETENYKKARKRLARLHGKVARRREDFIIKLALYFVRKYDVISIEDLDIQAMSRTLNLGKSVMDLGWGKFVSWLEKEAEKYDAFVYKVDKWFASSKTCHECGSKNSALQLSDREWVCPVCGCIIDRDRNASLNIRDEFLRDFHGCCGVPYTKFKRAGGESAATFRETLKQVFSMKQENPNPKGKGCH

SEQ ID NO: 33702 - protein, 362 aa, unknown
  TnpB Polypeptide
MQVSKVIKCKIVDLTNIKSQQLEQEYNNLQTLLQLESQELDFLPIYQNIPIYSANKQQALRFYKTINKREYPLSIRKDLIRIEKRDTKLASYWCRIPVKQRHGGIWLAIKPHQDFPDKFEFGESKLFRRKGEWWIYITIVREVEIKKSYSNILAIDLGSKVIATVCGSFDNKRPIFLGREVRGIRRHYQYLRAELGKRKLLRKIKQIGDKEKRIVNDLLHKVSKQIVELADKKDAYILLGDLKGLRNSAKGKMFRRIVSNMPYLKLTQYIEYKALEKGIKVLKTSEKKTSKTCSKCGYEDKNNRRTQGLFRCKSCEFEINADVNGVRNILKFSEGYMLSERALSEQALNQSLRLEAPCMSEG

SEQ ID NO: 33703 - protein, 191 aa, Okeania sp.
MKSLKQRRMDALRYLSNAWKRCFTKVSSQPKFKKKGRDDGFPTECYANTLDGSITVAFNRIKLPRIGWVKTYEVLPGNVNPKSVTISRKADKWFVSFKVETIPQITSKSVDVVGVDLGVKTLATLSTGEVFDGAKPYKKLESKLSRLQYLNRHKTKFSSNWKKAQLKIAALHKKIADIRKDTLHKRAYLFG

SEQ ID NO: 33704 - protein, 284 aa, Okeania sp.
MKSIRTKLKLNNKQKTLMAQHAGYSRWCYNWGLSLWNQAYKDSYKPNARKLREVFTNHTKPLYPWMKNLSSKVYQYAFINLGEAFKRFFQGLGKCPRFKKKGKSDSFPTECYANTIDNCGKPIELNGWDHKLPFIGWVKTYEPIEATTKKITISRQASDWYISCSYEFHATTTPKTTDVIGVDLGVKTLATLSDGKVFESVKSYQRFEAKLSRCQYLNRHKKVGSANWRAAQLKIARLHGKVANIRKDALHKLTTYLAKNHGSVSIEDLNVRGMLANHKLAKIS

SEQ ID NO: 33705 - protein, 406 aa, Okeania sp.
MLIYEMKLQGTQGQYNQLDSAIRTGRFVRNSIIRAWIDREVKSRNDAYKYCTKLAHNPKFPWAKQLNSMARQAHAERAWAAIERFYQNCKANVAGKKGFPKFKKYQIRDSVEYKTSGWKLSEDRRYLTFTDGFKAGTFKLWGSRNLHFYQINQIKRVRVVRRYDGYYAQFSIDHTREEKKNLTGTQLGIDLGLNHFYTDSAGEKVDNPRFLRQGERKIKKLQRRLSRTQKGSQNRSKARNRLGRAHLKVSRRRNDWAVKLAQRVIQSNDLVAIENLKVRNMMKNHKLAKSIADAAWYRFREWLEYFGRVYGVPVVTVEPAYTSVNCSSCGEKVVKTLSTRTHQCPHCGYVADRDENAAINILQSALRELATTLGHRESHASGENDLCLVEETQASKPTRGKRKVPQ

SEQ ID NO: 33706 - protein, 291 aa, Okeania sp.
MAVVPSLQEQHSSGKMVKSQIAKCAEPLPIRWSRQLPQNCVPSTITVKLSPSGRWSVSLRVNDTRDLRLKPVTKQIGIDLGITSLITNSDGEKVANPKNLQRLHKKLRLAQKSLDRKTKGSNNYQKARLKVARIHAKIKDSRLDYTHKLTTQLIRENQTIVVEDLAVKNMVKKRCDPATTSVARERAPRDHKLARAISDANWGEIVRQLEYKAQWYGRTLIKIDRYFPSASFRGASLTKRCSNCGHVVEKLPLSIREWDCPECAAHHDRDINASINILAAGGAVSVCGARL

SEQ ID NO: 33707 - protein, 414 aa, unknown
  TnpB Polypeptide
MHSTECVVVGIAAPNRAKREWLERMQRAFSGAVQLGLDAAQAGQTCSRARLHKAVYPGARELGLPADYARMAVNASVSLARSFYGLRKAGKRASFPTVSGSQGIGLGVNAYQCLRNGKRWVLRVSTGKRGQYVWLPLRIPASYAGRLALAYGDARLFQRDGKWYVALPIRVTAAPAGCSSNPTFIGVDLGVVRHATVATPDRVVFFSGKEARHRREHFAQIRRRYQRHRRTDRVKQQRGKERRWMKNTNHTLSRRIVDLAAQYPSPVIVLEQLDGIRDRTHGSKKFNRMMASWTFRDLADKIRYKAERLGIPVVFCDPRGTSKTCPKCGHATRSNRPEQGRFRCVACGYQGNADMVGARNIAAAGPMALSHGAPDMPRPEEGQPGFPVDGAKGCGLLSHSDSNLASSMLEPHPL

SEQ ID NO: 33708 - protein, 509 aa, unknown
  TnpB Polypeptide
MIQTIKFRIYPDETQEQQLHEIFTIFNRMKRIGYNLLFHGEDYMAERFGEGKSIQQCLMNLCHNNPYVNTILFDNKQKLEAQNTWLEKRRKYMTKQIKNITKKINTIKGQDTHDRRLKGLYARRSSIMARFNNLHLEPLVFGTKNLFRQRIRGKISREEFRIRRDSSFSCIGKKQRGLKNLNLKVLPNKTVKIRTFSKQKGRKWLVIPMSVNYVQEMWFQQLLTTDKYTVTVKRKLFKEKVRYFVHVSHEIPEPAPLYGYENGAIGLDFNYNFAALTNVDKRGTLLSYYSISFSNLHSYRTNKRSDYISYKMDKIVNYCINKGKGLVVEDLQFDQEFSYNTKRNRTLNNMKTTALQLLERKCRKRGVSFRKVFPGYTSIIGKYKYSRLHNLSVHHLASCVIARRGLGFKEKFPAVYDWVLSHVGEFIEPRVKQGSPYRTWSMIHSLFKHSGITSFKTAEIMQKTVLMKHVLNSVTSAQPDNLKAGLSSHGKIDDYYKMWNYIIDSQYYK

SEQ ID NO: 33709 - protein, 345 aa, Gemmatimonadetes sp.
MDKKVRYVGWQCRLYPSRRQADALANCREGLRELSNALLGASQLKYSQTGRQMTSKELRAFAQDWYYRRANRNHFPSSAIYQAASDMHAAFRNWFRKVRPAQGLPRFKPEGRAPGIYLSNAAIRFDGNRVRLPNFGWMRWRGGELPNNRLPGPKRRASRGLVSGRVWRDAGERWMLSCVFECGPIDSAIPSASTAIVRQDGDRILADVDGTSLGTGVSGEDRRAEMEKRRLRRLQRRLHRCREGSKRRARLLERIRVVARRARNRARDRHHKLTTTVVRTAEVIIAEEVRGEVLRQLKYKAEWHDRKLQVRRGPPEPGRESVRHARGDRRPTPVDEARIVERGSE

SEQ ID NO: 33710 - protein, 535 aa, unknown
  TnpB Polypeptide
  misc_feature (84)..(84): Xaa can be any naturally occurring amino acid
VRVRARLRPSPEDAAVLRAVGGHLGLLAGRDLAARCAEGRLDARGRARSRAVRKRALTAESSSRWAGAITRTSEDAYRLAWQNXRAEQSSLTARIRRIQTRLAVQAGGTAGKTRGYPTAAERHAKTVRLQTLKTRLSRVQRQLDSGTVSVVRGGKALLRKRNDLTAAGLTQAEWRREWESSRLFLTADGERDKAWGNETIRWHPDAGWLEVKLPAPLGRLANRPHGRYRLSAAVEFGYRGDEVAAQAATGAVRYDIRCDPARGRWYLDASWKAAPAPAASLDGLRQHPVVAVDVNHGHLAAGVIAPDGNILGAAATVPLYLAGLPSATRDGHLRAAISNLIATARACGARAIVIEDLDFAQARAEGRERDGSRPSRGRRGRAFRRAVAGIPTGKLRDRLVQMAGNAGLHVIVVDPAYTSRWAAQHWLAPLREHHPKTTGHHAAALVIGRRGLGHRARRRATGNQTAPAEAARSTRARPGPPRQPRPHPGSPPPHEAPRQPPGSKTRRPHRTTAGNQAAQDRSRPPPTQDNILLGQ

SEQ ID NO: 33711 - protein, 373 aa, unknown
  TnpB Polypeptide
MRLCVQLQLRPNQEQAQALKETLATANKAADYVSEIAWDAQVFGQFKLHKLVYSDIRFQFGLPAQLAVRVIAKVADAYKIKRHKKRLFKPLGAVAFDARNFSLFADKSMASLSTLQGRQKIPFSCGKRQRELLEFQFGEADLVYLKRKWFLFVTINVEEPPIGAATGALGIDFGIVNIATDSEGQVYSGETLTKVRKRYAGLRQRLQSCGTPSAKRHLQNRSRKEKNFAKTLNHTIAKQIVEKAQRHSQAVALEDLKGIRETTVRRAQRLLHHSWAFGQLRNFIAYKAQLVGTPVVLVEPAYTSQTCPECGHIARGNRPTQDNFRCQACGYAGHADTIAARNIAARAAVNQPIVGIATHRNHLQACPVYGAGS

SEQ ID NO: 33712 - protein, 451 aa, Paraliobacillus sp.
MTRKKAVKVLRKQKKTENIQRFTQKQNIGRASLTAKEYRLLQRMTHSSKALRNVGLYTIKQCYLNNNRMATVKEVDAAMQADVNYWGIQSNAVQAIRRTLFSEAKSFFKALEQWKKTPEKFTGRPKFPKYSGSTDKRIIEIYQVPKIDKDGFWTLPMNVEFRKRFGSIKIRMPKNLLNRKISYIEIKPKQKGRFFEVHYTYEVYVAQMKKKSTATINALGCDLGVDRLLSCATNKGDTFLIDGKKLKSINQYFNKSISNLQQKNIENGISKRMITNKIADLWNKREAQINGYFSQAVGLLFKKVKELNIDTVVVGYNAGWKQASDMGKKNNQQFVQIPFQKLLSAIENKCLKEGILFKRQEESYTSKASFLDRDSVPIWSKEDKTHHRFSGKRVTRGLYQSQAGHCIHADINGALNTLQKSEVVEFDKNLKVKVPFLLAVQKRKAVASCIA

SEQ ID NO: 33713 - protein, 330 aa, Chloracidobacterium sp.
VARFAYNWALAEWQRQDEAWKLDNSLPKPSEAALRRQLNAIKREQFPEQFPWMLEVTKNAPQMAVIQLGQAFQNFFAGRAKYPKFRKKGVPDRFTLTNDQFSVEGCRIRIPRLGWVRMREPLRLAGKLVSAPISRVADRWYVSMTVDTQDTSHLPKAENQGAVGVDLGVSALATLSTGASIPGPQAHTALLARLKRLSRSLSRKQKGSSNRAKAKRKLARLHARIANIRLDALHKLTTDLTRRFHTMAIEEMCAGCRKTAMGRARLPTWASLSSDGKWSTRRRCAAGRWWWIASPRAARRVRTAATCAMHCRCRCASGSARRVARSMIET

SEQ ID NO: 33714 - protein, 388 aa, unknown
  TnpB Polypeptide
MRYLRKRMQGLPTFTHPRPYPTYILPHIQCTVKLVKTLRAKVHSPTRRKREALLSLHKGWQGALGLSRDYGYLREHTDLPSFYCRDIRWCVGKGNRSPVILGQGAMNLRPGGRFAPWFASIATPQGRVRVPLRLCPEHSRLLAEPDVKLGMSHLVKKGPAFFLHIVVEREVPDVPIPVNAPVLAIDIGDKTIATSVTLDPGGRVAAPPEFMGGRVRGIRRHHAWVRRGMGHRKAFRAIRRMGSAEHRRVDAELHAISRALVDRARALGAVIAIGDLSGIRENKRGRGRRMSRIVNAMPFDRLSQLIGYKSAWAGVPVLLVDESWSSRECHVCGQDGLRPTRGRFVCPACGEWNADLNGAMNIGNRALGYMSIARVPRIAPERMASSDG

SEQ ID NO: 33715 - protein, 417 aa, unknown
  TnpB Polypeptide
MLLCTKIKLEVSEQDAATLEFMQGKCRGLYNWWIMRLRTGEKWNFKNCKKTLAESREHDPELDDVYGKLLAEVYYRLDAAMGAFFRRWKVGETPGFPRVRPRHNFFTLCYPAMYLKVEGKKLVLPTGGLGKNKKYPNIVARLTDVPPTDFGEVAISRDARGNYYASFAYKEKEETPEHEEGQADYVAFDLGIKTLATGVNEQGRVYTIGGFKGHQWYNKQLDKIRSKRDKCKKKSRRYIHLSKVYKRVSEKKQNKRKDSLHKASHLIAHTLVERTVIVGDLSQRQMVTRQHVERNKHLNRAVYNEWGLYTFTHMVQYKCDLYGKELVFLDERNTSKMCSGCGKLQPMPLWKRTYCCTNCGLVMDRDENSAHNILTRFLAGQPPYTLERECDALQESRVDVGITGVPQPCEVQQLGLW

SEQ ID NO: 33716 - protein, 438 aa, unknown
  TnpB Polypeptide
MKRTNTVLLTPTEVQEQELYALADASAQLWNMANYDRRQAYFTGSRVPSYENQWRIFKDSEPFKRIGTCKGQALLLKLREAWGSFFALKRLQRNGNLPPHIKRTSPPKYMKDPNTRRRKAEAIYVRNDGYRQQDDTLILSKSLHVRFKAGELWLGKQGRLELHYDRLREKWYGRIPIRVKWPRKGKPHQPTLKRASIDLGICNLTTCVVEGGDKAYVYSGRAVLSDWRYWTKRIASCESELKKTNGHNSSKQLSKLYRTRRRRLNHAVKAMLRDLYDRLETHGVTELIVGNLKHIRDNANHGKVGNQKLHNFWPFAQIRKRIIELGEEYSTRVRFKSERGTSKRCSLCGEKHKNGRIRRGLYKCAETGQTMNADVNGAYNILYGRKVAAVSGSRPMAWPMLLKWNSQEWQVSGMRKHESPDFSRGESQRRSLYVTARR

SEQ ID NO: 33717 - protein, 437 aa, unknown
  TnpB Polypeptide
MNPLLLSGPPVGQEVLNRAAKNGRIKATLRETRARRQTQICRSYEVKVDKSHTSTKTQECLRRLFLEAKWFYNNMLARGDVWNANYKTTIVLVKKGGSMEPRELQILSSQMRQEIIGRAKDNIKGLSVLKSKGHRVGALKFVGRIRSIPLNQYGVTYRILNSGCISIQNLEQPLKVRGLNQIPKGAEYSSALLIQRNGDYYLHMATWQQPERKALALPKVGMDLGIDRQITFSNGVAVKFEVLMTKKIRRLHRELSKRKQHGRNWFKTKLKLNREYGKSVNEKRDIRNKIVSKIVGTYDTVCFQNDNVAGWQRMWGRRIQATAIGGITSAFKQKARTPSEVERFFASTKKCSGCGNVNCEMPLSERVYRCEACGLVIDRDLNAAINIRNEGVPAERREVTPVDTKTSTEFLEYFNSIPRVHASLVEEAGSPRLSVVR

SEQ ID NO: 33718 - protein, 389 aa, Streptomyces sp.
VNVAIVTAVKLRYQFRMYPSASQRQQLAKAFGCARVVWNDALRIRQDAHRRDARIPSITELAKTVITEAKKTPDRAWLGEVSAVVLQSSLRDLQASYSNFFASRKGTRKGPRMGPPRLKRKTGRQAVRFTRAARFSVTADRRLRLPKVGDVEVRWSRELPPDPSSVTVVRDAAGRFFASFVVEVADEPLPGLDCGETDTGIDLGLSTYAVLRGRKIRTPKFFRRAERKIKRAQRKFSRTQKGSHNRHKAKIAVAKVHARVADQRRDFIEQETTRIVRESQAVYLEDLNVKGMARTFGKSVHDQSMGMFARTLEAKCHRYGRGFVKVGRYFPSTRLCSRCGSLSGPKGTQGLRKRTWTCACGAVHDRDQNAEHNLRAEGRRIVAEGRPDT

SEQ ID NO: 33719 - protein, 561 aa, unknown
  TnpB Polypeptide
VVRTANKSETLTREKPKKKLRKLEPPQWVSEPSACSIRTRIKGSERDFEVLEILGDYLGHLANLDLTWAQDNVTARERKKRLTMEANARWANSIMAETDRRIKSERTNRWRHLSSIGRAISCINKRLNAKSDNQYYKPYLNASVAGLKIIRRQNLIDRLNKIKTSPISIVRGGHALWQKRQNLKATGLTLAAWQAQWQAARMFLSAKGSKDESFGNCTMQVNPETGICSIALPASLAKIYANSPDGKHYILDAKIEFFHRQNEWLGRAQSKTTEAKAITYTISHRFELKGRWYLDAAWTYQNSESPAVHPKLKRRLGVDLNADHLAVWPINNDGNPVGKPSHIPLNLKGLPSSTKDGRICWAISQMLKLAVKLNADLACENLGWADQTGRDDQIQGRAFRKTCAGFPTAKFRKYLTLMAHNAGVSIVIVDPAYTSQWGQEHWGNFQVANHQTTSHEAAAIVISRRSQGQSARRRTSNSSSLARREQRAAGVQCDRQPKALTQDQSTLDKLWVQGPDARGQPPAPKPRHTTQRPARERSLVPVVFQNSPLALAKVNSSEHFS

SEQ ID NO: 33720 - protein, 561 aa, unknown; identical to SEQ ID NO: 33719
  TnpB Polypeptide

SEQ ID NO: 33721 - protein, 288 aa, unknown
  TnpB Polypeptide
MLVLEYKLVAKKQQEEAITEAVRTVQFIRNKALRLWMDTGARQYDLNKYCAVLAKEYPFANALNSQARQAAAERAAYGIGRYLKADKSGKRLKKPQFQKDNRSVEYKTTGWKLSDDRKRITFKDSIGIGEVKLLGTRDLCAYSLALIKRVRILKRADGDYVQFCLAVDRKEAVEPTGKTLGLDMGLAKFYTDSNGQAVDCPKFLRKGEKKIRQAQRRHSRKVKGSNNRRKSKTILGRRHLKVQRQRKDFAVKLARCVAKSNDFVALEDLQVRNMVKNYCLAKSIADAS

SEQ ID NO: 33722 - protein, 377 aa, Kroppenstedtia sp.
MHKAYKFRLYPTPKQATLIHKSIGCSRFVFNQFLAKWNENYQLTGKGLTYHTCSSQITQLKKEIDWLNEVDSTSLQNSLKNLADAFSRFFKKQNDKPRFKSRRNRVQSYTSQCNYPKGRKPSIEVAGNRIKLPKLGWVKFAKSREVEGRILSATIRRNPSGKYFVSVQCEMDRCPYQPVDKEKAIGIDLGLTDFAIFSNGTPKVKPPRSFRTYEKKLAKAQKIMSRRTKGGSNWHRARVKVARIHEKIVNARHDFLHKLSSKLIYENQVISVEDLPVKNLVQNHKLAKSISDASWSEFGSMLEYKAKWHGRTLVKVGKDFPSSQLCSGCKYRNQEVKKLSVREWTCPECHEHHDRDINAATNILREGLRIIAAGHAV

SEQ ID NO: 33723 - protein, 641 aa, Streptomyces sp.
VIVMQLRYAFRLYPNTVQQAALAEAFGCARVVFNDAVRAREDARKGGQPFPKLGDLSKKLITQAKRTAGRAWLGEVSAVVLQQSLRDVEAAYRNFFASLNGTRKGRTVGVPRFKSRKDQRQSIRFTANARWKITGAGRLDLPKIGAVKVKWSRTLPATPTSVTVIKDAAGRFFASFVIDTDPAADAVRMPVTGNTVGIDLGLTHFAVLSDGTKIDSPRFLRRAEKKLKKAQRELSRKQKGSRNRAKARLQVARAHAKVADARREFHHQLSTQLISENQGIAVENLSVKGLARTRLAKSVHDAGWAQFIGMLEYKAERYGRTFIRIDRFEPTSQVCSTLYRLRHRPRPGHQRRTQHQTGRRTGGISLRSADKTRTRSGTARRSRKPRIPDRTPCRPAAQHPVREGQNPRPSGRGACQTPADHTWRNNVISGNHPASEPADPGKITADPQLTDPASADPLDYRPKSGSPALKAGLVTPDNGGRDYTSAATPSACRPDIGAFQVSSFDDASCAGTNLVTNGGFESGAKSPWTGSTSFTVGTATPHTGGYAAQLTGAHTSAEQLVTVQPNTTYVLSGWGRVDADRTQLAVGVKNFGGTETRVPLFTGTDWRGGAVSFRARAAPRRRCTATPGPEPGTAGATTSGW

SEQ ID NO: 33724 - protein, 246 aa, unknown
  TnpB Polypeptide
MNSSPNPNLGKEVHMTSAKQLRSRVRRNSQARFCRRGWEGDFPLDSTKLSDDRRYLTFSDKFQAGIFKLWGSRNLHFYQLEQIKRVRVIRKHDGYYAQFLIDHEREEKKELTGKQTGLDVGLNYFYTDCCGNQADNPRFLRKDERQLKKLQRRLSRTKKGSQNRKKARNRLGRAHLKVSRRRQNRVCKLAQHVIRSNDLVAIENLRIRNMVKNHRLAKSINDAARVSVSRMVGVFWESLWGSGDCR

SEQ ID NO: 33725 - protein, 429 aa, unknown
  TnpB Polypeptide
MVNYKTTVNRIRPKNIQEYHLLQDITRASKDLYNTTLYETRQHYFNTRQFLEYKNAYHIIKNKQEYKELPSQAAQQTMKVIEREFKSFFRVLEEKKKGNYNRKISIPKYLDKDGYFTTIFPKAHIRFNKKDNTKAYLTLSKSMKNKYGIKGYEVSIPEHIDNDTIKELRITPRHNHFQLEIIYKVNDYPEIISNNNYLSIDLGVDNLVTMINNVNDQPIIINGGDIKSMNRYYNKKIGYYKSILKKNNNTYYSKKIDNLWLQRSNKFKDYFHKLSTNIVRYCVLNNIREIIIGYNKEWKQNINTGRKNNQNFVQIPYGLLIEYLDYKCKEKGIVFTLQEESYTSKCDALSLENVRKHNNYSGCRVKRGLFKSSTGFVINSDVNGSINIMRKCKHEEIDTWVQSLVSSGCVFQPVKLSLDKFTNLTLQNR

SEQ ID NO: 33726 - protein, 325 aa, unknown
  TnpB Polypeptide
LDSAFTRFFREKKGFPKFKSKHKSRAAYKAINSVEVDLDNNRIKLPKIGWVKLSENRKFEGDVRSVTVSKTKTDKYYVSVLVEDGKEIPSKEPITYEGTIGIDVGIKDFAVCSNGDVFQNPKYLEKATDRLKIIQKRFSKSKKGGNRHERLRKQLARQYEKVTNQRTDFLHKVSTKLVRENQAIIIEDLNIDGMMKNHKLARSIGSVGWATFFSMLEYKCEWYGKTLIRIGRFEPSSKMCECGYINRELKLSDRKWTCPKCGTTNDRDLLAARNIKRFGLQAQNLLTQPMAHRGLDGENPTMDDRSTSSLRSSGSMKRQIIQVKI

SEQ ID NO: 33727 - protein, 382 aa, unknown
  TnpB Polypeptide
MISYKFRLYPTKEQTEKLELSLEICRRTYNYLLAELDKGFTKVELANYLLDLKIVNPEMKEVYSKVIQKENDNLFSNLSGLSALKKNGNKVGRLRFKGKGWKKTFTFNQSGFKLVDKKLYLSKIGEIKIKVHREVLGKIKQVIIKREINKWYAIIQTDANIQIIKGDKEIGLDFGLINFYTDNEGNKVSIPNNIQQIQNKLKKAHKNLSKKKKGSKRRLKAINRLQNTYQKQTNMKNDFFHKLSYKLVTNCKVIAIEDLDLKGLMMKTYNAKNYQISSWKTFITKYLTYKAESAGCKILVVDRFEPTTQKCSNCGSLRKLELSERTYNCSNCGLSLDRDTNSAKNIIKYFGLGINPIREDSSLPVMVKESSMKREDNHFNGY

SEQ ID NO: 33728 - protein, 389 aa, unknown
  TnpB Polypeptide
MVVQRSFRYRIYPSQKQEVRMNKQISDCCFVYNKLLEKKINTYKEDKINLSQFDLNKLTKEFDIEVHSQIKQNISKRINDAFKHFFRRVKEKKGKAGFPRFKSFQRYKSITFPQSEFKINHKKIYLSKIGNVPIILHREIKGEIKTLTIKRCADKWYTIFCYGGVVIDKIKPEEKRIGIDVGLESFATLSNGEVIENPKFFRKSEENLAKLQKRLSRKKKGSKNRNKARLKVARQHEKIFNQRNDFLHNQTAEIVRRFKIIAVEKLNVNGMVKNRYLAKSISDAGWSRFVQMLSYKVENTGGKVEQVNPKYTSQICSSCGHKQKMPLNKRIYECNGCGIRIDRDLNASRNILVGLDKSKLNAFGDTVRPSAKKASVVELGTIFEEDAQP

SEQ ID NO: 33729 - protein, 463 aa, Actinomadura sp.
LRKDYEKTRPKTPPDGPWMDGESTPRDAARFSIPLRPIFFAVMFDDVQLRYRYRLYPTPGQRVALARAFGCARVVFNDGLRARQAAHAAGLPYIGDTDLQKQVITRAKLTPERAWLGEVSSVVLVQALADLHVAYRNFFASLAGERKGPEIAAPRFRSRKDVRQSVRLTRNGFRVRPGGRLRVAKVGEIKVRWSRPLPSEPSSVTVVRDAAGRYFASFVVEVEDEPLPAGGREVGVDLGLADFAVLSDGTKISNPRWLRSRERKLKRAQQALSRTQKGSRNRGKAARRVAKAHARAADARREFHHQLSSWLVRDNQAVYVETLSVKGLARTRQARGVHDAGWAAFVRMLEYKAARHGRTVAKVARDFPSTQLCSQCGRRDGPKPLRVRAWACPGCGARHDRDHNAARNVLHEGRRLTSSTVAAGCTPAQGHAETPNACGEPVRPPFAVARFVEPGTRQKPEAA

SEQ ID NO: 33730 - protein, 471 aa, unknown
  TnpB Polypeptide
MDLDNNAHSVFLLHYHLVLVVKYRRQVFDDAISGRAKEIFAYIAPNYNITLEEWNHDKDHVHILFRGQPNSEISKFINAYKSASSRRSSRSDPSIHRKSGREKELNIAYRFRIYPTEEQKILLGKTFGCCRFLYNQMLNDKIQEYKKTKKMLKNTPAMYKKEYSFLKEVDSLALANVQLHLEKAYKNFFRDPKVGFPRFKSKHHSKNSYTTNVVNGNILVEDKRIRLPKLKWISMKKHREPAENCRLKSVTVSMEPSGKYFASLLYEGYSCENQAADEDYSNAKILGIDYAMQGMAVFSEEIEMEEAGFFRKNEKRLAREQRKLSRCVKESRNYVRQKKKVARCHEKIRNQRRDYLHKLSRRITDQYDIVAVEDIDMKAMSQCLHFGKSVQDNGYGMFRNMLDYKLAWKGKKLVKIDRFFPSSKKCSKCGKIKKELKLSERVYRCTCGNEMDRDRNAAINIREEARRMLVA

SEQ ID NO: 33731 - protein, 574 aa, unknown
  TnpB Polypeptide
MSKKKKKNAEGEPEPRRTTPTFLLELPLQMYESQAKRIRAHLEAGRAFYNAVLSEGQQRLRQMRADPAWQAARAIPCSRKQERQAAFSALREQYGFSEYALHEYAKRARVSWIAEHLDAVLAQTLATRAYQALNRVCVGKAKRVRFKSRGRGLSSIENKRNDTGLRFLLQKPEIGNQGYLLWKQDQLLALIDWNDPVVKHGLGHRIKFARLVQRKASSPKAQGADALGYRYWVQLALEGVPYPKPKHTVGADTLGADLGPSTIALVPRRAEASLAVFCEELAPDEKELRRLQRHMDRQRRAANPDNYDEKGRIRKHSGKKKLRWKSSKSYEKTRRRKAAKERKLAAHRKSLHGQKVHEIVAVGNTIILEKISYKAWQKQYGKSVGLRAPGMFIELLRRTVASTGGTLTEVPTRRSKLSQYCHGCGRCHKKPLGQRFHQCVCGIGPVQRDLYAAFLAAYLDPALDFIPSCAQYVVPWEGAEARLRAAHERVKERANAGQVMPQSMGIPRAGARLPESRSEPTQEPAFSLRRGRLEAWKERENPRACMPGCIQSLCSSNMRVTSASTSCTSSSDRL

SEQ ID NO: 33732 - protein, 558 aa, Verrucomicrobia sp.
MRRLQAFRFQLRPDGQQERQMRRFAGSCRVVFNEALSLQMARYDAGEKKLSYAGLCKELTKWRNGEPMPSGRVAAWLADAPVHPLQQALKDLERAYSNFFAKRADFPRFKKKGQSDRFRYPDPKQIKLDQANSRLFLPKLGWLRYRNSRDVLGEVRSVTVSQSCGKWHASILAEREVEQPIPKGGAVGIDMGVARFATLSDGTFYAPLNSFKRHETALCKAQQAMSRKIKFSNNWKKAKARIQKIHSRIGNARRDSLHKVTTTISKNHAMVCIEELQVRNMSKSASGAADAPGRNVRAKSGLNKSILDQGWFEFRRQLEYKMEWRGGWLLVVPPRNTSRTCPRCGHVSADNRRTQARFECVECGLVENADLVGAINVLRAGHARIACEVSGIKPPAAGTHRSGSFRFKPRLSAVGISGLSAGEDVKKMIVLRNEAVLLQNKATDAWGYFQGKALRENLYQVANRLKPDPFFLRESARFEQEKALGKQQAEEWEREVAARMAESERALHRHHLLRVATVLLQLATAVGSVAALVKRKSAWFLSLGIALGGALLFLWGSR

SEQ ID NO: 33733 - protein, 471 aa, Verrucomicrobia sp.
MASAPPGTGRVRLCFGSRRLFRKQFHLEESGYASHAEWKEEWRAARSGQFFVIGSKDETTGNQSCRAAVEHDGSVTLRLRLPDALASDGKLLVIPGVRFAYGQEEIAHALAASRVVFSQTKGGKPARRRDGVAVSYRFLRDRKGWRVFASAEAKPVPIATSRLAGAVGIDINHDHLAVAETDRFGNLRRAVRVDLNLYGKTEDQAKAIIGDAARMIVEMARERGLPLVLERLDLKKRRAELEVASPSAARKISSFCYSKTISLLKAGCFRAGVEGIEVDPAYTSVIGAMNHTRRHGMSSHQSAAYAVARRGLGFSQASDRAGGRPRRPAMAATSPLPYPRGIGRSLSGRSGRRFGGGSKRRMQRMPGREACESRPRLCSRKRGHWAQPGHCRRNPGTRTVGRTVRPTSSTTFPGSGMVVYCFRNGRPGSMAAGISSSSRGNVIRCGWGCTTSPNPMSICTGITAAPSRALN

SEQ ID NO: 33734 - protein, 542 aa, Verrucomicrobia sp.
MSDRPVFAYQTRLRLAAEQVAALDGYADLYGQAERALFARMRVGIPMGDLKCEFQRRFGITARQFNAIRVGLEGKIASIRERLPEWIAEAESRIQKAERVVRILSAREPGSEKLHQKKRRLGSLRARLTARIADRDSGRVRLCFGSRRLFRKQFALEENGYASHAKWKEDWQAARSSQFFVIGSKDETAGNQSCRASVEEDGSVTLRLRLPDALASDGKLLVIPGVRFAYGQEEILHALAASRVVFSQTKTGKPVRKREGVAVSYRFVRDRKGWRVFASVPARSVPMATSRLAGAVGIDINHDHLAVAETDRFGNLRRALRVDLNLYGKTEDQAKAIIGDAARMIVEMARERGLPLVLERLDLKKRRAELEVASPSAARKISSFCYSKTIAMLKAACFRAGVEGIEVDPAYTSVIGAVNHARRHGIGSHQGAAYAVARRGLGFSEHPTVREAVAPARNGGHLTFALPARNRAKHVWSFWSEVRRRLKAAHAAHARSGGLREPPAPLLPETRALGATWALPAESRHANRRQNCSADVIDDLPW

SEQ ID NO: 33735 - protein, 477 aa, Verrucomicrobia sp.
MRRLQAFKFELRPDGRQERRMRRFAGACRFVFNEALALQKRRHEQGEKRLGYAGLCKLLTGWRNGSPLPSGRVAAWLADAPVHPLQQTLKDLERAYANFFAKRADFPRFKKKSWSASFRYPDPKQIKLDQDNSRVFLPKLGWLRYRTSRDVLGEVKSVTVRLSGGRWRVSIQTEREVAQPIPQGEAVGIDMGIARFATLSDGTFYAPLKSFRRHEAALRKAQQSMSRKVKCSNNWKKARARVERIHCCIGNARRDYLHKATTTISKNHAIVFMEDLQVGSMSQSASGTVENPGRNVRAKSGLNKSILDQGWSEFRRQLEYKMEWRGGWLVVVPPRNTSRTCPCCGHGSADNRQTQARFECVECGFEENADVVGAINVLRAGHARIACEMSGTESPAAGTRRSGSFRFKPGLSAVGISGLYTGEDVKRLPSITRRPPCIMSMRPRTTGKQRSTTAKESMRSRGIMRISPMGCQQLTNQ

SEQ ID NO: 33736 - protein, 417 aa, Cyanobacteria sp.
MLHKAVKVRLYPSAEQQVLLSQHFGCARWWWNFALYKSIETYKETGKSLGQSALNAFLPKLKKAPSTVWLSECYSQVLQATTLNLTTAYKNFFAGRARFPRYKSKHGKQSIQYPQNVKVLNGFVQFPGQVGKVKAKLHRNIEGTIKTVTVSLDPSGKYFASILTETEGENPVVSTDGKVIGIDLGLTHFAITSDGSKVSKYKNPKHLAKHKKNLKHKQQKLARKQKGSNSRNKAKKTVAKVYERVTKSRQDFLHKLSRKLVNENQVVVVENLNVKGMVRNPNLAKAISDAGWGTFTNFLAYKLEKKGGKLVEIDRWFPSSKLCSNCYYQIDELSLDVREWTCPHCQTRHDRDGNAATNIRAEGIRMLQTDGTAVSANGGEVRPKLGRKSVLIAKRASVPARRHSPTMLEAYTIVAST

SEQ ID NO: 33737 - protein, 363 aa, Isachenkonia sp.
MNRAFKFRIYPNAQQRNLIAKTFGCVRFVYNRMLSDRIEHYKSTGKSLYNTPAMYKKEFEWLREVDSLALANAQLNLNKAYANFFRDKSIGFPKFKSKKKNHKSYTTNRVNGNIRLENGVLVLPKLKAVKIKQHRQIPEDYTLKSVTISQTPSGKYYASMLYHCEQEIPVVEPKVFLGLDYSMKELFISSEGIPAEYPRFYHQSLAKLQKEQRKLSKCQKGSQNRNKQRMKVARLHEKVRNQRKDFLHKLSRQITNAADRVCIEDLNMKGMAGALHFGKSVSDNGFGLFVSMLDYKLKDQGKAVIKIDRWFPSSKLCSGCGEKKAELHLSERVYHCEACGLTLDRDHNASINIKNEGMRMTLA

SEQ ID NO: 33738 - protein, 372 aa, Chloroflexaceae sp.
MKLTAQLKLLPTPEQAIALKRTLEAANAACNHISGVAWETRTFGKFALQKLCYEQVREQFGLSAQMTIRALAKVGDAYKLDKQAKRTFRPLASIAYDDRILSFALPDSSISIWTLDGRQSIPFVCGERQRRMLATRQGESDLLYHRGDWYLLVTCEVEETDSQDVDDVLGVDLGVTNIASDSDGTIHSRRHVNNVRYRHRRLRTKLQKLGTKAARRRLKQLAGQERRFTKDMNHTISKRLVETAERTKRAISLEDRKGIRTRVRARRQQRAQLHSWSFAQLRSFIGYKAQRAGIPVVLVDPRNTSRRCPACGHTDKANRPNQATFCCTSCGCAGHADVIAAENIRVLGRAVVMQPHVSETAQPSRQGQAHSL

SEQ ID NO: 33739 - protein, 350 aa, unknown
  TnpB Polypeptide
MLLSKKTSIKVSREYANLIGHMCYAASKLWNVCNYERQHYKETGMEQYPDWYYQKKAHKEDLWYKQLPSQTAQEVCRLLDKAWKSFYALKRSGGIETPRPPRFKQESIPITYMQMGIVHERDTDRVRLSLPKTLKKYMEETYQIHENFLYLENKIFRGMDQIKQLRIYPPEKGSCKIIVVYEVPDQEELPQNGHELSIDLGLHNLMTCYDSENGKTFILGRKYLELERYFHKEIARVQAQWYGQQSGKGVKHPTTSKHIRKLYKRKHDSVTDYLHKVTRYLAEYCREQGITCVVAGDIRNIRREKDLGHRTNQKFHSLPYNRIYIMLEYKLKRYGIRFVKQPANKKSRLN

SEQ ID NO: 33740 - protein, 434 aa, unknown
  TnpB Polypeptide
VVLEAVKVALDPTPTQERLLLSHAGAARFAFNVGLAHVKEALDAGEKPEWSFYSLRKWWNANKDALAVSDDGVIWWSKNSKEAYSYGLEALANALSNWMKSRKGARKGRRVGFPKFKAKSKAAPRFAYTTGAFGLIQGDPKALRLPKIGRVHCLENVTERVGGARVLRMTVSRRAGRWYASLTVEREDKPVTQAPKGGAVGVDLGIKTLATLSDGTVIENLRALAASEQRLKRAQKALSRKAMGSRRRAKARAKVARLHARVVNVRADAINKATTMIARTYSVVCIEDLNVAGMARNHHLAKAIMDASFGEFRRQLEYKTARTGARLHIVDRWYPSSKMCSRCGRVKAKLSLSERVYTCDGCGLVIDRDLNAAININVAGSAPETINAHGGTVRRNDLYGHATQDPLKCEPSERPGAVRLGAGACKDTLQAALR

SEQ ID NO: 33741 - protein, 381 aa, unknown
  TnpB Polypeptide
MPVEKLNRAIMYRAYPTPEQQVLLSKTFGCVRFVWNHMLTDAQQFLNEAGAFFIPTPAKYKKEFPFLKEVDSLALANAQLDLKEANKRHKKSPQTVGFPKLKSKRKSKMSYTTNNQKMCHKNGEIKDTIYVVGNLVHLPKVGNMKVKKHREPNINWVLKGATVSCTRSGKYFISLLYEFEENIQPVVPTKQTSLGLDYSSHDFYVDSNGEVANYPCFYRQNEEKLAKEQRKLSRMKVGSRNYDEQLHKVQLLHEHIANQRKNFCHTVSAAIAKQYDAVFVEDINLRGLAGSLKLGKSTNDNGFGMFRAMLEYKLTSQGKTFAKIDKWYPSSKTCNVCGFIKEDLTLADRVWTCGACGITHNRDLNAAINIRNVGLLGLYPA

SEQ ID NO: 33742 - protein, 429 aa, unknown
  TnpB Polypeptide
VPRQRPVDVPRVVHRTTRVALRTTEAQRRRCFGLLRSGGDVWACVLEQSAIRCQRGAAPLANYQELCRELSADGPGIFGELSTTGARSILRRYCDAWMTTAKRRRAGDTSAHYPRRKKALVPSRYYAGTFSLSGRHLRIPTAKGTAPLVVRLTREVPYPATSIRSVTLLADGARLCVDVTAEIEVCSYEPGTAPDPERIAGVDLGIIHLFAVCSSAGSLLVSGRALRAESRLHLADQKARSRAVSRRAPQKGQRGSRRWRKYRARTKVLEGRHRRRLAQARHEAAASVVSFAQKDRIGVLVVGDPRGVLDKDAGARQNLATRNWRVGKLIAVLEDKAELAGIEVVTVGERVPRQLAHGVKTRLRSPKAGTSSVATVVLAHIATWWAPSTSLRGHLEAGSTSTLRGWRSRTVEPAGICPAGPGVTQGGWL

SEQ ID NO: 33743 - protein, 429 aa, unknown; identical to SEQ ID NO: 33742
  TnpB Polypeptide

SEQ ID NO: 33744 - protein, 419 aa, Cyanobacteria sp.
MLIYEAKLEGTPNQYSQLDGAIRTGLFVRNSIIRAWLDGQVKSRNDAYKYCKVLADNPEFPWARLLNSQARQAHAERAWASIERFYQNVRAQVKGKKGFPQFKKQQVRASVEYKVSGWKLSDDRRYLEFTDGFKAGVFKLWGTRDLHYYQLEQIKRVRVIRRHDGYYVQFLIDHKREENKELTGRQVGLDVGLSHFYTDSFGEKVDNPKFLRKDERKIKRLQRCLSKTQKGSNNRAKARNKLGRAHLKVSRRRNDWVCKLAQHVIQSNDLVAIENLKVRNMVKNHCLAKSIFDSEALASLRASAAWYRFREWLEYFGVVYGVPVITVNPSYTSQNCSNCGSRVVKTLSTRTHKCPHCGFVADRDENAALNILKSALKEWANTVGRTEFEVSGEIPLCKNRGNLTRVRELEERESLTSNG

SEQ ID NO: 33745 - protein, 397 aa, unknown
  TnpB Polypeptide
MKIVQKTYKFRLYPNKEQEKILANYFGGVRFVYNHFLAKRKEQYEKTKKSSNFYEQAKELTAMKKTEYYSWLREINSQSLQYALRHLETAYVNFFKGRTKFPRFHSKKHGGSFAVPQHFKVEGNRIFIPKFKDGIKFSKSQNVKGELRNMTVSVTPSGKYYVCIMAQVEIEDLEKTNLSVGIDLGLKDFVITSDGDRYTSNKFIKKYSKKLASMQKHLSRKKKGSGSWNKQRIKVARLHEKIMSCRKDKLQKVSADLIRKYDVICCEDLNVKGLLRNHHLAKSITDASWSTFVTMLEYKAKWYGKTIFKIGRFYPSSKTCHCCGYIKEDLSLSDRYYTCPNCGKLIDRDLNAAKNILSEGLRNISAGTVDYTDGEGVRLVYKHSLMKSESHNSSICG

SEQ ID NO: 33746 - protein, 353 aa, Nitrospirae sp.
MTRKSTINLNYGNSNKDIKLREFISEYTRIVNIFINLLWDKQVFSGCFISKDFLYQATWLSARAKQCAGKQALQIVKSQRKKKNKTKPVFSGNSIELDSRFIEIQKGTNSFDIWIKISSLGKKIVILIPSKRHYHFNKFETWTMKKSARLRIDGKGKMYLDVFFDKTEKEKKSEGESVGLDCGYKKLAVLSNGNVIGRELQNKIENISRKLQKSKGFNRALIERNEYINKEIKQIKLDNVKEMVVEDLKNVKHGTKGKIRKEFNNKLQRWVYSYFLNRLEQHCEVVGVQLHKVNPAYTSQTCFDCGDVHRANRNGELFKCRSCGYTADADYNASLNILNRFRPQVHMVPVHKN

SEQ ID NO: 33747 - protein, 624 aa, Escherichia sp.
  misc_feature (259)..(259): Xaa can be any naturally occurring amino acid
VKRLQAFKFQLRPGGQQECEMRRFAGACRFVFNRALALQNENHEAGNKYIPYGKMASWLVEWKNATETQWLKDSPSQPLQQSLKDLERAYKNFFQNRAAFPRFKKRGQNDAFRYPQGVKLDQENSRIFLPKLGWMRYRNSRQVTGVVKNVTVSQSCGKWYISIQTESEVSTPVHPSASMVGLDAGVAKLATLSDGTVFEPVNSFQKNQKKLARLQRQLSRRVKFSNNWQKQKRKIQRLHSRIANIRRDYLHKVTTTVSXRALARQNENHEAGNKYIPYGKMASWLVEWKNATETQWLKDSPSQPLQQSLKDLERAYKNFFQKRAAFPRFKKRGQNDAFRYPQGVKLDQENSRIFLPKLGWMRYRNSRQVTGVVKNVTVSQSCGKWYISIQTENEVSTPVHPSASMVGLDAGVAKLATLSDGTVFEPVNSFQKNQKKLARLQRQLSRKVKFSNNWQKQKRKIQRLHSCIANIRRDYLHKVTTTVSKNHAMIVIEDLKVSNMSKSAAGTVSQPGRNVRAKSGLNRSILDQGWYEMRRQLEYKQLWRGGQVLAVPPAYTSQRCACCGHTAKENRLSQSKFRCQACGYTANADVNGARNILAAGHAVLACGEMVQSGRSLKQEPPEMI

SEQ ID NO: 33748 - protein, 258 aa, Escherichia sp.
VKRLQAFKFQLRPGGQQECEMRRFAGACRFVFNRALALQNENHEAGNKYIPYGKMASWLVEWKNATETQWLKDSPSQPLQQSLKDLERAYKNFFQNRAAFPRFKKRGQNDAFRYPQGVKLDQENSRIFLPKLGWMRYRNSRQVTGVVKNVTVSQSCGKWYISIQTESEVSTPVHPSASMVGLDAGVAKLATLSDGTVFEPVNSFQKNQKKLARLQRQLSRRVKFSNNWQKQKRKIQRLHSRIANIRRDYLHKVTTTVS

SEQ ID NO: 33749 - protein, 502 aa, unknown
  TnpB Polypeptide
MKTGVAHKSYGVALPMNHGKLDKLFRLLPIWRKGLTYSLNQWCRELFETGSLSTWQSTKTFPNHLSQRQWDSVSRQAKAAFDSWLTNRQNEFRGLVYHSTLEDDLKRDLYEINLRYAWYEHSDDKTHHMARRLMKHLRRRNRIPDLSKCRTMDMDGKIARIENAKNTKCERWAVVSTLESGKPIRVPILADRKLDENLFLNNETLSNHLTIRFNLDGSVNGKLITTLPKAEKRTQGGTLGLDWGMDCMFALSDGRLLGTRMFDWLKQRDTELIELTRALQRNGVKPSKSRRYRNLQRRIRAYYRNEIGRLFNQLSKEQVKEIVVEELDFRNPNLSHKMNRLLTRTGRAAAEAKLKRIQELDGVTVTEINPAYTSQQCSHCGYTARDNRPARDLFRCKCCGTTLHADINASRNILLRRSRENGWRSIRKQEIVRILNSEHANRYAHHDDHLVGDAQTSGATPRRIQPYKRLEKTGVKVSKSTTKYYLKSHSYSAAAFMATAPT

SEQ ID NO: 33750 - protein, 288 aa, unknown
  TnpB Polypeptide
MVLCAFKSHRYGISAQELVGEKGISPTLEKRHHKYFLRFSYTEEVTLTKTPVKEQIICSVDLGINTDAVCTIMRADGTVLGRKFINHPSEKDRMYRTLGRIRRFQREHSSAQSRGRWAYTKRLNIELGRKIAGAIVKNAEENHADVIVFEYLEMQGKISGKKKQKLHLWRKRDIQKRCEHQAHRKGMRVSRVCAWNTSRLAYDGSGSVSRDPKNHSLCVFQTGKRYNCDLSASYNIGARYFIRELLKPLPVTERSLLEAKVPPVKRRTSCVYADLKELHLQMEILKAA

SEQ ID NO: 33751 - protein, 566 aa, Dehalococcoidia sp.
MEKTYFSNRIYKNTLTTKQVYSIASALINFNRAKHRAYRLLLTSHNYGVEHSPSVHLQIKERFSFDDYWANSAVREAKAQVSSQKELQKIHIAGKKEQVGVKKDKTKELSKKIKRFEELLASITKNKFKTWRGSDIAKRESGVVSVDFKKKSLVFYNTYDFEHRYLRPEIKRLKNRVKLIEYSVIRSEKELEKLQKGFLKGCVFGAKALFKKQFTVEKTRNDHEAWLEEWWKARYSSLRVSGRLDAKYGNFVFKYNFAAKMLTFDAPDGTHVAVPVVFKYGQKEVDAALIFQSERKKPIAWAIEDRGEYYLFKVTVQAPENPYVNYFKGDGVIGLDMNYDHIALVEIDRFGNLINWTIIPYNLDGLTKGQAVKVLEQVAVDIMEIARIKRKPVVIEDLDTTDSKFRLKYGNKRRNRKITLFAYRILTNAIIARANKEGAAVFKVNPAYTSVAGKLKYMVQRGIPIHVAAALVVARRGMGFKERVPPVLSAALPEKIRRRHHWAHWSYFQKQVKGVSVHLLYQLGKELKGGAPFKEALERLKSPPCAGRVCLPNVTSHGRLFASSLS

SEQ ID NO: 33752 - protein, 396 aa, unknown
  TnpB Polypeptide
MYLAHRVRLDPNNVQAAYLARCAGTARFAYNWALAEWKRQYEACKLDPALPKPTEAALRRQLNAIKRELFPWMLEVTKNAPQMAIQQLGCGFKNFFEGRTRYPTFRRKGRDDRFTLTNDQFSITGKRIRIPKLGWLRMCESLRFTGHIVSASIKRVADRWYASIVVDTSASLLPPAESQGAVGVDLGVTTLATLSTGETFAGPKALRSLLARVKRLARSLSRKVKGGRNYVKAKIKLARLHARIADIRRDGLHKLSSFITRRFQIIGIEDLNVKGMLGNHCLARSIADMGFGELRRQLEYKAAWRDRQVIVVDRWYPSSKTCSCCGHRLDVLELQVRQWRCPACGTLHDRDVNAAINLRNMAVSSTVAACGGEGSGPAPKAQGETGPCEAGIQQQS

SEQ ID NO: 33753 - protein, 280 aa, unknown
  TnpB Polypeptide
MLKTLMVKLDPTDEQYQMILETMHRFNEACNYIAGVAFAIGKANKVEVHKAVYYDVRERFGLSAQLTVRAISKVVEAYKRNKSIKPEFRSDGAIVYDQRILTWKGLEAVSLTTLQGRQLIPTKIGDYQKARMDRVRGQVDLIIVKGVFYLCPVVEVAEKSPYDPKGSLGVDLGIKYLAVDSDGEIHSGEQINQTRDQLGSLKSRLQSRGTKSAKRHLKKLSGRMARFSRDVNHCISKKIVAKAKDTCRSVALEDLEGIRSRATVRKAQRRSLHSWSFYQL

SEQ ID NO: 33754 - protein, 330 aa, unknown
  TnpB Polypeptide
MALFAVPGGWVVQAYKYALDPAPAQERSLWSHAGAARFARNHMLGLVKAALDQRAAERSYGITENDLTPGPGWSLPALRRAWNQRKDVVAPWWAENSKEAYNTGLDSLARSLETWSKSRTGQRAGAEAGFPRFRSKRGRASVRFTTGTIRVEADRHHVTLPRLGTIRTHESTRKLARRVEAGTARILSATATRDAGGRWFVSFQTLVQRTTTRPAQAGIRHPVVGVDLGVKAGSLMVVGTPALSRSSGCPHPRAWLLRGPGCAGCSARPLGRSAPATQRPGASRHRRTAGGAHKPGSGGPTPVPRTCAPTHCTRRPPGSPSNIRSSSWRG

SEQ ID NO: 33755 - protein, 371 aa, Clostridium sp.
VILAKKVRLYPTKEQEQKLWQSVGTARFIYNWTLAKQQENYKNGGKFISDNVLRKELTILKKTELNWLNEVSNNVAKQAVKDGCNAYKSFFKGLSDKPRFKSRRKSKPSFYNDTSKLKIKDNVVLIEKVGWITIRKNSIPMNCKYTNPRISFDGKYWFIAVSIEKEKLLVELTDESIGIDVGVKDLAICSNGMSFKNINKTKVIKKLKKTLKRKQKQCSRKYEKNKKGKEFVKTKNIAKLERQIRLLHRRLTNIRDNHLHQATNKIVKTKPSRVVMETLNIKGIMKNKHLSKAIAEQCLYEFKRQMQYKCELYGIEFVEADKWYPSSKTCSECGHVKTKLSLSKRTYICEECGCVIDRDYNASINLSRYSA

SEQ ID NO: 33756 - protein, 394 aa, Acaryochloridaceae sp.
MIVLEFKARTSQAQASAIDEAIRTAQFIRNKALRYWMDNRGTGKYDLNKLCKILAADFPFAKKLNSMARQASAERAWSAITHFYENCKKGIKPVRFPKFKKRSRSVEYKSTGWKLLDPKRINFSDEFEIGELRLIGTYDLSHYDTTQIKRVRLVRRADGYYVQFCIRVDVTIELEPSGQAIGLDVGLDSFYTDSNGHKEPVEKFYRDSQKKRTRLQRLVSRKKKGSANRRKAINRLARHELKVSRQRKERAKRLALCVIKSNDLVAYEDLRIKNMVKNHCLAKAIHDAGWYQFRLWLEYFGKKYGKVTVAVNPAYTSQACSSCGAIVKKSLSTRTHVCECGARLDRDENAAINILRKGLRTVGHTGTWLLDSQNASGDETAIVLNSGLVQQVLS

SEQ ID NO: 33757 - protein, 433 aa, Gammaproteobacteria sp.
MQKAQSNHIRTSQVIVRKHDGSFRGMDYVCQIARRIKNATHYLIRHEKKPNGKPLSHSDADKWLKTNNADLYKKLPSAIAQRTTQIAGQEWSSFFAAKKQFDKRPDSFKAKPKPPRYANKATTGHIGRNGFRVVEGMVYFAGDIVPPVRTQYSFNQDWNAKVSDTVLREVRFVPKGNCYVIELIIDEAKLVTDGQYCPLLDKSRHAGIDLGIDNLMAIATNQLDIHPALVKGIGLKSINAWYNKRVAKLRSLAKYDHIQAVTNKRHRQVKDALHKSSRFVVDYCVKHNIGQVVIGHNKGWKQNINIGKRNNQKFVAIPLTILINQLRYKLEMLGITVIVREESYTSKASALDNDHIPTRGDDVIPVFSGKRVKRGLYQASNGQHINADINAALNILRKESGELACRGLVNRPIVFYPIDRNTVRKERSLPLAA

SEQ ID NO: 33758 - protein, 548 aa, unknown
  TnpB Polypeptide
MGRAKTDTFIVELPLVVTEEDEFALLGRFRAGQMIYNAVLGEALRRLGLMRQSRAWQVARKLNDAGEKTETYRNLRQKFGFSLTELSSFGTTCKNEANFDNRLGAHETQKISERAFAAVEGYMFKTKGRPRFKSLSRPLRSLEGKTNSPVAIKKNGKPASSGKCGIRWRPGIGSVEWAGLFLPAMTAPNDVWQTDALQRKTKYCRICWRTCNGKRRWYVQLAQEGISPSKQKNETQTGEVCLDVGPTDVAVVTLAGLITLFTLCPTILQPWSEIRILQRAIDRSRRATNPDCYDNKGRWIKGKKQTVFSKNYKKLVIELAEAERKLASERKRSHGEQINAILSYGTTIKLETLSYTSFQKNYGRSTKVRAAGMFIESLCRKAESAGGKRVDLNTRKLRLSQYDHITGEYKKKPRSQRWHILGDGRKMVQRDIYSAFLGLCVDCPEIAGKTNTKREREEKQTQEKALQRHQPSHIAEMWAVAEPLLERVGWCREVQLASGGTYVHPTVTPMRTRLPVRAGSTLKKVCPTSIIQRIGNGPDAVAAFCPAG

SEQ ID NO: 33759 - protein, 448 aa, unknown
  TnpB Polypeptide
MQIVSSYGVEIKKKNIPLRSTLDIFRKAVSYLIPVYAEAWEELSEIRNPQKRFNEAEHLVHETKKNHARFLFDRHFPKMPSYLRRAAIQHALGAVSSYQTRLSLWEKGELRGKPKLVCENHAMPVFYRDVMYKEAEPGEDAAHLKLFDGREWKWFQVKLLHTDMEYLRKKWSGKKASAPTLERKHHKYFLRFSYTEEVSLSKTDVKEQVICSVDLGINTDAVCSIMRADGTILGRKFINFSSDKDHLYHVLGRIRRFQREHSSRQVQSRWDYAKRLNMELSRKIAAEITKYAAEYQADVIVFEYLEMQGKISGKKKQKLHLWRKRDIQKLCEHQAHRNGIRVSRVSARNTSRLACDGSGAVERNPENHSLCTFRTGTLPERQCSKRPFKAPDRKINEKKAAFFAKQNGAGMRPRLCTTSFERHLPPLLKGNKNFALCVGSVAGKCHAP

SEQ ID NO: 33760 - protein, 425 aa, Desulfotomaculum sp.
MIRTYQLKHQANKSKQTKIKAVLDEYRVLASKITVRQWYLFFTKGGFNKNAYIKHLTTKLSERYKQTCQYQIVGLLESFVSNRKNNFVDIVCHSSLDESAKVDLLYINKYGLWFNSSVKIPVFNEKGKKIKDQYRDIEPEIIKLARKIFKHILSRHRKPTMGRINMALDQKVAVIKTRNNNGAKKFDYWVRLSTLDKGKPVYIPVQSNEYFEDIPGQLKNFCQFNLTKEGKITIFFIKDKPKSKEYKPLTPKIALDLGLKSIFTTDRGDLFGRKFYETLLKYDGIITELARNRQKQGLKVRSPRYDRLVSKLRSYLKNDICRIVNRIVKLYCPKEIVIEKLNFQNPNLSRRLNRLLSRFGKAVITAKLDAAAEEYGIKVTYVNPAYTSQTCNSCGYVDKSNRSTQAEFVCRYCGYKTHADVNGAT

SEQ ID NO: 33761 - protein, 384 aa, unknown
  TnpB Polypeptide
MSEQYVVRRLKLGRSEQLDSLARAAGDLYSRTLVSFWRVVRKKGIWLKPSSLMRWHNSDALHAHSADAVVQSFFASLQSWRKRRKADPQARPPKRRRRFFKVQWKASGIRLRDGCLVLSNGKGNKPLQIPWQWDIPKLVEIGWDGQQYELRATYTKTIQSTLQGDKVAGIDLGEIHLAVAHDGERCTIANGRLLRSKRRYQNKLKARLSRLIDTKKRGSRRWRRLIRSKRVQLARLNHQIRDILHKQTTALISTLHASGVQKVVIGDVRDIRQGLDLGATGNQKVHQMLHGATRHMLTYKAARVGMAVDLQDEAYTSQTCPACGHRRKPSGRDYRCACGFRYHRDGVGAWNIRQKYLGSGPVVGAMAAPSGVWYHPHMRCSSAR

SEQ ID NO: 33762 - protein, 286 aa, unknown
  TnpB Polypeptide
VRTTYQYRLRPTASQIAVMENWLEWLRKQYNYRLAERFNWWEQNRCPVNACPLICHLPELKEQPDFYSQKRDLVNTRERFPEYEAIHSHVLQNCIERVHKAFDRWLKGDSNGKRLGKPRYKGVGRYRSFTFPQMKQDCIQGKFIYLPKIGWVKFIQHRPLPEGFTIKTATIIRRADGWYVSLSLQDSTVPEFTPAPPTLDNTIGIDMGLNDFLVTDEGEAVPVPQYYRKAQKRLKRLQKAVSRKKKGSNRRKKAIKRLAKVHQKVVNQRKDFHYKTAHKLLKKGGT

SEQ ID NO: 33763 - protein, 373 aa, Methanosarcina sp.
MLKVLRYRVYPTKAQKTTMNNTLELCRWTYNETLALRKDAWESEQKNIGYYDSKKMIPEWKKEKPELKTVHSQVLQEVIKRVDLAFQAFFRRVKTGEKAGYPRFRGYGRYDSFTYTQSGFSLDSDRLTLSKIGDIKIKLHRPVEGEIKRLNVRKMPTGKWFVSFLVETDTPLELQKTGLSVGVDVGIKSFLTLSDGNYVPNPRFFVTEEKFLAKVQRKLSKLEKGTPERAKALKAVQRVHERISNKREDFVQKVSLNLVRNYDLITFEDLNIKGMIKNHKLAKHIADVAWNKLVTITSYKAEWAGKRVELVNPCNTSQMCSGCGEIVKKELSERIHSCPYCGLTLDRDHNAAINIMRLGLQSLQNSGRCPSLQ

SEQ ID NO: 33764 - protein, 398 aa, Fischerella sp.
MNQVLTISCKLKVSDLQAAKLDATLDAFVQALNWVNQNTPKKIVNAVKLQSLCYYEVRARFGLSSNLAQQVCRRVAGSRKVAKQKNRPVKAFKAGFVTYDARIFCFREKDWTVSLTTVDGRERFELAIGNYQRGMLKDSNPKSATLVKRQDGSYYIQICLESEPPQPQDGDEVLGVDLGRTDIAHTSVGQHWDGRDITKVRDHFANLRAKVQHKASKGTRSSRRRCRQLLQRLSGRERRFQSWINHNVSRRIIETAKSIGASIALEDLTGIRERTNQQPRNKTEQRRSNSWAFHQLRQFIGYKALSAGVKVVAINPRYTSQTCHQCLHIHPDPDKSYRSGKGFKCGHCGWHGDADFNGAKNIQSIGLLVNQPGGSWLSCEITGGLLKARAVPARVSVG

SEQ ID NO: 33765 - protein, 453 aa, Symploca sp.
MKTIAGFIGPTNDTITDNKEVVLLFGCQQVLIHTNKDTQAIIEYLCGESNKVFNCAVYYAHQIYFKAHRYVTKAELDRELKTNKHFQAMYSQAAQQTCHSVFEGFKSFKALNKLFRRGNLIEKPRPPKYRKGGLNIVSYPKQALKLIDNKIRIPLGSKVKAWFGIDSFTITLPSNLEFKDIRELRILPRNQCFYAEFVYKLDLVETSLNLDNALGIDPGMDNWLTCVSTLSTSFIVDGKHLKSLNRWYNKKISTIKEGKPQSFWSKKLAHLTEKRNRQMRDAVNKAARLVINHCLENNIGSIVFGWNQGQKQESNLGSKNNQKWVQVPTARLKTRIQQLCEQYEIRFVETEESYTSKASFVDGDYLPKYGEKPNNWKPSGKRVKRGLYRSALNWYLNADCNGAGNILRKVSRMLGFNLSGLSRVSLTAPQRVFLWSAKKTRRNPVSTSPKVSA

SEQ ID NO: 33766 - protein, 419 aa, Symploca sp.
MTQRAYRYRFYPTTEQESLLRRTLGCVRLVYNKALGLRTQAWYGRQQRIDYKQSSNLLTQWKKQQELDFLNEVSSVPLQQCLRHLQKAFTNFWAKRAKYPNFKKKRNGGSAEFTKSAFQWKDRQLYLAKNGEPLPIRWSRTLPKGVSPSTVTVRLDQSGRWFVSLLVDDPTITPHPPTNKQVGIDVGVSSLISTSDGEKITNPKHFNRLHKKLRRVQRELSRKTKGSNNRYKASLKVAKVHAKIKDTRTDFLHKLTTRLVQENSLIAIEDLGVRNMVKNRKLARAISDAAWGEFFRQLEYKCQWYGRELVKIDRFFPSSKRCNNCGFVVERLPLNIRSWDCPECGTKGIDRDINAGKNILAAGLAVRQRGLGGFPHERLPNPFGVSVCGAPIRPDNHGVKGQLRKTLRGEEAPNLSCEA

SEQ ID NO: 33767 - protein, 393 aa, Lentzea sp.
VKRAFKFRFYPTEAQAVELSRTFGCVRKVYNLALQARSEAWTQRGERVDYEATSALLTAWKRTEELAFLGEVSAVPLQQGLRHLQAAFGNFFAKRARFPRFKSRKRSRASAEYTRSAFRWRDGTLTLAKMAAPLDIRWSRSLPDGVAPSTVTVSRDAAGRWFVSLLCEDPSVAPLPVTDAVVGIDVGLDHLLVLSTGEKIANPRHERRDRERLVKAQRALCRKQKGSSNRDKARVKVARVHARMADRRTDHLHKITTRLVRDNQTLVIEDLAVSNMVGNHCLARAIGDAGWRQCRQMLEYKARWFGREVIAVDRWFPSSKLCSVCGALAAEMPLQVRAWTCGCGATLDRDVNAARNILAAGLAVTVCGAGVRPQRNTPGGQSVTKQKNLRREP

SEQ ID NO: 33768 - protein, 415 aa, Rhodoferax sp.
MQRLQAYRFELIPNGEQQRDMRRFSGACRFVFNKALALQKANTQAGEKFIGYVAMAKRLTDWRNGAETPWLKDAPCHPLQHALKDLERAYKNFFAKRADFPRFKRKGSGESFRYPDAKQFKLDAGNGRIFLPKLGWMRLRLSREVLGTLKNATISLNAGRWYVSIQTEREVEQPVPTATTAIGIDMGITRFATLSDGTFVAPLNSFKKHEQRLARYQRRMSRKVKFSKNWLKAKRRVQNTHTRISNARRDYLHKTSTTISQNHAFVCIEDLRVRNMSKSAAGDTEKPGKNVRAKSGLNKAILDQGWFEFRRQLEYKLGWNGGTLVAVPAHNTSRTCPCCGHNAKENRLTQSKFFCVDCGYEENADVVGAMNVLARGHRVAACAEDGSGLGRKPKAKPASVKQEPTEATMHEVSHA

SEQ ID NO: 33769 - protein, 492 aa, Bacillus sp.
MIIRKGGTHVAKKKNKPFMKKRVKRTVKQRAMYANQADETIIEKLTERIRNAKNYMFSRLAGIHSYPRLQDGKAVRNEWVKNKELVEQFKLPARFWKITLEDVVSNLKSLWSNTCNKIKEVAKENENLTEDEKNYIRYVCSAPKLFGSILIRESIVRPKSIQKLEVRENYVHSLIHRYARRYRGKTPYTYSSTFQLDADMYKYVQEDGVTYIEISTHIKNNRIRLQCSDQNVYKKNIRVTYDQGVFTLAHMVTSKETKNWKGQNEIGVDKGYKTMLISSSGTHYGEGLNTLLSEETERLHKVNQKRNPYYAMVRTLEEQGDTEKAERIRVNNLGKKKYKKNKHKHEETVKSFINHELNCLIQKERPSIIGIENLAFVSWDEKMPKHIKRKLSRWIKGYIDERLLFKCDVNGIAYEYVNPAYTSQECHKCGCLGNRKTQEKFICQQCGSMHADENASKTVKNRLHDKEITLYTPYKQVKKILEKRKAAKATVQ

SEQ ID NO: 33770 - protein, 403 aa, Cyanobacteria sp.
MFSLKLELKLNNKEKTKMAQHAGFSRFVYNYGLALMRMIDHQEIKGSSSKKIDTIKKVFTNYTKKQPDFNWCNKLSSRVYQNSFGDLKTAYSRHFQGLGGLPVFKSKKDKLSFTVDSSNGKVLLETGKTIKVPTLGTFRLKEAIPFSCISQTFTICKSGDRWFISFCVDAQRLPPRIHPIIEPIGIDLGCKIFATLSDGNVIESPRPYKKAKTKLGMTQYHNRNKQLGNGKQGIKASNNAKKYYHKIRKQHHQIACQRKDFLQQTTTKLCKTYAHIKIESLNVKGMMANHKLAASIADLGMYEFKRQLTYKAEWYANRIDVINQWYPSSKKCSNCGHKKEKLSLSDRLYVCGECGFEINRDLNASINLEQAPESVIVEKIGWVTSELTSVDSVSAFGAGGSRK

SEQ ID NO: 33771 - protein, 104 aa, unknown
  TnpB Polypeptide
MKEMSQDARFGKTVHDNGWGMFTDFLAYKTERAGKKLLRIDRWYPSSKTCSCCGCVKEDLQLSDRIYECACGNRMDRDQNAAINIYREGIRISGMILDTEKKIS

SEQ ID NO: 33772 - protein, 445 aa, Moorea sp.
MQFGYRYKLKPSRQQKATMNRWLDMLRSQYNYLLRDRIESFDQAKAPRLGNYCDLKSKSEVCPLTCSVSKSHSVGYPWKSNKKNPRRTAYEAQSSNLPILKKERPWYKTINSTVLQQALRQLDVAFSKFFKGESGYPKPKRRSRFRSFKYSPGQVKVDGNRIYLPGIGWMGFFNSRPIPEGFNVKSVTVRRKARGWFVSLQIEDKSIPVPPLKARDEINPERVKGCDLGIKKLISISTGKMIANPARTKSFKRRERRLKLRQRAASRKKKGSKNRSRSYSKVASLHERITNNRNAYHWETANKLVDGADALIFEDLNIRAMKSRCKPKPNENGGYDSAKPTLRERNGQSAKRGLNRSISNAAWGELVNKIEAVAAKSGIPVIKINPKHTSQSCPKCHHTSKENRKKEKFLCTNCGHYNDADVNGAVNIKIRGLKKLGIDPTRRAP

SEQ ID NO: 33773 - protein, 328 aa, Moorea sp.
YSNVLQDCVKRVDLAFKRYLKGDCNGKRSGKPRFKNKARYRSLTFSAFSKEPIKGNKLNLPKFGWVKMVYHRPIPEGFKIKTATLTRKADGYYVTLSLQDDTVPSVIPIEEVSNPIGIDMGLKSFLVKSDGTEVQIPQYYRKAQKRLKKIQKAVSRSKKGSNNREKAVTKLGKAHKQVSDTRKDFHFKVAKSLLDDHDLVAHEKLNIKGLSRTRMAKSVLDAGWGQFLDILSTKAVRVAWPTAINAGLITKAVNPRNTSQNCSNCGQKVPKKLKDRVHSCPHCGYTADRDVNAAINILKLAVGHPVGNKAYRVSEALAGVGKKPTLNL

SEQ ID NO: 33774 - protein, 383 aa, Ktedonobacter sp.
MRLVYPTHKQVSTLQAWLGLCCEVYNAALDERKSAYRMAGVSLSYESQCAELPGCKRVRPELGEVPSQVLQDAVKRVDRAFDDFFRRVENREVPGYPRFRSRSRYASLTFKQYGNSFNLLPGTKGNKGTLVLTKLGHVKMIMHRPIKGTPKTAIVKRTQTGKWFVSISVEIPKEEALSSRLPEAGEAVGIDVGLSTFAYLSTGEAIANPRFFRAEEAAFARVQRKLSKAPKGSKKRTKKRKVVARVYERIGNRRKNFIEQEVCKLMKRFGLLAVEALVVRNMIRNPKLAKSIADVSWSQFFGRLQAKAEEAGRQVVRVNPAYTSQICSACGHCQPMPLSVRVYECPHCGLVIDRDHNGSKNILVEAFIAVGRHSRVIPEAPGL

SEQ ID NO: 33775 - protein, 537 aa, Ktedonobacter sp.
MFDNSNTLEYTLQETHSICLRETYGKWQKPRKQSDKRCSIRHSQPTPSRRIRHSTIVSWPSTLRSSRPMRASSLSRARRPSPPWRNSPMRRRRAPIPLCRSPTSPRISPRCSGAPPSMRPLALLAPFSPRSNSGEHAKRSTRPNHAKRVSRSSRSGSGHRSRHAPGTSRPPSTRACGKNALSTPSCSECGPARAGPGSKLVRFLAIFPRGTRWAVHSLFARGIAGGYILPLRRPSRLPQRAESNSPPPRHVSARWISISTSIWLCAASRRLTAPSWLLPSSEMAQRYRAQGAQLLGRIARNRSQTGILAENEQDNADLWAKIRHVDEQVAHLVSSRIVQFAKEHQASILVFEHLGNLQPEKGTYSRRSNSKRAYWMKGRMFRYSKYKAWNAGGIITARVNPRNTSRQCHRCHGLVVRYNQGYPQEGYTPGAALCFCPQCQMRDHADRNASLRVGQRLIERTQAPLKEKPHALTRRARREPKGSGVGISQDAEREGQPSLAQARQGDHANGPGTAQGGLRRMGARLSDMATTLRLHFE

SEQ ID NO: 33776 - protein, 554 aa, Ktedonobacter sp.
MPKTCRGQRKKKEQQEKRPATPTFLLELPLVVDAGQASRLRAHLEAARQLYNAILSQGQQRLRRMRADPAWHVARTIPRTQKAERAAAFSALRKAYGFTEAALHEAVKGLRVGWIAEHIEAVLAQTLATRAYRALNRVCLGKGRRVRFKSRGRGFSSIENKRNDTSLRFVLQPPEEGNTGYLLWNGDQLPALIDWKDEVVTHGLRHRIKYARLIQRPASSPRAAGADAHGDRYFVQLALEGKPHQKKKHTVGMSIVGGDLGPSTLALFPQEGEASLEVFCAELAPEARAIRRLQRQMDRQRRAANPENYDEKGRIKKQGKKKLQWKQSKRYQATRRRKASKERKLAAHRKSLHGRKVHEIVAQGNIIIIEKISYKAWQKTFGKSVGLRAPGMFVELLRRTVASTGGILVARSHAHDGPEPMVSRMWQTGQEAAFSALASLCMWRGARATRPVFGVSCRLPRSSKSHSLVCPIPGVLGGCGGAPAGSTRAYSTTRERGADLAPKLGCDSSQSASAQKSEGTYTRASLSCPSRKAGSVDGTLRTPAAFARGVFSCA

SEQ ID NO: 33777 - protein, 280 aa, Ktedonobacter sp.
MIKAHKIRLHPTPEQAVSIAKAAGTARFVWNWALAEWNRQYEAGEKPTALKLKKQFNEIRREQYPWTWEVTKNASDQPFLDLGKAFTAFFEGKAHRPRFKSKKRSKPSFYLANDQFELGDHRLWVPKLGWVNMAENLRFKGRVRGARITKTADWWFVSLQVELPDAIPAKKPAAVGIDVGLNRLATLSTGEGVENQAFLKTALKKLRQANKRLHRRKPGSKNREKARRQVARLHYRITSLRDDVLHKLTTRLANCYGSIGIEDLNRKRVAQESAAVSFVL

SEQ ID NO: 33778 - protein, 438 aa, Ktedonobacter sp.
VGRSGFPHLYPLLFHAIVLSMQTVKIYQLNHLSPALFQRLKAAQVEAAQVWNCCMEMHKAARLAHLPWPGRDALQKATKGRFALQSQSVQMIVATFLANVQTARQLRQTHPQMKMKYPWRTKRFYPVKWPAQAVSKENGRVVLPMGRGRPSLVLPIALPEHCGACSLVWNQGFELHVCIEIPQATEAPGEVTATVDLGEIHLAAVTTTTSEALIVTGRGIRSLKRQRQLQLGKIAKKQSRCQKSSCRWKRLQRAKNKQCRRAERRIRDLRHKATRKVIDFCVQHQVGTLFIGNPHGVRDKNCGRHHNQRMALWEYGKDIAYLTHKAKAAHIMSFTGSERGTSSQCPVCGHKHKPKGRNWACVCQFSGHRDLVGSINMHRLAYGTQVKFPRSFTYLRPGPSRSRSSRADTPQRCLSKTEAQPRLVQTVSSETGHPSELA

SEQ ID NO: 33779 - protein, 351 aa, Ktedonobacter sp.
MGLGTVNEEHAPQTEEAVLPVRVKAYVYRLYLTRKQEETFLWTLRRCKELYNAGLEERTTAYKMTGVSVSYRKQADQLPQIKAIRPEYREIHSQVQQDVLRRLDKAMQAFFRRVAEGQTPGYPRYKSNSRYHSFSYPQSGFEILGALSSQDKKRKNTCRLALSKIGHVKMRMHRPLKGRITTCTIKRDGDQWYAIFSVEQSFDPSTVVHPNKQAVGIDVGITSYATLSTGEQIANPRLYRSTEARIKATHRTLARRKRGSHRRNRAKRELTRLYRKVRHRRQDFLHKTSRRLVNQYGILVFEQLQILNMTARPKPKKAEASPTANLSQGSMSLESTAVGSVQYLPSQVPHA

SEQ ID NO: 33780 - protein, 311 aa, Ktedonobacter sp.
MKLRDGEKWRFNACKKTLAESRAHDPELNQVYGKLLAEVYYRLDGAMRAFFRRVANGETPGFPRVRPRHGFFTLCYPAMYLTLEGNTLMLPTGGKGKHKRFPAIRAHLTELPPEGFREVAISRDGRGNYYASFSYREPEQAKRDGNTVAFDLGIKTLATGVTEGGRIYHIGGFKGSRWYNKQLDRLRSKRSKCKKKSRRYLHLSKVYKRVSQRKRNKQRDSLHKASHLIARRLVERTVVVGDLSQRHMVMKEHQERNKALNRAVYNDWGLYAFVQMLTYKCQLYGKELQLVDERNTSKQCSGCGNLQAMPL

SEQ ID NO: 33781 - protein, 242 aa, Ktedonobacter sp.
LKLSKIGHLKMVMHRPIKGCTIKHDGDQWYAVFSVEQAIGATPVHPSTKTVGIDMGITSYATLSTGEQIANPRIYRSTEQQIKEAHRRLSRRKRGSHRRARAKRALTRLYRKVRHRRQDFLHKASRQLVNQYGMLVFEALQIPNMTARPKLKPAEAPAPLQGSNSGTAAAVTHYLPNGAAAKGGLNKSILDAAWGRFITLCACKAEEAGGMVVKVAPQQTSQLCSGCGVLVVVSAKIDQVLG

SEQ ID NO: 33782 - protein, 309 aa, Ktedonobacter sp.
LIWAKPLRRSSRGRLAVRSSRARNAASRASISPTTNSRSGIIASGFPSSDGSIWPRENLRFEGNVLGARITRTADWWFVSIQVELPDEIPVKKAAAVGIDVGLNRLATLSTGEQVENQAFLKTALKKLRQANKRLHRRKPGSKNREKARRQVARLHYQIVCLRQDVLQKLSTRLADSYGIIGVENLYLKGLPKNQRLARAFSDASLGTLVRLLEAKATQRGGQVIKVDRFFPSSKTCHCCGWTWDQMTLKDRIFVCQNSPCPYVQFPQDRDHNAGHNVLQEALRLIGLVDQAVSGTGSDEDVNWAVDAG

SEQ ID NO: 33783 - protein, 338 aa, Ktedonobacter sp.
LQELKSENNTEKSPHPILPLSDIAPDIPAMFRRAAINAALGSARAFFSSLKTWRVRKEKHEAKPCKKSKKKQPFRERPPVPPRTWNKSASFYAGLWKERSQHSIMLRVWTGSCWSWLKIGALSRDIPEGYALGSPQLVRKGKSWWLHTPIEKTLEAPAKVVEQIASKETRICAVDLNLDQHVAVCTVQAVEGTILATSFIGNGTAVSGFRKRLLGRIARNRSQTGIIAEGEQDNADLWRKIRHVDEHIAHQVSARIVQFAIEQQASILVFEHLGNLRPQKGTYSRRSNMKRAYWMRRAHLQVLKVQGVECTWSHHVPRQSPQYESGMPSLSRARHSLQ

SEQ ID NO: 33784 - protein, 414 aa, Ktedonobacter sp.
MLLCKKIRIELSEQDAATLEFMQGKCRGLYNWWVMRLQNGEKWRFNECKKTLAESRAHDPELNQVYGKLLAEVYYRLDGAMKAFFRRVKAGETPGFPRVRPRHCFFTLCYPAMYLEIEGEKLMLPTGGKGKNKQYPNIVARLTEAPPEGFKEVAISRDGRGNYFASFTRERNEKPCETDGTVAFDLGIKTLATGVNEQGGVYTIGGFKGARWYNKQLDKIRSKRDKCKKKSRRYLHLSKVYKRVSQKKRNKQRDSLHKASHLIARRVVERTVVVGDLSQRQMVMKEHQERNKQLNRAVFNDWGLYAFVQMLTYKCQLYGKELHFLDERNTSKQCSGCGNLQAMPLWKRTYGCVECGLVMDRDENSAHNILTRFFARRAPHTERCGVLHATQSGVEVMGASCEGQVQQLNLFESA

SEQ ID NO: 33785 - protein, 456 aa, Ktedonobacter sp.
MEDAKETPGSQPDEIALPERLKAYVYRLYPTRKQESTLLWTLRRCKELYNASLEERTAAYKMAGISVSYGMQADQLPQVKEVRPEYQEIYSQVQQDVLRRLDKAMKAFFRRVAEGQIPGYPRYKSATRYHSFTYPQSGYQILGALTSHDKKGKKTCRLKLSKIGHLKMLMHRPIKGSIKACTIKRDGDQWYAVFSVEQAVSATLVHLSNKTVGVDVGITSYATLSTGEQIANPRIYRSTEQQIKEAYRRLSRRKRGSHRRSRAKRALTRLYRKVRHRRQDFLHQTSHRLVNQYGILVFEALQIPNMTARPKPKKEEAPTTTEGSEGGATAGAATHYLPNGAAAKSGLNKSILDAAWGRFITLCACKAEEAGGMVVKVAPQQTSQKCSGCGVLVPKDLSVRWHSCPTCGTELDRDENAARNILRRYELQGAIPDRKKGNPTRKVGRGGKRPTATGVL

SEQ ID NO: 33786 - protein, 300 aa, Ktedonobacter sp.
MSIVGGDLGPSTLALFPQEGEASLEVFCAELAPEARAIRRLQRQMERQRRAANPEHYDEKGHIKKQGKKKLRWKQSKRYQITRRRKATKERTLAAHRKSLHGRKVHQVVKLGSTIIIEKISYKAWQKQFGKSVGLRAPGMFVELLRRTVASTGGILVEVPTRTTALSQWCHGCGRRVKKPLSQRWHHCACGVGPVQRDLYSAFLAASLDPADPIPSCARYQEYWEGAEARLRAAHERTAQRAKEGQILPRSLGVTRARARLPKSLREPTQEPASLAQAGRLEAWTERSEPPLLSHGESSE

SEQ ID NO: 33787 - protein, 286 aa, unknown
  TnpB Polypeptide
MAQQILKEVDGSFKSFFGLLKLAKKGKYAFKDCRLPNYLPKDGYTTLVIGFVRLNGNKLILPYSNAYKKTHKCVEITIPPILLDKKVKEIRIIPKANARFFEIQYTYEAECIQRNLNINNALAIDLGINNLVTAVSSNGKTFIIDGKRLKSINQWYNKKNAHLQSVKDKQNIGKRPTNKQKANTRNRNNKINDYMNKTARTIIDYCINNDIGTLVVGYNETFQKNSNIGQANNQTFVNIPYGQLRFKLEYLCEINGIVFVKQEESYTSKASFWDKDDIPIYNNDNP

SEQ ID NO: 33788 - protein, 392 aa, Streptomyces sp.
MNRHFRSFLTFDSIATRCGRTVLRVQLRYNYRVYPDARQRSALAQAFGCARVVWNDCLRDRREAYSAGLPYVPSGELSKVRITQAKRTEERAWLAEVSAVVLQQSLRDLDAAFKNFFDSLKGKRRGPKASPPRFKSKKDTRQSIRLNANAFSLQENGTVYVAKVGRLKVKWSRPLPAAPTSLTIVKDSAGRYFASFVVDTSPDVLPELDSEVGIDLGLTTFAVLSDGTKISSPKFLRRAEKKLKRLQRDLSRKAKGSKNRAKARIKVARQHARVADRRRDWHHKASTQIIRDNQAVYVEDLSVSGLARTRLAKSVHDAGWMQFINMLEYKAAKHGRHFGKIGRFEPTSQPAGSRTAPNPSTSGNGPVRGAERSTTATRTQHTTPWPPDGRTG

SEQ ID NO: 33789 - protein, 459 aa, Microtetraspora sp.
VKVVQAYRYALDPAPSQVEALASHCGAARFAFNWGLGLVKAALDQRAAEQSYGIPSELLTEAPWNLYALRRAWNTAKGQVAPWWAENSKEAYNTGLDGLARALKNWAASCKGKRAGKPIGFPRFKSKHRAALSCRFTTGTIRLEADRRHVTLPRLGTIRTAESTRKLARHLERGTGRIMAVTVRYEGGRWFVSFTCEIDRADRSPARSDAVVGVDLGVKNLAVLSTGEVVPNPKHHRAALRKLRKLNKELARRHGPRTPGGGKRDASARWHKTKAALGKAHARVAGQRRDGLHKLTTALAGTYGTVVVEDLNVSGMLANRSLARVIADTGMAEVRRQFTYKTTWNSGRLIVADRWFPSSKTCSACGAVKAKLPLHVRVFDCDECPLVMDRDENAARNLAALAADVAQSCGETENAPRETGRDGNRRPGGVGVRPTIGGRSAVKREPPMRGMPGRKATAA

SEQ ID NO: 33790 - protein, 412 aa, Haloactinospora sp.
VQLRYRYRLYPTEQQRQALAQAFGNARVVYNDAVRARQDAYQAGEKFPTGTQLQKQLITNAKRTDERGWLAECSNIVLQQAIRDADAAYTNFFNSMKGKRAGRRMGAPRFKSKRDQRQVIRLHTGGFRIRENGRLNLAKVGDVRVAWSRDLPSAPTSVTIIKTACGRYFASFVVETDPDGHGEHLDPVVDDTGEEAELALDLGLNAFATDQHGHTITNPRVLRRAERRLKKAQRALSRKQRGSTNRAKAGARVARLHAKVADTRADWLHKVTTDVVRENQTIYVEDLSVKGLSRTRMAKSVHDASWGRFLALLEYKAARYGRTLVRIDRFHPSTKLCSSCGAVQDMPLSERVYRCPCGLVLDRDRNAALNILAAGRVERLNACGADIRPATRAVGVEAGSSGIPRGNTASAA

SEQ ID NO: 33791 - protein, 503 aa, Nostoc sp.
MRLVERHIIKQNNKWFREIDQMSFLSKNLFNCAVYLCRQAFFKNQPIPTLNQIYHSLKNSDDYKALPSKVAQLVFKQVDKCFKSYQKTKKEYDLNPGKFLGEPKLPKYKHSSKGRNILAFNNQAFSKKALKKGLISPSGLSVFIKTKLAEIEEIRIIPKNNVYIIEAVYEQEEPPVVTNNRIAAIDIGLNNLATVSSNCLDFKTFIVCGKAIKSCNQFYNKVKASLQSQLPKNQKAQSQSAGRQRSELCKRTSRKIEALTLKRNNKVDYYLHTASRFIVNHLASQNITHLIIGKNENWKQSINLGSKNNQNFTSIPHARFIQQIEYKAQLVGIKVQISEESYTSKCSFLDLEPIKKHEQYLGRRIKRGLFRSNSGKIYSADLNGSLNILRKVVGDSIFDRNSIERLVVSPVRLTIKVQISEESYTSKCSFLDLEPIKKHEQYLGRRIKRGLFRSNSGKIYSADLNGSLNILRKVVGDSIFDRNSIERLVVSPVRLTPYQARNI

SEQ ID NO: 33792 - protein, 387 aa, unknown
  TnpB Polypeptide
MIKRKAFKCRLEPTTEQVERLRVLCGHARFVWNHGLRHCLSELEAGKKVPSAFELNKLVTQWKKKEDTVWLTEAYTDNLQQKLKDLHTAWMRCFDKSLNAEKPKFKKKGKSQDSIRFVNFNKYCQIDNRRVKLPSKLGWVKFRKSKDIQGTIKNCTISLNSGNWYISFQVEQEVNEPVHESTSAVGLDVGIAKFVTLSDGTQKKPESPYRKYEKQLAVEQRKLSHKVKFSENWKKQKVKIQKLHSKIANCRKDFLHKTSFEISNNHAMIAIEDLKVSNMSKSAKGDSENHGKNVKAKSGLNKSILDQGWFEFRRQLEYKQFWKGGILIPVPAQYTSQTCPCCNHMSKENRKTQADFVCVECGYENNADIVGALNVLERGHRLLACGE

SEQ ID NO: 33793 - protein, 450 aa, Anabaena sp.
MTFRLYPNKQIEQSLRYHRKLHKDLYNAAVYNRFTQYQKFNHSVSYFEQQNCLPAFKEIWTEYKEINSQALQATLKRVDFAFERWFKGLGKRPRYKSIRHYSGWTYPAKTGYSVESNGEHGYLNLSKIGRIQMRGKAKYWGTPTTCTVVYRNGKWYASITVEVLDQALKPDVLPTGAVGIDLGCKSALSITDGESHQQIKAPKFLRNAEHLIKKASKDKRRKQSPNTKKKVQASRRWKKAQSKVSKLTRQVANQRQNWVHQVAVEIISSNSFVATEKLEVKNMSSKAKKCKRKKQKAGLNKSILDVGFGMLRSTIKYKVEQIGGVFIEVPTKKVKPSQTCPKCGHQHKKTLDIRVHNCEICGYFQDRDIAAAEVMLYYAQGNLPGVGTTLEDADVTSSTSRTGSSAGSMKQLGQMKRQKFNSTGVDVETHPDNVVRVSSSYFSIRRSSMR

SEQ ID NO: 33794 - protein, 327 aa, Oligoflexus sp.
MANAVNYVWNYCNETSLYAIRYNNDWLSGFDLQKLTKGAGKELGINSTTIQEVCSEYALRRKKARKRKLRWRGRKSLGWIPFKSTGISFKDGMVHYAGHELKLFQPERLPAKGGYGSGEFCEDSRGRWYLCISVEYEVKAPEVYASVGIDLGLRSTATLSNGQKVSNGRYYRMMERKLVKAQQGKKKRQAKGIHAKIKNKRMDDLHKASTRIVQENKVIVVGNLSAKKLAKTKMAKSIYDAATTMFRTMLKYKASARGRWYVEVDEANTTRTCSGCRAIPASAPKGVKGLSIREWVCCECGAIHDRDINAALNILRIECDTLASEVR

SEQ ID NO: 33795 - protein, 473 aa, Oligoflexus sp.
MHTGIRLKANVTDHQRLVLSQWMGCARFIWNSKCDEYRYHSVYARKYCPVGTYAPVDQQYSQFKNDELSPWLSDCPSQILRNSASNWFDTFQDFKHGRCGKPRRKKKTGNGSIHLTRELFRFDICADGVRRLFIGTKRNNIGYLSLKLHKSFEEKASLYIKKRHDEFWVSFCYDDGLDDGELLSQADHLKYLRGQTEAFLQKHIIGMDRGVKRPIQAGEQCFDFSPEQKRNMERSRRNLLRYQKKMSRQVKGSNRRQKIKVRLSNIHNDIANIRKDFCHKVSRVLVDQKDSRVFILEDLKTRQMTKRSKAKKDDSGRWLKNGGKAKSGLNKAILNVGWHLFEEFLKYKAHRAGKAWFKVPAHHTSQECAVCAHTHPGNRKSQEIFLCESCGHTDNADHNAAEVIKKRAISLVSNSGSELSKRGVLSLSDTGRGATDKSRRAKSPRAPCEEASKKKRKRAKDLPLDFSLEASPL

SEQ ID NO: 33796 - protein, 364 aa, Oligoflexus sp.
MVLTYRYRLKDGNQRDKLKKLAGQVNFVWNFANEIIRENWRRSRKYTSKNDLHALTKGASRELDINSQTIQAVAYECLLRTQKAKKRVRFRTGRKNLGWIPFNGQTAKYCGDYITYHGLKFRLWEHRKLPAGAEIKTGSFAEDSRGRWYLNLTLEVADEIAMLPLAPNLDIGIDPGIKTVLTTSDGEKFERENLTRDFEEKLAKAQRHKKKRLAKAIHAKIKNKRQDWNHKASHSLSKRYNTIYFGDADSSKLAQTRMAKGVLDAGWYQIFVFLQYKSLRRGGIVLKVSEKFSTVTCSACLSRCGPSGLSGLSIREWTCQSCGAVHDRDINSAIYILRSGRGTLREERVSFSPKGSTDYNAISV

SEQ ID NO: 33797 - protein, 362 aa, unknown
  TnpB Polypeptide
VKLVATVKLLVDEPQKVRLLATMRRVNEACDWLAEKAFELKSADKLRLQKLFYQETRERFGLGAQHVVRAISKVCEVYKRDREKLPRFKPLGAIAYDQRTYAFKGGIDRVSLSCLDGRVLVPAVIGEYFRARLEGVRGQADLVYRKGKLFLYVTVEVPDGSPIDPEGFLGVDLGIRNLATDSDGEHFTGEQVEAVRLRYASHRQRLQAAGSKSARRHLKKIAGKEARFRSIENHRISLRIVKKAKDTGRGIALENLQGIRDRVTVRKGQRAQRMGWAFFQLRAYVTYKALLAGIPVVVVDPRNTSRTCLACGVIDKKSRKSQSEFVCTGCGFAEHADIVGARNISLRASVMAPMVPREASGG

SEQ ID NO: 33798 - protein, 525 aa, unknown
  TnpB Polypeptide
MKTKRAYRYRFYPTPEQEILLARTFGCVRFVYNTILAWRTEAFRQGQVRISYKCASARLTALKQEPDQAFLNEVSCVPLQQCLRHQQQAFQNFFDKRAGYPVFKSKKHHQAAEFTTSAFRFRDGRLFLAKCKEPLPIRWTKQRETLPSVPSTVTVSRDNAGRYFVALLCEVEAEPMPVTPRTTGIDLGLKDLFVTADGERTGNPRHTAKYAARLAKAQRALSRKQRGSKNRAKARQKVARLHAKIADTRLDGLHKLSRRLINENQVVCVESLSVKNLIRNRALSKSIADAGWGELVRQLEYKATWAGRQLVKLDRWFPSSKRCSCCGHTLASLPLSVRTWVCPQCATEHDRDVNAAVNIKGGFSPWREHKWHRSTTAVLISVNWEFPSVRAESSQILPPRYCSAVKPPHNAHNALMSRTPETTVAQPQSLANGRTRGRPRGRICSMRHPTQPCRSAQGAPCVFIPFSPWPACHCSAPASSSADNPTSCGRNASPGSSAPTLARANAAAWSTSTPCSSPSWRRSTS

SEQ ID NO: 33799 - protein, 405 aa, Okeania sp.
LKARYKYRIYPNNIQIVKLNQLFGCCRYVWNNALSHCHQLYSSGHKKPSYVDLTKQFITQAKRELIWLKEVASTPLQQSLKDLDQAYKNFFDRCGGKRKGIKVKPPKFKSRKSRQSARFVGANYKVEQDKIYLPKIGKIKVVWSRALASKSSSVTIIRDSANRYFASFVVQTNAEYLPKSNNSVGIDLGISTFATLSNGAKILSPKPLKNNLKKLAKLQRKFSRTEKGSNRWEKARLKVSKLHTRIKDIRTDFLHKLSTKLAKEYDTIVLEDLNVSGMVKNRKLSKAISDLGWRQFRTLTEAKCKKYGREFRVIDRWQPTSQKCSHCGFRGGKKELDVREWTCLNCGAVHDRDINAAVNILEIVQPKTKVEIIEEVAEIPVQLSLFEEVADGQRSIILKTDTEPT

SEQ ID NO: 33800 - protein, 372 aa, Clostridioides sp.
VAVVEKAYKFRMYPNKKQQELINKTFGCCRFVYNKYLAKRIEVYKNNKETFTYKQCSSDLTNLKKELKWLKEPDKFSLQNALKDLDNAYKKFFKEKSGFPKFKSKKINRFSYKTNFTNGNIMYFSQHIKLPKLGMVKIRDKQVPQGRILNATISKEPSGRYYVSLCCTDVDIEAFENTNNQIGLDLGIKEFCISSCGDFIENPKYLKKSLSKLAKLQRELSRKTIGSLNRNKARLKVARLQEHIANQRNDFLQKLSTKLIKENDIICIEDLQVKNMIRNRKLSRLISDVSWSEFIRQLKYKANWHGRQIVKVGKFFASSQICNKCGYKNEEVKDLNIREWICPSCNETHDRDINASINILKEGLRLITIQNK

SEQ ID NO: 33801 - protein, 445 aa, Natrialba sp.
VQSSKLTQSLSFGLDIHTGSGDDLQTGCLEARRIRNETNRLDRQGWDWNEIKSVVVDNADHVNNTTQLIVDKALGEIETYHDNKDDGWGRPHPYIDESYPMVMNHGEGYRLFPEEDGTVRFRITATRGTHVKGDLRGSPDHFDRLQTAFNDKEWRVGTAEVVHKHNEWRLHVTVTHETHRVASKHNTDTIVGLDVNEDCIALAAMSRSGAVKDSVVFEYPSVKEQRHEFFTKRKRMQKAGQTAFETVVKTEERDYVHDRLHKVSREVAEWISQFTDPVIVFEDLKDMRESIDYGTRMNRRLHSLPFATLQEMVSYKVAWEGIPSDVVDPEYTSQRCPRTECQHTDRANRHKKRFKCKRCGFQDHADRKAAVCVVQNWLDEQYGNVPSLETLPHVRTVRRAASGAGGGPDSHGHDLCSGIDRHGTSAQPGMGAREELKSVASAVQD

SEQ ID NO: 33802 - protein, 406 aa, Gluconacetobacter sp.
MIQRKANTYRLYPGAAQRETLARIAGACRAVYNLALEQRRDWWQRYKGRTGKSISFAGQCRELTDLRREVDWLRDAPIHPLQQALRDLDRAYQNFFSGRTGYPSPRRKGLHDSFRFPDPVSLRVERTGKSTGRVKLPKLGWVAFRGWYDLLGVIRNITISRRAGQWFASVQWEREVEEPGALALPAVGIDLGVSVFAAMSNGETIAPGDFGKKAMSGLRKAQRTLARKKKGSANRRKAVRRVQTLHARVANARKDFLHKLTTTIAKNHGTVVVEALQVRNMSASAKGTVEEPGRNIRQKAGLNRSILDQGWRMFRTLLGYKLAERGGSLIEVPAAYTSQTCSVCSAVDPASRPSQARFACTTCGHSENADVNAAKNILRRADSSLKPVEGHRIRRPVEAGSTRRAA

SEQ ID NO: 33803 - protein, 217 aa, Streptomyces sp.
MKPPVPAVRYFAVLSGGTRVDSPRFLRRGEEAEEGTAGAVPQAEGTEEPSQGSSEGRPRAREGGRRSPGVPPPVVLSTRLLRENQAVAVEDLAVKSLARTRLAKSVHDAGWSQFVNMLEYKAQRYGRTFAKVDRFEPTSQVCSTCGHHDGPKPPHVREWTCSACGAVHDLDHNAAKNVKSAAGLAVTACATPVGPEPVLAQRDEAGSHGSPPDARAA

SEQ ID NO: 33804 - protein, 209 aa, Escherichia sp.
LSGLTKTSSRSGAAFPRFKKRGQNDAFRYPQGVKLDQENSRIFLPKLGWMRYRNSRQVTGVVKNVTVSQSCGKWYISIQTESEVSTPVHPSASMVGLDAGVAKLATLSDGTVFEPVNSFQKNQKTPARLQRQLSRKVKFSNNWQKQKRKIQRLHSCIANIRRDYLHKVTTTVSKNHAMIVIEDLKVSNMSKSAAGTVSQPGRNVGQNQV

SEQ ID NO: 33805 - protein, 443 aa, Acidilobus sp.
MVTWVSCPVRGEGPAVVETLRVRALPEGGGDDLLEFLRLYRDAVQAIVDRTWGTNRLSIGTLHKLFYKDLTSMGFRAHHAKEIYVYAKGIVRSAKGKGGRRPTLRRLTARLDRYDYRLDLDDMTLTLRLHRGREARLRLIAPKERAEKFRGWENYELAVRYDGSGLWVTVYFRRDVKLTEPRTVTSVDLNFDNITLAVFTPNGKLTGLRRLRTPLRKALTHRIWIERIQRRYPRSWRFVKGVRMAVERHGERIKNISWDYAHRAGDLIAELALRYRSAVVLEDLNGLREDRKGGSKFNKRLTLWFYRRAQFCIEYEAKERGLQVAKVNPRGTSSTCPRCGAKLVEVGHRRLRCPRCGLEGDRDVIATINIYRRYVTEHSRCGAPGVALNAPKPDEGPSGVRGNRDEAMTVRQHEPVWELNPVWPDRFHGLQRPWAIASEKGRP

SEQ ID NO: 33806 - protein, 276 aa, Okeania sp.
MLRVVKVRLYPNTQQKQLLEQSFGNCRWLWNYSLNLMNETYKNTGKGLSGYEVKKLIPSLKKEHEWLKLTYSQCLQQVCLNLGVAFNNFFEKRTKYPRFKSKHGKQSIQYPQNVTILKQGLKLPKIGEVKAIVHRLVEGKIKTVTVSKNQCHQYFASILFEDSQEKPAERTDGKAIGIDVGLTHFCITSDGSKFDNPKFLTKYENNLKWKQQQLCRKKKGSNNCNKAKKKVAIVYHFLCGFNTPPSTRCSKLLGGANPHVIFLLSPVSCLLSPSST

SEQ ID NO: 33807 - protein, 155 aa, Okeania sp.
RKIANCREDFLHKLSRRIVDENQVIVTENLNVKRMMKNHCLAKAIGQVGWGMFMTMLKYKAENEGKVYQEVDRFFPSSKTGHICLNQVGSLPLDVRQWTCENCQTTHDRDINAAINLREEGLRILTCGTRDKAYRQTVSRINRGRKKSTTTLVSG

SEQ ID NO: 33808 - protein, 369 aa, unknown
  TnpB Polypeptide
MKTFKYKFGDQSNTIRIGNLLDDLWQVHEYFHKWQRQRYKDGLPYANYNAMSAHLTDLKRTTHPHWKALPSQAIQEELRRIDKAYIRFFKKLGGRPKIKKRHKFKSLTLKQAGWSLKDNRLTLNFRKWNNGKWRHDKVAYTLHKHREFEGNIRRITIKRDACGDYWLYILTDFVETKPLPTTGKSVGADFGMKDAYLTLSTGEKKQHPHPLKSNLNKLRSLNKALSRKQKGSNGWWWCVRHIARLYRKISNQRKDFHWQLASDLCKSFDTIAIETLNLSGMKRLWGRKVSDLAFYQFVEILRYKCQKHGRKLLQVGQWTATTKPCSDCGFHNEDLTLRDRQWICPECGSHHDRDINAAINILRAGIATT

SEQ ID NO: 33809 - protein, 360 aa, Streptomyces sp.
VTNPITGAAATVPEDSRVRSVFRQWSARNPAGDPKRFCYDLSGSTTHRDAQIRHALTRLLHHSQRCGAAAIAIEDLDFTNGTSREKHGRNKRFRRLLSRFPTGKLKARLGAMAAEQSLAIVAVDPAYASRWGAQHWQQPLTSKTRKATLPQALGSARAGGTPIDAAAVAIGRRALGHPIRRRTTPPPQHQSDAAGHRTAQAGPGTREREEPRPRIPGPRSRVVPPGRGAVGVPPCSSEAESLGEGDQNAQHRSEHATELRPGSRTHSRSVSTNGQGGAPSHERHAEHGRVSETADAGEKAETAKYLGSAPGVVHEHGTLRGSLAAFTTTPARRRLIFDGRLGFHSPGLSPGFVSDTRNSM

SEQ ID NO: 33810 - protein, 387 aa, Deltaproteobacteria sp.
  misc_feature (286)..(286): Xaa can be any naturally occurring amino acid
MLYLYQMIARHVKLKMNKKLKRQLEKNLWHLTGVYNWTIKTVELRKNAGLPYSEFDIIKLLTNHSKKCGVSQRALMGALHDAHGAWEKCWSKQNKKPKLKSSRNRLNSILFRGDCKLNMKDSVLTLPNFGKVKFHSLTGGLPQGKLASSVRLLKKASGWYAVLLFDAKHSQVALATNTSIGIDTGFKSLITTSEGEVFAHPRELEASLKQLARVQRGQGRAKTARLHEKIKNQRKDRNHKISHDIVRDNKNVYITNDNLSAQARKFGKSIASSGIGQLRNFIIYKXGSSCDRNVKLVDSKYSTVTCSACGTLTGPKGFSGLKVRFWECAACGAAHDRDVNAAINTLKAGVRYTLEQNAGASQEVTVLKKSVLNSSIQDLGRPGRATS

SEQ ID NO: 33811 - protein, 567 aa, Bacillus sp.
MRKTYFSTRVYKNTLPEKYNDSISHTLLLFNRSKHFAFQTQVLEKRSNESRRKKSLHLTVKERFQLNDHYAGSAVQEANALFKSQKELQKMYIENKEVQMTSVKKKMKSTKRHLTTLLIIKQSFVNGNPKFNQTSREQQFGHFFVVKFKLRSDIYYHAYQFEHDYLDVQIAHFRNKLGRLKFRLDRLQKELEGLKHNTKSVVFGTKKLFKAQHTIENYQNDHQQWRKDWEQARYHQMTISGRKDAKVGNFVFCYIPETRELHFTTPDGTKIKIENLVFPYGQEQVDHAIETQMNCKNKKKYGKPIAWSIEDHGDYYIFKCVVDVPENPHKNHSRADGLLGLDLNVDHIAWSNINAKGQLIKSGVFSFNLETKTSEQITKVIENKAVVIVDLAMKLNQPIALEKLNTNQSKVSHPYGNRKANKVMSQFAYNKMISAIKNRAEKIGVAVFDVNPAYTSQIGKIKYMKRLGISIHQAASYVIARRAMGFKETLPPVLHSLLPEKIAGLHHWAQWKWVSSCLSDVRKHTFYQIELFACDKIDSMNQLFPQGALSDLEEKGLSKVKSRKPIA

SEQ ID NO: 33812 - protein, 436 aa, unknown
  TnpB Polypeptide
MPTAVTKTLQATFAPPTAHKQSKLTDLLETYRDGLQAAFDAEASTMSAVSDIVTPYDLPYQAKAALCNYVPQLRETYNAKELDDDHPIRLTNQAAEFDHSDDRDYEFTWWVPQPGRGTNFWIPLRINPEQESLWRDLVSEDAKAGQIRLQKHRQNWVLHVTVEYPVEEPTTDGDATYVGLDIGETALITGCGLKDGSPTDPFVCSGSRAKQLRKEIHTILKRLQEREAAEWRIEDRFGHYQNALTDIVEKASRQAVEYAQQFENPVLVMENLTYIRESLDYGEYMNRRLHSWAFARLQGRIEDKAREAGIPVEHVNPEYTSQTCHSCYRLGRRDLQAEFQCPHDGCHVSTFQADINAAANIARRVDPWGESVPLDKAGRDDSPRDGSGCDTATTHREKSVLAQMTLTAYEESKPSASVHETKSREPTRTSGSGDDD

SEQ ID NO: 33813 - protein, 408 aa, Planktothrix sp.
MKARYRYRIYPTNQQQRQMSQLFGCCRVVFNDALAYCQEQYRAGNKKPSSSELSKRLTEIKKTEEKEWLTEVSSVPLQQSLRDLEQAYSNFFKSCKGQRKGKKVKPPKFKKRKSKQSARFTDNGFKLYPNSDYICLAKIGDVKVIWSRKLPAIPSSVTLIKDSADRYFVSFVVEFNPQQLPKKGQSVGIDLGIADFATLSNGEKIKSPKPLKKQLKRLRKLQHNLSRKQKGSKRREVARKKLAKLHAKISDIRNDFLHKLSTKIIRENQTIVLEDLNVSGMMKNRKLSRAISDLGWQYFRTMLEAKSLMYGRDFRVIDRWTPTSQTCSCCGFHGGKKELNVREWICLNCGTSHDRDVNAAINILVAGGHSETLNGRGEKVSLSVKKAHLGEASTRPEFQQLSIFDLLK

SEQ ID NO: 33814 - protein, 404 aa, unknown
  TnpB Polypeptide
MIKVTRFKLYPNKEVEDKLFSNLRICSFVYNWCLEHNIWNDSVLPQLKEVYPDIKEVHSIVLQNVVHQIRDNIKALSELKKKGKRVGRLRHKSRHSMIFEQTGFKIDEDILKLSKIGAIPIVLSRPIKGEIKQIIIKHNKTNDWFASVVSETTAINDWFAFRRTYLLPKQVRAVGIDLNVSNFSTDSDGLVIEHPKNVKKAEKRLKRQQRKLSRKVKGSHNRKKQRRVVAKVHEKVENRRSDFLHKISRYYVDNYDLIASEGLSIAGMVHSGNSGLSKAILDASWGKFNSYVQYKAENAGKYAVSVIAKGTTQDCCICGRTVPKDLKDRTHSCPYCGSVMPRDYNSSMNIRRRGIEKVGWGTPEPCFLDMGMGKLNTLAEIRTSILDVNNPEQVFISEPRISRL

SEQ ID NO: 33815 - protein, 547 aa, Lachnospiraceae sp.
MEGGAYMYHVECIDIHKTDKTYLYIDRACLCANNMYNVANFHIRNLMTGLKKEVSLRTENEKSVIRTFASSIPVVNFSLRLKHFVKIFRIFLDRSLSADTRRTKLSRVKYLQFSMPTAEKWFASYGLLDAVFRYTENTDYRSFHSHVIQNAISDCCEAWDGYFESRKAYTDASGHTGKPRIPGYRKSGGRSTAVFSNLACSIKNGRLFFPYAVVEAGKKRVRPGLDVSRLPHASKAVRGSGEKLIEVRAVPYFGAYQVQIVTDDGIREDDLLPKEEDIIGADRDPAGVMMLDPGLDNFASMADNKGYTPIVVKGGAIKACNQWFNKRMAFLRSEQMKGHDPKTYHPPVTRQMERISRKRDAFLRDTFYKYAHYICRTMEERGLSYLIIGYNKGQKQDIDLGRKSNQSFVQVPFARFRCILQTVCVRYGIRVILQEESYTSKACFGNRDYIPTYGTGDAENISFTGKRVKRGLYRQDDGKVMNADINGAANTGRKYDKRIFPEGMDCRYLYGTVKAVTYKDILCASRRRKKSNPGQTGQRAGVCPVTA

SEQ ID NO: 33816 - protein, 240 aa, unknown
  TnpB Polypeptide
MTAVRMKLHRPISEKWKLKSVTVSREPSGKYFASLLFYCENQTAEKRPAEKFIGIDFAMQGMCVFSTGKRAEYPMFYRNTEKKLAREQRKLSRCQKGSQNYKKQKKRVALCHEKIRNQRKDFQHKLSTSLAESYDAVCVEDLNLKGMAGGLHFGKGVHDNGYGLFLSMLEYKLEERGKYLIKVDRYFASSKICSVCGKKKEELSLSDRIYYCECGHRMDRDVNAAVNIMNEGKRIFAECA

SEQ ID NO: 33817 - protein, 384 aa, Psychrobacter sp.
MIRGHIIELKPNNVQANHFARACGVARKAYNWALYEWQRQYALDKAYRDACLATGIEMDTKKLNKPSQAKLRRELNAIKREFFPYMLEVTKCAPQLAIMQLGDAYKNFFKGLAKYPTARKKGRDDRFGLSNDQFAIKAKSIRIPNLGWVRMKEPLRFDGKIMSATISKRGGKWFVSVAVEIDDTIKKVVRTGKIVGIDLGITDLLVLSDGTKIKAPKPLKANLKKLRTLNKALSRKKKGSKNREKAKTKLSRLHYKIRCIRQDSLHKITSDLVKAFDVMAIEDLNVKGMVKNRRLSRAISDLGFFEFKRQLIYKANEQGKTVKSVGRFYPSSKTCTNCNHILGKDELTLKMRDWICPSCQTKHDRDLNASINILNNATVILTAA

SEQ ID NO: 33818 - protein, 345 aa, unknown
  TnpB Polypeptide
MYDLSESLMKAKKTIKAKILELRKGKEELLKREYENFQRYLHGDKSAQLYSATKQQAERLLKHIGKPKEGKEYPLILRRDVYRADTKLTPYWLRIPVYGVRGGINVPIKTHEPITNSATCREAKVIRKGDEWFVYITIEKEVEERNPKSVLAVDLGIRWIATTVNSNNPKPKFYGKELKRVKGHYFYLRRSLTLKRAYKTIKKIGHKEKQITNDILHKISKAIVNEALENDSMIVLGNLKGIRQNDKSRRFNRRLHNGFPYHRLSQFIEYKARWLGIKVIKISERNTSKTCHKCGSEGFRVGSLFKCLHCGYQCSADYNGAMNILKRAMGYMPMAGAPLTVPRTR

SEQ ID NO: 33819 - protein, 413 aa, Halobellus sp.
MTDVQPLVKTLDFQLDIQSGDESLLYDATLEARSVYNETIRLAKDGADWDTIPDRVADDADLVKNTTQRVVAKALSAMENYYEYEEFGQPSHTKDGAYPIRANFEEGYNLSLNDDGDVAFRISAKPYKHIKGALKGSDAHLDILKTALASEEWNIGTAEVLFHNDNSELHINVTNTEQTVRDKRDSRTVVGVDVNEDNVALTALSTDGVEDTLVIDFPEIKFERHRYFTMRKRVQNAGKDGTHDTLEGCEERFVHDRLHKVSRHIVKWSRQFEKPCIVFEDLKEMRDSIDYGTRMNRRLHHLPFRALQFYTSYKASFKRIPTVWINPECTSQRCPMCGHTERANRNKKRFKRKDCDHQDHSDRGASINIAVKGIKKLDWNVPALNNLPVVRKVRRQPSGAVDAPTVTHPTVRG

SEQ ID NO: 33820 - protein, 414 aa, unknown
  TnpB Polypeptide
MATRNFIFKLYPTNKQADTLYSWIGKHRLLYNAALKERITAYKQEGRFISYNDQQNALPVIKKEKPELVLLGSHALQETLRKLDRAFQGFFRRLKEPSKKPGFPRFKGRERFNSFRYPDPAGWKIISQKGHNGRLKVSNLGHIKMRGMPRVPLAHGELRCLTVMRKGAKWYAVVTARLPKILLLREGISHNRADMGLDAGCAHLFTTHEGHKEDHPRFLKKGLVRLKAAQQDLSRKKKGSSNRRKARAKVVRLHEKIAAKRQDYLHKSALSLVRSHSFIAVEKLSLQGMTRKGKGRRKRGLNRSMMEASIGQFYTILKSKAEEAGTIFVRVAPRGTSQNCSRCGNKVEKTLADRVHDCPFCGLVLDRDHNAALNILFLGLARVGREPSEAWRDRKTGALPPLDSVKCETTTIPV

SEQ ID NO: 33821 - protein, 416 aa, unknown
  TnpB Polypeptide
MYLTIKQQVKHLSKEDYLTIKELCHTAKNLANEAIYNVRQYYFTEGEFLKYEKNYTLLKNSPNYKALNSNMAQQILKEVDGSFKSFFGLLKLTKQGKYAFRDCKLPHYLPKDGYATLVIGFVRLNGNKLILPFSNNFKKTHKAVEITIPPVLLDKKVKEIRIIPKAGARFFEIQYTYESECIQRNLNKNNALALDLGINNLVTAVSNSGKTFIIDGRKLKSINQWFNKENARLQSIKDKQHFGKKTTNRQKAIARDRNNKVNDYMSKVARKVIDYCVANDIGTLVVGYNETFQRSSKIGKQNNQNFVNISYGRLRSKLKYLCELNSIVFEKQEESYTSKASFWDRDDIPVYNADNPKEYQFSGSRIHRGLYETAGGKTVNADVNGALNIMKKSNVVDMNILYGRGEVDTPVRIRIA

SEQ ID NO: 33822 - protein, 596 aa, unknown
  TnpB Polypeptide
MCPDPKPPDPVEEPKKRSRPDVAARIARNKQLDFTGVVMKWNTLCKDEIIQREIEKFVWNINKVALEAYHVVNMHVLRCLQGNLALPTLDQNFFYRCCSGVVEKRGEHASAPDTGDIQLDATLEIFKSLRPKKNYMPPTKENMAFLMCNLARQMNVACRNHLVLNFGKRLIRYVRLKYDKSRKEAWHFINQAFHPDGEKTQEHIDFFQWLVYAPYENVIDKNYAHFLRKSYDMLQFMEAQPANTRGARTFTIMPLKGGFVMSHITICSSCLQQILQTIVKSHPGTSFLGHSNITKKVFDKQKDTFWRSLFDIDSYETENRKFAYEISTNGYAVTLRMQKPKREDTHPTLPSEHYFERVIGADPGVDYLLTARINTGEFVQISTAEYRDMAQMRKQLRWNENTKVHHPQYSQIIREMPSFATTDMETYQHHLRYVLTKCDELFAFCANKGFRKWRFKTYVYSKKALSSLCKRLTEGKRTCIGIGDWSRQDGIVKRHPTAPVKKIQKELRRYAKVISLDEYGTSRGCSCCGERCIKIRLPKKNKEGNIELSRSHQVVRCSSNECAMCWQRDKNSSINHLKLLMCLLRSEERPLYMRRS

SEQ ID NO: 33823 - protein, 192 aa, Bacillus sp.
  misc_feature (105)..(138): Xaa can be any naturally occurring amino acid
MKERNINKDAKVKKLLKRKKSAQRDMSRRFKNGVKIQSAGYEKAKAEHLRLSRKITNIRNNHIHQATATLVKTKPMRIVVEDLSISNLLKNKKLSKALSFQKLNXXXXXXXXXXXXXXXXXXXXXXXXXXXXXXXXXXASSKICSCCGVKYDHSVQSEGQWSLKIREWRCVRCNSHHDRDVNAAINLSRWVK

SEQ ID NO: 33824 - protein, 410 aa, Streptococcus sp.
MDLNRVIKARIVFDNQNDIVKMVESQEAYRQGCNFVSDYIFNHGFQLNATALNKFVYSDLREQFGLKSQMAQTCIRTVVARYKTVQTQLRKQRVWDGYKKDNHGNEVKNYINKDLDFLWKPIIFSRPQLDLVRNRDYSYTKDGKVSLNTVHGRVIVNPIYNGFEHYFDGSWTLGTAKILKSGKHWFMHIAVSKELNDQEPEIRNVVGIDRGLRQLVTTYDNKGKTMFYSGKQIGHKRRNYARLRKELQSKGTKSAKRRLKAINQRESRWMNDVNHRISKTLVDTYGSGTLFMLEDLTNVTFDTVSKRKKENRYEHHSWSFYDLEQKLAYKAIANGSLVVKSDAHYTSQRCPKCGHIDKDNRDRAKHEFCCKRCSFRTNDDRAASMNIQFLGTLYNSGVEKPRFEKHEINQ

SEQ ID NO: 33825 - protein, 369 aa, Streptococcus sp.
MKTVIDALCDYRRYCWNQGLALWNTMYNSSLILEDNSLRPNERKVRDELVANKADWQYNLSARCLQLAISDLAKAWENFFNKAQPDWGKPQFKSKKSKRQGFKTDRARLVNGMLRLDKPRGVTDWYDIPISKNARLSGELKLASLFKEGDKYHVALVLKDTVTAKKKTQRSTGIDLNVNHIDYIDGSQIVCPKRLDKLYSRIKHYQRQLTKKREVNGIKATQSHNYVKTKAKLQRDYNRVAAIQKDLLHKLTTQLVTDYDKLVIEDLDVKGMMMSHVASKGLHRSLFGRFRQLLTYKCEWYGKELIVAPRSYPSTQRCSDCGHIKTGDDKITLQGNIKHGTKHNEYICYQCGAVKDRDYNAVLNLLALA

SEQ ID NO: 33826 - protein, 677 aa, unknown
  TnpB Polypeptide
MQKTKPKIKTKNKDSDNFDFMKTNKDNIANIIKDSNTLITINDLVNRVNKIVIHAYQFLKLYLIHLYDNNKSFPIIDKEYICNIFKAITIRKCGSGGYTKNNMHQQLKELYEFHNQHYSKTIVKDDILYYDKLSYILAYEAIDMITNINNNIQEHYIDHLNKYVNIVFNVKEKRNEITKNNKDKDKRKELNKELYDKFNKVKKDLMTFGESTSDVEYHSWIKQQRNKLYPNKVKFDKDSIHYDLKSNTQDYLISMFYISTELEKINNNELKDNPDAKQIRLFNVLPLRTNIIAKNICIDTCGLISNFLGDESTSEHLKNYKKDNNQYNLWNRFFKLNNKVFNKNKYLFNNMIKTDGVSCSILFIRKDANGEPLKKTLLNRNNFENNDTEYIERIKITDEIKRMKIVCADPGYSDLIYCGSKDSDGNLETFRYTQSQRRLETRVDKYNKIINDINTKSMIDDKSIKEHEVILSKYNSKTCNYDKFKDYLIEKNKLNYNLYQHYEQKIFRKLKLNRFINTQKSESKMIKNFSNKFGKPDETMFILGDYDKGNHNMKGKEPAICKRFRKIFKNAGYKTYLINEFRTSKLCNECNSELEMFLEKPYKNGKKLCHGLLRCQSIKPQCEIIHNRDKNAVQNMLKIVESVMKIGKRPDKFCRKEQPTNSAIGNTQIFIPAQNVD

SEQ ID NO: 33827 - protein, 282 aa, Fischerella sp.
TKSAFRWKDGQVYLAKCSEPFPIKWSRQMPKGCEPSTITVRLEPSGRWFVSLRINDPTDQTMRPVDSAVGLDVGVSSLVLSTGEKIANPKAFDKHYQKLRKAQKSLSRCSKASRNRDKASLKVARIQAKISDSRKDHTHKLTTRLIRENQTIVVEDLAVKNMVKNPKFARAISDAAWGELVRQLEYKAKWYGRTVVKIDRWFPSSKRCGNCGYIVDKLPLNIREWDCPNCGTHHDRDINAAKNILAVGHTVTVCGANIRPDRHKSKGQLRKTRKGQKQKPES

SEQ ID NO: 33828 - protein, 430 aa, Fischerella sp.
MILTYCYRILPNAAQIALMSNTLELLRRHWNYALGQRLDALNRSRCPIDRCSIISEPIGEIPERVNYYTQQADLKQTKILFPDYKNIWAESQQINLQRLNQAWERWLVPDASGKRGGRPRFKKPGELRSFVYPRVNCPKAGANLKDGILKLSKIGEMPVRLHRPLPFGFVLKTCTIVCKADGWYCCLSMQDDSVPQLLPLDEVKSAVGVDVGLKEFLTTSNGDTVPIPQIYRRTQHHLARQQRQLARQQKGSRRQAKKKNHIARIHQKIERTRKDFHYKTAHKLVKNFDLIAVEDLNIKGLARTKLSKSILDAAWGAFINILEAVAVKRGVRVVKVNPHSTSQDCSGCGQKVPKTLSVRLHHCPKCGLLMDRDENAAVNILNRAISEVGLILPARGGFGVAQPGKREAFLEFDGSQLSGSRLEAPVIPQG

SEQ ID NO: 33829 - protein, 365 aa, Paenibacillus sp.
VKGAVRIMLRAYKYRIYPSLEQQQYLSKVFGCVRFIYNKMLGDKIEHYKQTETMLKNTPAQYKKEFDWLNEVDSLALANAQLNLDKAYKNFFRNKSIGFPKFKSKKTNSHSFTTNNQNGTISIDGRHMKIPKLKSRIRIKMHRQFDGLIKSCAISKTPSGKYFASVLVDTDIQTLPQLESRIGIDLGLKTFAVTSGGAPPIENPKHFRRSEKRLAKLQRDLSRKQKGSRNRHKARMRVASIHEKIANQRKDFLHKESSKMINENQVIVIEDLCVKNMVQNHNLAKAINEVSWRMFRSMLEYKANWYGRDMIIAPKNYASSQLCSCCGYKHADVKNLALREWTCPACNANHDRDVNAAINLLKLAM

SEQ ID NO: 33830 - protein, 366 aa, unknown
  TnpB Polypeptide
MQLTYSFRVYPTTAQENKLLDWLDLCRRLYNIALKERQTVWKKEQRTIGYNDQQNNLPAFKKVHPEYKAVHSQVLQDVLRRVDTAYQNFFSRRAGYPRFKGRGDYSSITYPQVDTVNRTFSRLEEGFIYLSKIGYVKIRIHREADLSTARRINVKIKNSQWYVNITCEVRERNPNLLLQKSIGIDMGLSSFVATSDGQLIDNPRHLKKKEKHLKRIQRQLSRKQKGSKNRLKAKNKLSKAHLKVANQRKDFLHKTSNTLVQQYNIIIAEDLQVKNMTKNHCLAKSIHDAGWSRFLSYLEYKAKKHGKRFIQVPSNNTSQLCICGADVPKDLSVRVHTCPKCGYTDNRDVVSAKVIESRGLRLLSAA

SEQ ID NO: 33831 - protein, 410 aa, Alloactinosynnema sp.
VQLRFNYRLRPNPTQCEALARAFGCARVVFNDGLRARQSARDNGQGHISDGELSKQVITLAKNTPERAWLGEVSSVVLQQALADLNVAYRNFFASATGKRKGRSVAPPRFRSRKDNRQTIRFTRNARFAVLDNGRLRLPKIGDVPVRWSRDLPAAPSSVTVIRDAADRYFASFVVQTAENEILPSVDSEVGIDLGLTHFAVLSDGTKVAAPKFLRRAARKLRRLQQDLSRKQRGSQNRKKAVVNLARAHARVADTRRDWQHKLSTQIIRDNQAVYVEDLCVTGLGRTRLAKSVHDAGWASFTAMLEYKATRYGRTFGRVDRFFPSTRMCSDCGHINDKMALDVRTWDCPCGSTHDRDVNAAVNIKAAGRADFNDRGARVRPAAMPAPRSEAVIHPDAARSTRDVEGISVL

SEQ ID NO: 33832 - protein, 464 aa, unknown
  TnpB Polypeptide
MKRTIEVEYEIKDRVEVFKEIGKNYRSDVNYFYSRYSGIKNINKIDFREIRDKDLKKIEHLKLKGHYLERCLNASLGNIKSMWSNTFRLIKSNINANDNLSKEEKHFLYIVIKSRVFVDYVVNTNKTFEYLLENKYFSKWRKENKGFEIKEKKLRQYLRRQIRRMKPSISNTKKEDCFKVDKTLYSFKENKLYISNPAKKRQRIELISKNTKQYQTEATVKIENNKVRIGFPIEVKQKSLKNNGVNEIGIDKGFIDLITTSNNKIYGHRYCDEIKEHIDKYLLTQKERGKYWSLYYKYKTINSEKAERIKKNNLGYIKFNKNKKLTKETKKKFINQSINRFIKEERPTEIIVEDLSWEKKSKKKRYRLGFDLSSWDKGYLQDRIEFKAYENNITITIVNPAYTSQICSCCGKLGERVGKTFKCNSCNQVLDADYNAAINIKKRKENTSITTYMKPKKVLEILKL

SEQ ID NO: 33833 - protein, 366 aa, unknown
  TnpB Polypeptide
MIRNYKYRLYPSSCINKKLYVHLNSCQYLYNKLLHLEKVTYELDEKFIFYNELCKITKTETDIFSQVKQTIAKKLDTSLKRFFKGRKTKNVGFPRFKRKDRYNSWTYSQKGFKFEEGYLTLSKIGKIKVKEHRKLQGKIKTCTIKKEIDKWFVIFSVDMADVFICRTDASEVGIDLGCKDLITLSNGEKVENPKYLKQTLGKISYFQSKNDITKSRKKNNRLSRKIAKLHGKVSKQREDFLHKLSRKLAKEYSVIYVEDLKTQQLIDKTKEKKNLRKTILDSGWSSFVQKLSYKVEETGTKLIKVNPKNTTKMCSNCKILVEKTLAERTHKCSCGLIIDRDLNAAINILRIGRDSLVTKLPRSYGL

SEQ ID NO: 33834 - protein, 312 aa, unknown
  TnpB Polypeptide
LDFRHKKIQIPKFLNRKNDDNRLKCVFSKKVKNGKIGTATISRNACGQYFVSFIVHTTEAEKPIVSDSEITLGNSIGIDFGLKHFLTFSDGTKVDSPEYLKLALDRLAKEQRKLSKKQKGSKNREKQRIKVAKCHNHISNQRSNFLHSLSTKLSDESQVKAICVEDLNINAMMKRWGRKVSDLSYYTFTAMLDYKLRRRGKRLLKIGRFQPSTQICSSCGHRRHMALDDRTYVCPECGMTLDRDVNAAKNIKSFALRDIIKNFSTDATSGINACGVGGSGRVRRTHTTKPPTMKQENLREAHSPSISTVFSR

SEQ ID NO: 33835 - protein, 406 aa, Streptomyces sp.
VAGQVKRAFRYRFYPTTEQAAELSRTFGWAASVSSITRRWRSAPGPGTASSAGSPTCSPGVALTRWKKSGELAFLTEVSCNPLQQALRHPQTAFADFFAKRAKYRRYKSRKTSRSSAEYTRRAFTWREGRLTLAKVVESLDIGWPRPLPEGAVTVRTPVTVSRDAAGRWFVSPLCEDAIMPALAATNTVGLDAGITCLVTLSTGEKITKPRHERRDRARPARAQRELSCKAKGSANREKDRRRVARDPARIADWRRHFLHKLSTRLVRENQVVVIEDLTVRNQLKNRRLARAISDTAWMDLHMMLEYKCAWYGRDLVVIDCFFPSSKLCGACGTRVAKLPLNVRACTCECGTVHDRDVNAERNIPAAGLAAAACGDGVRPQRESSRTGRSSVKQEHQRATAGIPRL

SEQ ID NO: 33836 - protein, 430 aa, Streptomyces sp.
LPPGRTGVHRSPAEHPPLTWELIDWEVWRSRSSGRSSTASIPRASRRLSCRARSAVSAWCTTRRWEERSRAWYGEQRRISYVQSSAALTQWKKTEQLAFLTEVSSVPLQQALRHLQTAFANFFAKRAKYPRYKSRKKSRASAKYTRSAFTWREGKLILAKMAEPLDIRWSRPLPEGAEPTTVTVSRDAAGRWFVSMLVEDTISPAPATHAAVGLDAGITSLVTLSTGEKIANSRHERHDRARLARAQRELSRKAKGSVNRAKARRKVAKVHARIADRRRDFLHKLTSRIVHENQVVVIEDLTVRNLLKNGRLARAISDAAWTDLRSMLEYKCAWYGRELVVIDRFFPSSKLCGSCGTVAAKMPLNVRAWTCKHCGVVHDRDVNAARNILAAGLAAAACGDGVRPQRESSRTGRSSVKQESQRVTAGIPRL

SEQ ID NO: 33837 - protein, 410 aa, Lactobacillus sp.
MMEQTVTIKVKLDFNAQDIATKFEKTMEQYRLACNHISEYMFNHGFDMAQSRLNKALYSDLRTKFGLKSQMAQSAIRNVVAKYKTVKTQLVSKPVYYDTGKKNVKGKEIYQRVYRDLKWLWYPISFNTPQVDLQRNRDWSYLAAKNLLSLNTLDGRVKVTPVCKGFDQYFTNEWKLGIGKLLHIRGKWYLHVSATKEVPDYQIKQTEHVVGIDRGLRFLATCYDEKGRTAFFDGKQVIRKRRKYKRLRARLQVKGTKSAKRRLKKIGQRENRWMTDINHQLSKTLVDKYGKNTLFVIENLAGVREATEESNKDSRYENVSWAFFQLAQFLTYKSSLNSSKTIELPAQYTSQRCPKCGRIRKENRDHHLHLYTCDKCGYRTNDDRLAAINIQQLGTRYVSGEEEPRIIKDK

SEQ ID NO: 33838 - protein, 402 aa, Escherichia sp.
VKRLQAFKFQLRPGGQQECEMRRFAGACRFVFNRALARQNENHEAGNKYIPYGKMASWLVEWKNATETQWLKDSPSQPLQQSLKDLERAYKNFFRKRAAFPRFKKRGQNDAFRYPQGVKLDQENSRIFLPKLGWMRYRNSRQVTGVVKNVTVSQSCGTWYISIQTESEVSTPVHPSASMVGLDAGVAKLATLSDGTVFEPVNSFQKNQKTLARLQRQLSRKVKFSNNWQKQKRKIQRLHSRIANIRRDYLHKVTTTVSKNHAMIVIEDLKVSNMSKSAAGTVSQPGRNVRAKSGLNRSILDQGWYEMRRQLEYKQLWRGGQVLAVPPAYTSQRCACCGHTAKENRLSQSKFRCQVCGYTANADVNGARNILAAGHAVLACGEMVQSGRPLKQEPTEMIQATA

SEQ ID NO: 33839 - protein, 396 aa, unknown
  TnpB Polypeptide
MIVLEFKLVGAATQYAAFDEAIRTTQFIRNKCVRKWMDERGVKPYDLNRYCAVLAKEYNFAGKLNSQARQAAAERAAAAIVRFYDNCRAKKPGKKGYPQFQKDGRSIEYKTTGWKLDETRRAITFMDGFKAGTFKLKGTRDLVGYAFNQIKRVRVVKRADGYYSQFCIDADRRVSVESSGKAIGIDVGLAHFYTDSEGATVENPRHLRRSERSLKRVHRRVSSKVKGSNNRAKARGRLARKHLKVRRQRKDFAVKTARALIMSNDVIAYEDLKVRNMVKNRHLAKSIGDAGWRAFVTWMGYLAHVYGKVVVAVPPAYTSQDCAGCGERVTKALSERAHVCPRCKAVLDRDHNAARNILALGLRRLEETTAGHAESNAWGQSAFYLAGGTLPGMAAG

SEQ ID NO: 33840 - protein, 262 aa, Okeania sp.
MKSIRTKLKLNNKQKTLMAQHAGYSRWCYNWGLSLWNAAYRDGYKPNVRKLREVFTNHTKPLYPWMKNLSSKVYQYAFINLGEAFKRFFQGLGKRPRFKKKGKHDSFTIDNSGKPIELNGWNHKLPFIGVVKTYEPIEATAQKMTISRQAGDWYLSCSYEFHPHTTPKKTDVIGVDLGVKTLATLSDGKVFKSVKSYHRFEAKLSRLQYLHRHKKVGSANWKKAQLKIARLHRRGANIRKDALHKLTTYLAKNHSVVAQAKI

SEQ ID NO: 33841 - protein, 483 aa, Acidimicrobiaceae sp.
MDQPYRNRGVLVSLDPTPAQAQLMRSYCGASRFAYNWAVAIAKENLDTRKRERRDGIEEAELTIKLSWSQYSMTPLWNSRKDEVAPWHRDVTWHAFCSGVTNATIALKNFDESKKGVRKGEPVGFPNFKNRHSKQSFTLINVNRSRGWFSMDSRHVRLILPRFATDPRIARRRKQLQWLHTTESLCRLKKKVASGEWTIQAVTISFTGGRWQASFSVRQYSVAITSATKLLGPIMAIDFGVTHLATLSVPVMRLSDASGNVENPRHLEAELKRLAKLDRQISRCVKGSKNHAKFRLRRQRLYGRISRTRNLNLHRLSTTLAGSFETVVIEDLNVVGMVKKSKKNTAKALRRSILDAGFYELRRQLTYKTEDRGHRVVVVNRFYPSSKMCSHCGETKAKLALSDRVFECSKCGISLDRDVNAARNIRDEGNRLLTNEASTVAGHQPETLNADLRDRETKPLRRGRGDRYQSRTTQPARTLSLLA

SEQ ID NO: 33842 - protein, 642 aa, unknown
  TnpB Polypeptide
VVSQTATNLQTLLPSTSTGVMRSYQVVLKCADQSQREEINQRIRTLEERQHQLLTPQVIKQAVELFRTNLKEGFFTRKLCKEVGKNPNIAESAFHWLYIAIKGKIDKEQKAQGMLNFLLKNHQQLIEWIVFGRSPYTERSLARYWKLKRRYIINLLTSSRSQTDSYWRKKHNALYSSESLQLNTLLPHCSQTEVLQALDDALFYQQHEFSLLPQLTKNQQAFLKKLQLLKQEQNVVIPFLTSWINSPQDSRWKSLKELAEQLATIIGKPNRKLFSAVRQIVVFTLFDHYMQSVPQLVQGLPIANVVPLPFKRKKKGRLPIKLLMGKNYVITRQGIAQELTDQVKKQGWTELGFPQQGKKKLTAQVHFPPKLLEYLNNGAHIKIFQVSSGHAPCYKPRVDVVLEGTHSCFHSSILLHRYLSQIPGKKSSVLGVDINRLGQYMVVFNSAIPLPPDLLALASHYDHLSKKVLDELNLGFLRKRREYDVHGSCKLKGELNRVYTHRSRILREITRLLPHFLAAVIVKKQCKVIKIERLTADATGTKGALAKAIYTMPDSLFIYKKAVWLASLELGYKVKLETVNPYYTSTIHIKCGGSLTRQKGQYDVAPCNKCGQQVNTHFNAAQNIAFLKGTSFLLNPFPSSHV

SEQ ID NO: 33843 - protein, 435 aa, unknown
  TnpB Polypeptide
MARLPLVYGHRCSPVSVRMAYRCRAYPDPGQQAVLARTFGCVRVVWNRTLAARHERYATEGNGTSYAETDRALTSMKRQPEWAFLNEVSSVPLQQALRHQHRAFQAFFAQRARYPRFKSYRGRQSATYTRSAFCMRGGVLRLAKMNEPVPFVWTWPSVEVASLDPTSVTVAKDQAGRWFVTFHVDVTDPAPLPPAGQSVGIDLGLTDLAVLSTGEKVGHPRDWERHERNLKRWQRRLARCQHGSKNRVKRRVKVARAHARVADARRDFLHKLSTQIIRGNDMIAVEDLAVRNMVRNRSLARVISCTGWADLRAMLEYKAQRAGRTVVAVDRWYPSSKTCSACGHLLAKLRLSTRTWQCPSCGTRHDRDINAARNILAAGLAVTACGADVRHSEATPMRSAVKQENLGATPGIPVLYGEEDVNMRPRPPARCRRSA

SEQ ID NO: 33844 - protein, 315 aa, Exiguobacterium sp.
MELIIMMKEVSKMSQVVTVEVRIYATRRQDAILKRMGKTYIQTANRVVANMVASEDGKRWSSKDIDTPLPSAVKNQLAGDAVGIYKKARKEDFKRIPVLKKPVCVWNNQNYSFDFESISFPVWMDGKSVKMRFRSAMVDKDNRNTRLLANKLGTLRVTKKGRKWIAQISVHVPTVPRTGVRLMGVDLGLKVPAVAVTDDDTTRFFGNGRKNKYMKRKFRAERKALGKKKKPKAIKRRNQKEQRWMRDKDHKVSRASSILQDRRKSLSFASNSWRTSDRRQEQAVKTTRTSTHGRSIVSRPSSNTKPPCRASRLSM

SEQ ID NO: 33845 - protein, 365 aa, unknown
  TnpB Polypeptide
MNRAYRFRIYPTPEQEILFLKTFGCCRFVYNRMLADKVEEYEKTKKMKKTTPAVYKNSYPWLKEVDSLALANVQLHLEAAFRKFFREPKVGFPRFKSKHRSRKSYTTNVVSGNIRLSGGKLRLPKAGEVRIRLHREIPEGQKLKSVTVSMEPSGKYYASLLCEYEACENQAGMRKAEKVLGIDYAMDGMAVFSTGEKCGNPGYYRQALARLAREQRRLSKCQKGSRNYLKQKHRVALCHEKVKNQRKDFLHKLSRSLAEKYDAVAVEDLDMKAMSKSLNFGKNVMDNGYGMFLAMLSYKLEDRRGRLVRIDKFFPSSKKCSRCGKVKKVLPLSERTYRCECGNQMDRDVNAAINIREEGKRLLCA

SEQ ID NO: 33846 - protein, 456 aa, Streptomyces sp.
MVREGCMGRTAKRAGTAEMTKKPTPEAVKGEEAERIKREVLGVGDRRKHHTRKATRLQSHAKAADTRHRVYRFRFYPTEEQAEQLERTFGACRWVYNEGLALRSGAWERHRVNVGFAETCRALTGWKRAEGTAWLAEVSSTVLQQSLRDLDQAYTRFFRSEARYPRRKKKGRSRDTATYVRTGFRWVEDPERPGTGSITLAKQSGPLDVRWSRELPAGVVPVRLSVSRDRAGRFFVSTLVEELITPLPAVCVPGTGEPRAVGLDLGLASLVTLDDGTKFDHPRLLRRYGEKLARLQRELHRKVRGSRNRAKVRQRIARLYALITDVRRDMLDQLTTRLVRENQVLVVEDLSVASLSRVRRGKGRRRKSRLNEAILDASWGELLRQLRYKCEWYGRELVVVDRFFPSTRRCSACHAVGERLDVSVRRWTCSGCGAVHDRDVNAAVNLRDEGLRLLAA

SEQ ID NO: 33847 - protein, 357 aa, unknown
  TnpB Polypeptide
LGGEGVLTLTIKMRVSPEPDSYRELLDLMKRYRGALNYSITVVIEKKALSLGRAHKLLYATLKERFNPPSKVAQDCYREALAIAKSWLRNLSRGRMPTVKALRVWLTHGQSYRIKGEYVELLGGLKLRVVGWDKRYDSYHNREARLVFRGGKFILYISKRVPKPSKYVPRGVLAVDINEKHVIVGNSNFEYRFETAIERALWYRLLAERLQEKYSSTRYSAWLRRRGIRERIKYFHRKARNIVEDWVKKTSHEIVVLAKQSQLAIAREDLTGLIKSLKKLPRDHRVRLLILSYRKLELWVDWQGEKHGVPVIAVEPRGTSTTCPRCGSKMKENGYRVLKCARCSFEADRDNHSSAKH

SEQ ID NO: 33848 - protein, 343 aa, unknown
  TnpB Polypeptide
MAQQILKSVDAQFKSFFGSLKSSKVQHKVKIPYYLSKDGYAQLIIQQISINKGYFQVPYSRTFAKTHDKIYIKIPSILNDKRIKEIKITPLGNARYFEVSYSYEVKDISKVELDDNKALAIDLGIDNFCTCASSEGKAFIIDGRKLKSINQWFNKENSRLQSIKDKQKYGKANTRRQIKLSIKRANHIKDYLSKTAKKIIQYCLSNQIKHLVLGKNKDFQLNSNMGKRQNQVFVNIPYGQLKSKLQYQCEIFGINFIEQEESYTSKASFWDRDEIPVYNKDFIGEYSFSGRRIYRGLYRTSNGTLLNADVNGALNILRKSNVVSLDTLYSRGELNTPIRIRIA

SEQ ID NO: 33849 - protein, 378 aa, unknown
  TnpB Polypeptide
MSNGQSTAYTMGCKYRIYPNKTQANLINRTLGSCRFMFNHFLAVRRDQWDTNHQSVTYKQTAALLTDLKRREETCWLKAVDSMALQESLRKLDTAYKNFFEKRAKYPRFKSKHCHSQSYRTRNQSNGIRFVAGKLKLPKIGLVKIKQSRAFEGRILNAAISHTASGKYFVSLCVEQDIENLRQVNRGGQVGIDVGLKEFYSDSNGNTVANPRILRKLSRKLAREQSRLSRKMPRSKNRDRQRVRVARVYEKIANTRKDFLHKVSTQLVRENQTIAVEDLKVKNMLKNHKLAKAISDVSWSEFFRQLAYKAELYGAEVLKVPTFYPSSQTCHVCGYQNPEVKDLSVRKWTCPNCGEPHMDRDTNAARNILAKALADKAA

SEQ ID NO: 33850 - protein, 378 aa, unknown
  TnpB Polypeptide
MLVYEYKLAGHQKQYAAIEEAIRVVQFIRNKCLRQWMDERGVSKNDLQTSCAVLAREYPFANSLNSQARQASADRAWFAIERFYEHCKEHKPGKKGYPKFQHDNRSVEYKQTGWKVEPDGRHITFTDGCGIGRLRLVGNPKQQIETFPTKQIKRVRIMRRADGYYVQFSITAQRVIDHVSTGKQVGIDVGLKSFLTDSAGKTVDNPHYYRKAEKRLKRLHRQLSRKKQGSKNRKKARKALAKGYLKVQRQREDFARKQANALVSSHDLIAYEHLQIRNMVRNHHLAKSIHDAGWGIFLHWLNYYGLLHDIPIIAVPPHYTSQNCSTCSTMVKKSLSMRTHICPKCGMVLDRDHNAALNILQKALDGTVGQTGTGGLVP

SEQ ID NO: 33851 - protein, 394 aa, unknown
  TnpB Polypeptide
MIINRGHKYRIYPTDEQKEILLRMFGCARKCWNHFLNERNEQYKEWKNLCSIAEQANQEKPSKPSEGWITYNRQQNSLPQLKKQNEFEWLNVCPSQTYQRVLRDLDNAFSQFLKKKKGHPQFHKFKRHQSFSVSQQITIVSKNHIKCANIKEPIRFVKTDKLPCRVKVCSATISCDGHPKSKGTQFYVSFNTEETYQPRFNHTSKEVGIDLGLIDKIVTSDGQKFKSVKFYKKLAKKLRKADQHLSRKRKYDKETKTPSSKRYETQASKRQRLFTKLSNCRKDYNHKLSKYIVENYDVVKMEKLNIKNMLRNHRLASSISNECWYQLQTYIKYKCEWEGKTFKTVNPRNTSKTCSNCGYILDKKMSLATRRWICPKCGSVLDRDVNASINILVG

SEQ ID NO: 33852 - protein, 452 aa, unknown
  TnpB Polypeptide
MLTGNKFRIYPTPEQQQILLRWIGCQRFIYNAKVGEDRYFRRFSRKSPALCGVPVPRDQQYAHFITEQTAFLREVPAVVLRNGAYRWRQAYQRFFSGACQGRPKIKSRQGRQSVLLTRELFELIPHEENIRLAVGTKKFPVGEIRVNAHRPAGKTPASIILSVEAGQWHLSFAVEEGAPEQTEAQIAAELQRLDETTLRQEARGIDRGVAIPAAVCDGTEFDFSPIQKKRLAGAERQRKRWQRIAARREKGSHRRTKAHRRAARYALYEARVRSDMAHKASRTLVDDLHVRLFVFEDLRTKNMTRSAKGTVDKPGRNVRQKAGLNRAILHSAWGRIHQFTRYKARREDKLAIVVPPHHSSQECRLCGFTSPGNRLSQAEFACQRCGHAENADVNAAGVVKLRGVRLLLAGEIEFKKPRRSGIRKQLGPERSEVTPGEKVSAVREQTPRTPSS

SEQ ID NO: 33853 - protein, 463 aa, Nocardia sp.
VCPLVRPPIGCPSSRSRCACRANRSGGRVVIRAYLFALDPTAEQVEKFRSHCGAQRVAYNWCLAKVKANWAQRAAEQSYGLTGDQLTPWINTSAYSLRKAWNAAKDDVAPWWRENSKEAYATGCANLATALGNRKAGRAKMPRFKSKHRSRLSCRFTTGSFGLGRDRRHIQLPVIGMVRTGESTRKLARRVENGTARIRSATLSFQRGRWHVSFSVELPDPTPAPRATRRVVGVDLGIKSLAILSTGKTVPNPRHLDQAQKSLRRLQRQAARRRGPDRRTNVEPSQRWRKTQARVARLHTRVGNLRRDGIHQFTTRLVRDHDVIVIEDLAVSNMVRNRRLARRIADASWAEVRRQLTYKTEQAGVELIVADRWFASSKTCSGCGVAKAKLALSERTYVCMECGIVLDRDVNAAMNLAALAVDRAQLVREQPEGTHVRRPFAGAVGSPREEPLAQPHHREMVSR

SEQ ID NO: 33854 - protein, 301 aa, Escherichia sp.
  misc_feature (256)..(295): Xaa can be any naturally occurring amino acid
VKRLQAFKFQLRPGGQQECEMRRFAGACRFVFNRALARQNENHEAGNKYIPYGKMASWLVEWKNATETQWLKDSPSQPLQQSLKDLERAYKNFFRKRAAFPRFKKRGQNDAFRYPQGVKLDQENSRIFLPKLGWMRYRNSRQVTGVVKNVTVSQSCGKWYISIQTESEVSTPVHPSASMIGLDAGVAKLATLSDGTVFEPVNSFQKNQKTLARLQRQLSRKVKFSNNWQKQKRKIQRLHSRIANIRRDYLHKVTTXXXXXXXXXXXXXXXXXXXXXXXXXXXXXXXXXXXXXXXXSGQNQV

SEQ ID NO: 33855 - protein, 386 aa, unknown
  TnpB Polypeptide
MKTIRTIKVKIGESQAFDNLCQKFLDSCNHISPKVFETKNTTAPNLHKKFYSTVRAKFELPSQLTCSVFRVLSGAYQSQKSNKNWHEVKFKRKVIPVVWQRDFSYAKTKGICFWGKPVKLTDKRLPPMEQWGDSKLKKCDKIWYLILTYFIEIPEPKATGCVVGVDSGIKRIFTATNSDNTKTLTLSGGNLNHRRQKIRRARSKIQSVGSRSSRRLLQRMSRNEASITEHILHCASKQLVSWAEQQGAQRIVMEKLANIREASINKGKNMRDKVHRWPYAMGQFFVQYKSAAKGIAFELVSPKNTSRGCPSCGSVDNRNRNGIKFRCLVCGYRGDADRIASINIRNRSVVTRHNLVTTGSNNTPESAELSEINSGLVGSSASLVLV

SEQ ID NO: 33856 - protein, 379 aa, unknown
  TnpB Polypeptide
MYKLYTEKRNARLHHQIDIGGIIHNYCIALHKRYYRLYGKYLSPHRLKAHIAKLKKLPKYAWWSALGSQAIQDIIERIDKGYQRFFANLKDRKAHQTTQTIGPPTFRAIRKAKSFTLKQTGWKLLGGNRLRIGSIVYKFAKSREIDGTIKTVTVKRDALGDLYVFFSCVVGSASPCRAMTGKSAGFDFGLKTYLTGSDGTEIHAPQVFKQELRTIAKANCALSRTQRGSHHRTRAQRHLARVHKRVAHVRQAFHWELAHQLCAQYDGIVLETLNLQGMKALWGRKVSELGFGHFVQILHHVAAQTGTVVHHIDPWFPSSKLCHVCGTRNACITLRDRVWTCACGVTHQRDHNAAINIFREGASSLGGGHVRLAAACNGC

SEQ ID NO: 33857 - protein, 453 aa, unknown
  TnpB Polypeptide
LVRSGRPKPQREAVNVCGESISPPGGGFVEAEIGHISPEFHNRLGLCHWRWRTMVINKSFRVELDPNNRQRSALMRHAGASRWAWNWALARRIEEYEATGKSSTAYDQSDQLCVLKKTTEYSWCYGVSKWVFQEAFANLDKAYKSFFRRAKLGQRPGFPRFKSRKRATPSFRVRAIRHATNLAIQLPRVGFVRLKQRGYIPTEGIKILSATCSLVADRWFVSVNCETNVSDPTPGIGEPVGIDLGIKSMAVVSDGRAFENPRALTRMLPKLAKLQRRLSRKQRGSKNREKARKRVAKLHYRIANVRKDAIHKATSSIVKAKTKPSTIVLEDLNVSGMVKNHKLARAISDASMSEFRRQIEYKAKWNGVEVVIASRFFPSSKKCSACGRINATLTLSDRQWVCECGEVHDRDLNAAKNLVRSGRPKPATKVANACGENVRPSDGKSLGSRNLVC

SEQ ID NO: 33858 - protein, 385 aa, Erysipelotrichaceae sp.
MKIYRAYKFRLYPNIEQQILINKTIGSARYVYNYFLDRKDNYYKEIKENLSLKDIKHELVELKYNLSWLKEVDSMSLTNALDNLDKGYTNYFEKRAAHPVFKKKGCHDSYRTTCIRSEYKNNYYANIEVDLKNKTIKLPKLGIMPIRGYRHLEKQLNIKNATIEKIGLKYYVSLCCEEELEIKKHQITHAVGIDLGVSSLVTTSDGIKYPKLKIQRIEEHIKVYQERLSKCIKNSKNYQKLKNKITRLYQRIRNMRKFYIHEITNDLLKDNELIICETLKTKEMIEESSSKSLTKGIVNASFREIERQLDYKTKWNNKLLIKVNTYYPSSKLCNHCRTRNEVNDLSIRSFECKKCKCMNDRDVNASLNILEEGIKIAFNKGLIVV

SEQ ID NO: 33859 - protein, 298 aa, Lactobacillus sp.
VSKVIKGIKLRLYPNQSQREQLWQMFGNDRFVWNQMLGMAKERYQNNPNSLFVNEYGMNYLLKQLKCEYAFLRESDSTSFLVVNHNLAQAFKMLFRHRGGYPHFKNRHSLRQSYTGRSTCKVLARRRMQLPKLGSIRTSRTGLVGDAKIKRYTVSYEPTGRYYLSLQVETEVNQLPETRQSVGLDMGLADLVISSDGVKYGTFNAEWLEKQAVRWQRKYARRRYLAQCQVWKWNHNRFDHLEELDDYSNWQRARVNKARCQKRIANKRRDYLHKLTTDLVRNYDVIVIEDLKTKNLQK

SEQ ID NO: 33860 - protein, 452 aa, unknown
  TnpB Polypeptide
LKDALTTLEKLTHTTQSNPTPVMPLEEILEDIPAMFRRAAINAALGSARSFYSHLSKWRKRKEKAEAKGKTFHERPPVPPRSWNKSATIYAGMWKERTESSIVIKIWTGTCWSWIKVHITGRDLPTNAELGSPQLIRKGNQWWLHTPVEKRFKSPGKIEEQVTTNTHTQICAVDLNLNENTAVCTIQTVEGSILATKFIGGGRRISGFRKKQLGRIARNRHKTGMIAEGEQDNVALWNKIRRVDEQVAHLVSARIVQFAKQHSATILVFEHLGNLKPTKGNYSKRGNDKRAYWMKGRIFKYAKYKAYNVGILTSRVNPRNTSRECARCHNLVARYEEGKPAEGYTYGAPLVTCTHCGMKGNADRNASLVIGQRLLTRYQQSSQEKPQAPLFAERGEKSPGVVSSQDVKSKRGPSILPARHGDNNEHGTAQDGLLRMDEHPSDIPCQLRFSFE

SEQ ID NO: 33861 - protein, 406 aa, unknown
  TnpB Polypeptide
MLKAFEYRISPNKDQEMFLAKHFGCTRFVYNYFLAKRIEFYTQNKNNSNKKSLNYFDTSTSLTELKKSEDYKWLKEINSQSLQMSLRNLDTAYSNFFRTNKGFPKFKSKKTNRFSFQLPQNVKIDSEKSKLIIPKEKQGIKIVLHRALPENGVIKTVTIKKNPTGKYFAVVLIETPDEFPDKPDVKSNSVLGIDLGIKDFAITSDGEKFDNPKYLKNDLTRLKVLQKRHSRKKIGGQNRDKARIKVALQHEKIKNQRKDFLHKLSYKIVCENKTYNSIAIEDLAVKNMIKNHKLARAISDVSWSEFRQQLQYKCDWYGKNLLVIGRFTPSTKVCSTCGQIKEGLTLKDRTWICDCGTEHDRDINAAKNIANFGIIKYSGQGLPGEPVESSTIVGAMKQEALSFMAG

SEQ ID NO: 33862 - protein, 400 aa, unknown
  TnpB Polypeptide
MIKHKAYKYRFYPNKEQADLIDRTIGCVRFIYNLMLNDKFEYYQSNKKTLKNTPAQYKKEYPFLKEVDSMALCNAQINLEAAYNNYFKQHKAKKIKPLTSEKLTKLSKKTFKSSIVKFMVYHPIFPKFKSKKQSNLSYTTNNQKGTIRLENNKIKLPKIGFVNLKLHRQIPEYCKLKSATITKTRTNKYYISILVEYETQVFEKKIEKVIGLDFSMKELFVSSDGNSANFPRFFREGQDQLAKEQRKLSHRKYQSKRYEKQRLKVARLHEYVANQRKDFLHKESRKLADNYDLVCIEDLNMQAMSQSLNFGKSVSDNGWGFFTTILKYKLEDLGKQLVKIDKWFPSSKMCNKCGAVNESLKLSDRTWTCDCGAEHERDVNAAINIRTVGMTGIAQECLCQ

SEQ ID NO: 33863 - protein, 401 aa, Gammaproteobacteria sp.
MQRLQAFKFELRPNGEQQCKLRCFAGSCRFVFNKALALQKAQYAENKTKLSYTDLCKLLTGWKKSKATQWLSETPSQPLQQAIKDLERGYKNFFEKRANHPRFKKKGQSDSFRYPQGCRLDQANNRVFLPKLGWMRYRHSRDVLGTVKNVMVSGKQGKWFVSIQTERAVQAPVHPSTAIVGIDMGITRFATLSDGSFFAPLNSFKRQEKSLVKAQRAVSRKQKFSNNWKKAKVKVQKIHAQVGNARRDYLHKATTTISQNHAMVCLEDLQVRNMSRSASGTTDTPGKHVRAKSGLNKTILDQGWFEFRRQLGYKLTWNGGQLVAVPPRNTSRTCPCCGHVSEANRKSQARFVCMACGFEEHADLVGAINVLRAGHARLACEVSGAVMPPAAGTHRSDSSAV

SEQ ID NO: 33864 - protein, 322 aa, unknown
  TnpB Polypeptide
VLKAYKYRIYPNSEQRIQIAKTFGCCRFVYNQTLAYRKEIYEKEKKSVSKTDCNNYCNRELKKDYEWLKEIDKFALTNAIYNMDAAYQKFFKEHAGYPKFKSKHDNHKSYTTNFTNGNIAVDFETGKIKLPKLKAVKARLHREYSGQIKSATVSQVSSGKYYVSILVETEHKELAHKGKRSKNYYKTKKKIALCHEKIRNIRKDYLHKVSHEIISENQVIVSENLQIKNMVKNHHLAKAISDVSWYELTRQLEYKAKWNGRKYIKIDTFYASSQLCSVCGYQNPDTKDLSVRTWICPKCGAEHDRDINAAKNILTEGLRQIA

SEQ ID NO: 33865 - protein, 240 aa, unknown
  TnpB Polypeptide
VHTTKKNQARFDFDLRFPKMPSYLRRAAIQHALGSVSSYKTRLGLWKKTDQKGGRPKLVCDNHAIPVFYRDVMYREDTEEKDRVCLKLYDGHDWKWFRVSLSHTDMEYLRKNWAGKKAAAPVLEKRHRKYFLRFSYTEEVPLTKTPAKERIICSVDLGLNTDAVCTIMRSDGTVLGRRFIDFPSEKDRMYSVLGRISRFQREHGSAQVKSRWLMRSALTQNSEERLQEQSQDMQKKTMRM

SEQ ID NO: 33866 - protein, 527 aa, unknown
  TnpB Polypeptide
MRKVKRDRNSQPKKQDDSFVLELPLRVTANDERRLETIFFASRQVYNACLGEALKRLKLMRDSRVYQRALAAPRGAVRNRLFKEAREAVGFREYDLHTYFNNRVRQAWIREHVSSPVGQKLATRAFQAVEEYSFKAKGRPRYKGVNQLDSIEGKSNLTAIMWRDGQVNILGLELKTVLDPMDKHGVQAWGLQQRVKYVRLVRRRVRSKTRYFAQLVLAGKPLVKQKHQARLGNAEKRVALDLGPSTIAMVGEAHAELLEFVPELNDLQCERRVLQRRLDRSRRAANPENHQPDGTIRPGRMAWRYSHRYKKTRGELAELERRLAAYRRTEQHRLVNDVLQHGCVIHTEAVSIKAWQKSFGRSIRIKAPGLFMGALTRKAESAGGQVNLINTRHTALSQQCACGTRSKKPLSVRVHECPECGLVMQRDLLAAYLALHTATTTIPHVLHADKAMLAYQGAEPLLRAAWQHATTKPASGRPRPSTFGTYRSQSGSPEQDPAPTVKAQHVVPHSWEGLGEARGIRVRTPLL

SEQ ID NO: 33867 - protein, 412 aa, Halorubrum sp.
MKHTLRFRAYLHNDVASEAWHQIDILRQIRNHAVRDYYNSDYNDRPSDYDQHGKLTEWADQWPTFAEPSRHAAQQAISQIHSDLETLKERRNKGYNVGRLNWQGAGEFRSVSYNQSRRYNVDHNTGDDRFVRLRLEKIGWFKIRADRTVPAAQDIDEVILKKETTGEWYVSLVTSVEDTPVKPSLGEIDPQDCVGVDLGITSYIHTSENLSVDTLDLTDEYDRYAREQRKLARKEHGSNNWEKQRQQVARAKRAIKRKVRDYQHKLTTWLVQEYDVVAVEDLDVKPMLETSQNAKNKQDAAWSRFIELLEYKGELHGTHVETVEPHGTTKECASCGVETDKPIWVREHSCPACGHTEDRDLNAAKNILTRGLKQLGAGRSESTPVQTALPTFTPQRERVDAKRVVEAGSPGA

SEQ ID NO: 33868 - protein, 399 aa, unknown
  TnpB Polypeptide
VILGQRIRLDPNNVQQTFLERCAGTARRIWNDGLDRWQKMYGAGEKPNWRKINAEVNARKNGDLAWLKDIPWAVSNNALQDLGVAFTNFFRRVKGGTPKVGYPRFKKRGRCREGFAIEGRALRFDNRKVKVPKLGWLRLRTSLRFPGKVLSARFSKRAGHWYVSIQIEIDESQWSYPHRCETQVVVGVDLGVVDLAVLSTGKKIKALRVLRRYEAKLRWLNKELSRRTKSGKNWKKTKAKLARLHERIANIRQDVTHKLTASLVQDFRWIGIEDLNIKGMARGRLAKSVMDAAMGEVRRQLEYKAPLAGSTIVVADRQFPSSKTCSACGSIYKDLMLGERCWICAACGADHDRDVNAAKNLKNLAAAHAVTACRQGSSGASRGTKLPSEQESSSFVNFG

SEQ ID NO: 33869 - protein, 229 aa, unknown
  TnpB Polypeptide
MNVRENQATGIVGIDLGLKTLAVCSDGTTVENPRILRKRERRKKHLQRIIARKRKGSENRRKAAALLARYEYHTACKRRDWLHKATRTIADRNAVCFMEDLNVNGMLKKHHLAKAVSDGSFNEFKRQLAYKTQVRNIDRWYPSSQICSNCGMRKPMPLSERTYECERCGLILDRDMNAAVNILHIGIANYPELMPAEDDDHPNVTGLTDDATASYETGIDHQNRVSSFE

SEQ ID NO: 33870 - protein, 441 aa, unknown
  TnpB Polypeptide
VKRAFKYRFYPTDAQAAELSRTFGCVRKVYNMALAARTQAWTQRQERIGYNATSAMLTAWKKTEEMVYLNDVSSVPLQQALRHLQAAFIHFFAKRSMYPRFKSKKKSRESAEYTTSAFRFQDGRLTLAKMAEPLDIVWSRQLPDGARPSTVTVSQDASGRWFVSLLCADHTLKPLPATDSAVGIDAGLDHLLTLSTGEKITNPRHERRDRARLARAQRVCSRKQKGSANRAKARLKVARIHAQIADRRQDHLHKLTTRLVRENQTVVIEDLAVANMLKNRRLSRAIADAAWRQFRSMLEYKARWYGRDVIVVDRWFPSSKLCSYCGVKRDTMPPDVRTWTCGCGITHDRDVNAAKNLLAAGLAVSACGAGVRPQRITPGGQSATKQESLRREPQESRPFEAGRMPSQDPIRFRRGSDPKRARPVPPTPSPGTCGPVVRSSQ

SEQ ID NO: 33871 - protein, 463 aa, Burkholderia sp.
MTTVTRTLYATPSSLPAIRAVCKAMAFVRADLWRRYGALGNVGKSAADIRKEVTAAGQYAGLAVDGTIRAETTKDAVNDILTYKAAACAKVRQAVAKRTSDEAERKRLYALVKSDKWLEDRYLHRMMRKHFRHGVSSCDNQFIVRSDRHDVAIVGGLLVITISIAKRYGEPIMLTTNSSGKGVNLKGCNLRIILKSDVVEVHYATEKTAGRPCGSAEVGVDKGYTEAFADSDGGFHGEEFGAVMTVYSDTVAKTGKTRNKLHVLEKKHRAAGRIAKADRIKANNLGRVKLEARRDRTQKHLRTIAYQAAHAIVGKAAVVGSEDLTSPIKGKGQWRKYNRRMSAWAKGVLARALYEVCEQRGATHVVVNAAYTSQMDSFSGLLEGKREGDKFYRVNGDVLQADTNAARNVRARIHDGEITRYMPHLQVKQILLARSSGATERQEASVGRRRSRQRSADKSIARL

SEQ ID NO: 33872 - protein, 398 aa, unknown
  TnpB Polypeptide
MVEKAYRYRFYPTPEQETLLRRTLGCVRLVYNKALDARTKGWYEHQERISYKETSSMLTGWKKLDELFFLNEVSCVPVQQGLRHLQTAFTNFFAGRAKYPNFKKKRNGGSAEFTKSAFKWKDGQIYLAKCKEPLPIRWSRQLPINCEPTTVTVNLDPSNRWHISIKFNDHRDLILPTTDKQVGFDLGITSLITTSNGDKISNPKHFKKLKKKLAKYQKALSRKQKGSNNRYKARLKVAKIHAKIKDARKDFTHKLTTQLVKENQLIVFEDLAVKNMVKNRKLAQVISDANWGEIIRQVKYKSQWYGRKAVSIDRWFPSSKLCSVCLNRVESLPLSIREWNCPSCNTRHDRDINASINILAAGLAVSVCGATVRPEESKSRKAGVKNSPKGRRKQKPKS

SEQ ID NO: 33873 - protein, 368 aa, unknown
  TnpB Polypeptide
LTKEKKTRKEIVSDIKEQILLSKDGKNDVEFEYQSLFEQFEDFVIEMKSQGLIYKDIREFIELFVETPKVTTVSHNIQYPTLTIPDLDVTEKTVVQEGKAGKYNIVITELYKEEVSRAKVIEESTVTEIIKVPMLSEELGEDTNSVSFVGECYERDKNKSTKVLSAAIDINTSYKDDNLITTVFSDQRRPVSFVSEQYKKYLGCLKIDPTNKKFNSKNVGSAFYRKTLNYALGIVKELKGMGITKLYLGRSGAMSLNNSNDFMLSLYAQMITACSIISLEVVVVDEHKTSVANSIANDDFENEIFSGERSKSNFHNYKAGDGLVVDADVNAAYNILRKGTKGAFKVSPDLIQVSFDKKTVQLPEVNYM

SEQ ID NO: 33874 - protein, 408 aa, Hyella sp.
MKHVERHIIKRSHSIWQQIDKLCFLSKNLYNYANYQIRQAFIFDKIYLGYNKVYHACKSTPDYQALPAKVSQQVLRLLEQNWKSFLNAIKAYKIAPDKFKGRPKLPRYKDKNKGRNLLVYTIQAISKPWLKKGIVKLSGVDILIPTKVENIDQVRVIPKTGQYVIEVVYEKKESYTVHNPNAVASIDIGINNLCALTSNQLGFIPILINGRPLKSLNQLYNKTFAKLQSLLPSHQLSSNRIKQLAAKRNNQVNNYLHKASRWIINHLDKHGIGKLIIGNNEGWKQSVNLGKQVNQSFTTIPHARLIEMLFYKGQLQGIEVIVREESYTSRASFLSLDPIPSYGDDNAREIKFSGYRESRGMYKERGLKTRINSDISSSYNIMRKVIPEIFNRRGIKGVVVRPVRITPN

SEQ ID NO: 33875 - protein, 357 aa, Streptomyces sp.
MATTHVKRAFKYRFCPSDAQAAELSRTFGRVQKVYNMALEARNAAWNQRRERVNCNATSAMLTAWKKTEELACLTEVSPVPLQQCLRHLQGALTNFFDGGAKYPRFTSRKKSRRCAGYTSSAFGCRDGAPTLAKMREPLDIVWSRPLPEGAARSTVTVSQDAAGRWFVSMPGDDAIAPAQATTAAVGIDTGITSLVTVSTGEKATNPRHERRDRGRLAKAQRELSRKEKDSDNRAKARVKVTRVHARITDRRRDFPHQLTTRLVREDQTVVIEDLSLRTMVTNHTLARAKLPLNIRWWTCDCGTVHDRDVNAAHNILAAGLAVSACGDGVRPQRITPGGQSSMRQEPPTGDRGTPRL

SEQ ID NO: 33876 - protein, 225 aa, unknown
  TnpB Polypeptide
MEKHEPDRMGRTAALFPSDNHSNSDRCMLWCKCSEFYPGCDPTVGDRRAVHCSRNASCSRYRNVDALYAGAVTGYAEENHADVIVFEYLETKGKISGRKKQKLHLWRKRDIQKRCEHQAHRRGMRISRICAWNTSRLAYDGSGTVVRDPGNHSLCTFQNGKRYNCDLSASYNIGARYFIRELLKPLPVTERSLLEAKVPSVKRRISCVYADLRELFSEMELLRAA

SEQ ID NO: 33877 - protein, 328 aa, Caldilineaceae sp.
LVSVWADRSRLVPGQRQANGQSKKITAMPEQLAGACRFAWNHVLAGHETGYRMWKAFGKPGKGPGSPTFFTLGTRFTQLRNAPGNAWLQDYSYAIVRYACKYMGDAYAAFFDPDRPDHGRPQYKAKHYTQPASAIPVKVRIQDGRLYIPKMGWTRLGPIHRYADGQPLTVRVRQESESKQPQWYAYIVFDVPVDHPDVCPSAESGAVGVDRNAGQATDRTGAVHAIPDTTVEDAKIKRYQRRMARQQKGSHRRRGTAGQLRKLHRKRSRRRDNATHQISRKVADTAHTVVLEDLNTKAMTKSAQGTVENPGRNVKQKAGLNRSILACG

SEQ ID NO: 33878 - protein, 233 aa, Bacterium sp.
VKCRISKAVTGRILSATISRNPSGKYFIALCCTDVEMEPLPSTGVTVGLDMGIKSFAVASDGAEYPNHKYLARSQKKLRRLQRQLSRKTKKSNRREKARLQVARLHEHIANQRQDMLHKMSTEIIRQNDVICIEDLAPKNMVRNHRLAKSITDASWGEFRRQLEYKAAWYGKQVVTVDRFFPSSQLCSECGAQWTGTKDLAVREWTCPVCGITHDRDMNAAKNILKEGLRLLA

SEQ ID NO: 33879 - protein, 413 aa, unknown
  TnpB Polypeptide
MQRLQSFKFELLPNGKQMRDMRCYAGSCRFVYNKALAMQKENHEAGNKYIDYVAMAKHLTAWRHSAETPWLKDAACHPLQQALRNLDNAYKNFFEKRADFPRFKRKGIGESFRYPDPKQIRLDQANRRISLPKLGWLRYRKSREVQGEVRNVTVSQSDGKWFASIQTRREVEQPLPMATTAIGIDVGIARFATMSDGSFIAPLNTFKKHQQRLARYQRRMSRKVKFSNNWKKAKACVQKIHTGIANARKDFLHKTTTTISKNHALVCIEDLQVRNLSKSSRGTIGQPGKNVSQKRSLNRAILDQGWGEFRRQLAYKLAWCGGVLLALPPHRTSRTCPCCGHASKDNRQTQASFLCVDCGYKNHADVVGAINVLARGHRVLACGELVQSGHSRKQEPTEAPRRSARGAVGIPVR

SEQ ID NO: 33880 - protein, 492 aa, Calothrix sp.
LYKTIPVKARFADEEKLFWVDQCEHANSLINCAIYATKQSHYAMLKESDNTFTTYWRDDELRHGWKTYRCNTSYPELDKILKDNPHYKAMAAQSAQQTLKSVGESIVGYNGLVKAYYRGEVDSAKSAGSVSVPSNFVRRPSLPGYRKSGGLAAVTFPRQALTWKNDCFYPSISKETKPHLLTEITLQLPDFINPDWVKEVTVRPNYGELWIDWVIDDGKQSIDVNTNLDYTQAWSFDHGGTNWLTGVSTLGKSLIIDGRKLKSMNQGYCRLVAKYKQGKSDFYWDSNLDRVQLKRNNQMRDAINKAARFIVNQCLNDGIGNIVIGWNEGQKNGSNMGKRGNQNFVVIPTGRLIERLKQLCPEYGIQLTITEEAYTSKASFLDGDSLPKHGEKPVSWKASGNRVRRGMYKSRDGHIVNADCNGAANIMRKVATQLGLNLAEVGRASLTVPQRYDLFTRLNKSYRKRCVREACPLGTSAASSRRSNIRLESPYF

SEQ ID NO: 33881 - protein, 417 aa, Massilia sp.
MQRLQAFKYELMPDGEQARDMRRFAGSCRFVYNKALAMQKENHAAGNKFIGFAGLCKALTGWRNGIDTPWLKDAPCHPLQQALKDLERAYKNFFEKRADFPNFKRKGGGDRFRYPDPKQIKLDRFNARIFLPKLGWLRYRHSRDVLGEVRNVTVSQCGGKWFASIQTQREVEQPLPTATTAIGIDVGIARFATMSDASFIAPVNSFRKHQQRLARYQRRMSRKVKFSNNWKKAKARVQKIHTSIANARKDFLHKTTTTIRLAARANHALVCIEDLQVRNMSRSSKGTVEQPGKKVSQKSGLNRAILDQGWGEFRRQLGYKVAWNGGILLAVPPPHTSQACPRCGHVSKDNRQTQATFLCVDCGYENHADVVGAINVLARGHRVLACGESVQLGRSVNQEPAEATRRSSRGAVGIPVL

SEQ ID NO: 33882 - protein, 408 aa, Trichocoleus sp.
MRTAYQYRLRPTKQQAADIDRWLSMLCSQYNYLLADRFHWYEENRSPVNACPLVCHLPELRDNPDYFSQKKTLPQLKKTHPWYGEIYSQVLQDVVKRVKVTFDRFLKGDSNGKRSGKPRFKPRNRYRTFTYPQMKEGCLQGNLINLPMFGKVKVILHRPIPCGFQIKTASITKKADGYYLTLSLEDKTVPGIKPDFDPDKITGIDVGLKEFLTTSEGETVAIPQHYRKSQKRLRVLQKRVSRRKKGSNGRLKAIKQLGKQHKKVADKRKDFHFKTANWLLSKYDVVAHEDLNIKGLARTRLAKSVLDAGWSNFLSILTNKAENAGLLVVPVSAHNTSQNCSNCGEKVPKKLHVRWHNCFHCGCSLERDHNAAINIKNRAVGHSVLKAKSLLSNSRIVLEAYTVISDSV

SEQ ID NO: 33883 - protein, 237 aa, unknown
  TnpB Polypeptide
VKEQIICSVDLGINTDAVCTIMRADGTVLGRKFIDHPSEKDRMYRTLGRIRRFQREHGSAQTQGRWAYTKRLNTELGKKTAGAIVRYAEENHADVIVFEYLEMQGKISGKKKQKLHLWRKRDIQKCCEHQAHRKGMRVSRICAWNTSRLAYDGSGAVTRDWENHSLCTFQTGKRYNCDLSASYNIGARYFIRELLKPLPATERSLLEAKVPPVKRRTSCVYADLRKLHSEMELLKAA

SEQ ID NO: 33884 - protein, 380 aa, unknown
  TnpB Polypeptide
MSIEKFAKKQYIKGYRIRLNPTTEQETLIKKSIGVSRFVYNWCLSKQINSDKFISDNELRRELTKLKKTRDYYWLAEVGSNVIKQSAKDLCSAYRRFFSHTSNKPVFKKKGCSNSFYVNYESMKRTETGVRCEKLGDIKTSERLPKLANDKHYLNPHIVFDGKYYYITFSIEFEVELKETTSEVIGVDLGVKDFAVCSNGVVYKNINKTPTMEKLNKRLKYLQRRLSRKYLMNKIGNKFVKTKNIIKLEHEIKLIYRRIKNIRENYIHQITSYLVKTKPCKIVIEDLNIKEMLEDRLLARAIAEQNFYRFSQTLKYKCDWNSIELVRADKFFSSSKICSCCGSVKSDLKLSDRVFVCPDCGNRIDRDVNASINLANYGLV

SEQ ID NO: 33885 - protein, 469 aa, unknown
  TnpB Polypeptide
MKVKGKNKNPITLKIEYSTDADSALHIKRIQENFNKVLRFTYNRVCENNKYSTKELTLFQARLNNIGGCNSHLKNSAIYKCREIFACHSDNVKKVIFGGRDKFNARCQHKISREEFLKKRFLPIYSVGQCDYHGNRLFKIIDTHTLIFKPDREHRITLNLKNVGKNRKEQLLSLIKLQKEKCISITYELDLEYVYITFDNSILENHRYSVRTDRTMQIDINPNYIGWSVTDWKQDYNFNLVASGMFSLKPLNDYENSLSASSDSKESKYITNKRKHEVVEIAKELFKLCKHYHCEVFAIEELSMESSSLNNGKKLNRLINSQWNRNLLLQQIRKRVLASSTTLVKVQPQYSSIIGNLVNRHLELPDPVLASIEIGRRGHEFSCQYIFKRRQQEKTVVLPKLETVKKSIIQSLEELGIDVPEFNDWKELWSVVKKSKVKYRFPILSKYESSPFSKNYKRRYLTTYEFYRF

SEQ ID NO: 33886 - protein, 542 aa, unknown
  TnpB Polypeptide
MRKRKDKDKKPNLRSILYTSKYFNTGKGSEIKQLLETMSTYKNLLSKYVYENRNFLLTSDGIKTLKANYNIVKDNTILAWNIQKEHHSIVDKYENALRRQMKNFKVRIQDKMIVKRYSRGGKRHKKGETKYFEIKFKSTKLTRLVKYLVYLDFSKDIEPQITNGAVKDLLNYYKTKPYFDRILNLAKDMQNRLLSKIKLIKFDNDYSMRLTSTKGINNARIEIDETNSLYKHWFIFKMKGNKEYRLPLEIKDKYHNKEIIGKEFMLCLSLKKNKINTSTTYEGKEPVFKSFNKAVGMDINIKHNFAKLSDDKEIDYDREFFKKIVKDLNKLDKIGYQNLSEKELKKLQKIYRRLDWYVELLIHNILDYCEKNGITDLVVEDLRLKDKSNIINEEFNMKYSRLVKLLHLSDVKNALLRQGEKRGIRVHIVHSEWTSLGSPECGNIDPSNRTTQEIFKCSECGYEDNADYVGSVNVLERFNLFHWLGVQANKLYSIDEYGRIKPKHINKYALLKILNDYYKVRGFLHHPVLPSNVNSVRTVVKV

SEQ ID NO: 33887 - protein, 475 aa, Gordonia sp.
MAEKFEVPDGWVCQGYQFALDPTPAQCAALQSHAGGARFAYNTMLAAVKSNLSQRDAERSYGIDTADLTPCLSWSFQSLRNDFTRRKQQVAVGEDGTPWWPENSKEVYANACKNLAAALKNWDDCRSGRRQGPRVGFPSFKSKRSTKKFAFTTGTINVEADRHHVTLPRLGTLRVHESTRKLARRLEQGTARVLKATVRFDRGRWLVSFSCLVQRTAQRPAHLKRVASTVGVDVGVKDLVVVATPQGDEVMRVRAPKEFRHASRKLRALQRKAARQQGRWDATTRARREPSAGWLRTQQIIAKQHVQVADLRRDRLHKLTTVLAQSFDVIGTETLAVKNMMASGGAHKKGLNRSIGDAGLGEFSRQLDYKTTWYNSLRVQADRWYPSSKTCSGCGCVKTKLSLAERLYVCDNNDCGLQIDRDLNAAINLARYAQAEQSACSDNGGADRKTTAPAALVAAKPESSNGSASPQGEAA

SEQ ID NO: 33888 - protein, 388 aa, Ruminococcaceae sp.
MFYFGGDSMPNKAYKYRIYPNAKQGEQIERTFGCCRFVYNQMLALQNERYEQGEKYLAKFKANNYCNQVLKKEYVFLKEVDKFALTNSIWNLDSAFRNFFDHRARYPKFKCKRTCAKTYTTNYSNENIAILNNAIKLPKLKAVKAKIHRPIPEGWKIKGATISQVSSGEYYCSILLEHNRTAPSCLSDKKPNATGLDYKSDGLYVSMSGIVCGSPKHLQKSLKRVANEHKKLSRKKPGSKNYEKQRRRLAKQYRHIANQRKDYLHKESLALAEKYDVVCVETLNLRNISNKKFHIGMQTMDNGYGMFLEMLEYKLDDRGKEMIKVDKYYPSSQICSLCGLKNPGVKKLSVHYWECPNCHAIHNRDINAANNIYREGLRIYSERHLASA

SEQ ID NO: 33889 - protein, 417 aa, Halanaerobium sp.
MRLSFKFKPKLNHNQLEIIKGLTWHCSKLYNTVNYQIKNNSNVKPVYTQLEDKFRNNWHNDYLHSHNRQQALKQLAQDWKSYFSSIKDYKKNPQKYKGQPGPPNFKHMNSNTCEIIFTNLAIRIRDSKLLLSLSKEMQAKYNVKSLNFELPEAVQSIVDLDTIQQIRIKQDYISKRWYLLIIYKIEEVKENNNSNIMAVDLGLDNLAALTFKNNSQCYIINGKTIKSKNAYFNKKIAGLQSIRMKQLATSKIKDTKKIKYLRLKRRNYIKDYLHKASWKIVELAIENKVAAIIIGDIKNIKQESKLKSFVQIPIQRLVELIEYKAKLNGIKVVKINESYTSGCSAIDLEKINKNNYDKSRRIKRGLFKTNKALLINADQNGSLNILRKHLKDKCILRPIKQARDNGFVANPSRLRVS

SEQ ID NO: 33890 - protein, 266 aa, Bacillus sp.
  misc_feature (158)..(191): Xaa can be any naturally occurring amino acid
MDMPKQNKAYKFRLYPTEEQAHLIRKTFWCVRFVYNKMLAERKEVYEKHKANKEELKKQKFPTPAKYKVEYEWLKEVDSLALVNAQLNLQTAYKNFFSGQSDLPTFKSKKSRKSYTTNRVNGNIMLFHGYIKLPKLKMVKLKQHREIPQNHIIKSCTXXXXXXXXXXXXXXXXXXXXXXXXXXXXXXXXXXLPFSRNWKSVTPPSNASFNTASGSFIQLLLPIIKYTCNSLDILSISMRAISFTPSYSSSSIFPYFSISSEVVFAN

SEQ ID NO: 33891 - protein, 266 aa, Bacillus sp.
  misc_feature (200)..(233): Xaa can be any naturally occurring amino acid
VTNTGDTFLIDGKKLKSINQYFNKMIRNLQRKNMDNGLSKRVVTNKMAALWHKRERQINGYISQTVGLLFKKMKAFGIDTVVVGYNAGWKQKSDMGKKNNQTFVQIPFHKLMAAIENKCVKEGIRFLKQEESYTSKASFLDKDPVPVWSKDDKVHYRFSGKRITRGLYQSKAGTCIHADINGALNTLKKSRVVELDDNLXXXXXXXXXXXXXXXXXXXXXXXXXXXXXXXXXXKKCPHHHCSLVSYIFLGKIVVRSIFFHIKGMSC

SEQ ID NO: 33892 - protein, 280 aa, Bacillus sp.
MPKNLRNKEISYIEIVPKQKGRFFEVHYTYEMHVSQMKKPPTTTSNALSCDLGVDRLLSCATNTGDTFLSDGKKLKSINQYFNKMIRNLQQKNKENGLSKSVVTNKMAALWHKRERQINGYISQTVGLLFKKVKECSVDTVVVGYNVGWKQKADMGKKNNQKFVQIQFHKLMAAIENKCIKEGIRFLKQEESYTSKASFLDKDSVPVWSKDDRTHYRFSGKRITRGLYQSKAGTCIHADINGALNTLQKSKVVELDDNLKVKTPILLEVQKRKAVASCIA

SEQ ID NO: 33893 - protein, 107 aa, Bacillus sp.
  misc_feature (73)..(106): Xaa can be any naturally occurring amino acid
MTPTGKYYVSILTEYEKEITPKEVERVVGLDFAMAELYVSSEDEKANYPRFYRQMLDRLAKAQRVLARRVKDXXXXXXXXXXXXXXXXXXXXXXXXXXXXXXXXXXN

SEQ ID NO: 33894 - protein, 470 aa, Oligoflexus sp.
LILEAMKAKIYATPEQRATLLKWVAGARWIYNSKVNENAYLSTFARKYMPIGTYPDIDKKFSHFKSGDGEWLKEIPSPILREACNKWVDGFFRYLKSLKSKKKDGRKVGKPKLQRRDRGGDIVLDSTCFKIEKQTESHVYLLVGQKNNNIGILKVKRTKRIGDVSSARQIRISYRKGIFTLSLVFGESEDAYVSYANDTIQYLKDNESLENLLETSIGVDRGVRTPFETNLKSYDLTNSAKRKVNGKERFIKRQQRKLHRQVKGSKKRNKTKAKIQKAWVQIHNIREDFSHKVSHDLVVKSSAKIICLENLNIAGMTKSSKGTKAAPGKKVAQKRGLNKSILSKGWGSTAAKIQYKAQRNMKIVVKINPAYTSQTCSCCGHVSKESRNAKAFDCVSCHYKDDADKNASNNIRMISVALIHLGQRLDDKGALKMPESSKDRGEFSKTLEALRTLKQGSMKREPISKALPKV

SEQ ID NO: 33895 - protein, 207 aa, Lactobacillus sp.
RWEKLRSRRFLKAQQEIAWDHHNKVLVPRQLDDFKNYQKARIMVAKYRQKIANQRLDQLQKFTTKLVKKYDIIVLEKLNTKGMMKNHHLARAIANASWSKLVEHILQYKWVYTMCDWYGKKLIQVNPSYTSQICANCGKNNHRLGLNKSEWLAVREWDCPNCGKHLDRDINAAQVILQDRSIDKWSESWLIKDSYPIDKVRLGTSLG

SEQ ID NO: 33896 - protein, 415 aa, Pelotomaculum sp.
MPHYKETKKVKTGNLVMTEKILLRLDKDQMRIPGDVRREAARCWNAIVNLHRTIYNRYGIWLSGGQLKEFFKGHFRLHSQSVQALVELYEETCRRTKDLRKDGETSWRYPWRKKYYFTVTWKKTAISFKDNRICLSNGRGREPLEFKLPARIDPAAIRQAQLVWKGACYWLHLSIEKPLPEQVTGCKAAGADPGEVHSLALTDGNECLVISGRLLRSWWRLQNKELGKYQRKLSRLKKGSRRWRRLTRKKRKFLEQMRRRKEHLLHTVTSQATGWCFERGVKTLYVGNPLDVTKKDHGYRHNQRMHQWTFGQMFNLLKYKLPARGIEMVLVGEENTSSTCPSCGTKGTLRGRVFHCPNCSFSCHRDVVGSLNIRSVGIHGEIRAGQEAVLRTTYLRPAVHTTQAVDAFGPGHRAA

SEQ ID NO: 33897 - protein, 488 aa, Streptomyces sp.
VHSQCTGVHAGGEAKLNAATRRVAESFQQSWIRLIRPGLSVAGVSVRIMQLRYAFRLDPTPGQCNALARAFGCARVVYNDAIAARERARAAGETFPTAAVLSKTLITEAKKTRERRWLGEVSAVVLQQSLRDAESAYRNFFAALKGARKGARVGAPRLKSRKDDRQSVRFTANARWKITRSGKLLLPKIGEVKVRWSRTLPTTPSSVTVIKDAAGRYFASFVIETDREQDRTRFSEQDSDTAVGIDLGLTHFAVLSDGTKIASPRFLRRAEKKLKKAQRELSRKQKGSRNRAKARLKVARAYVKVTDARREFHHQLSTQLIRENQAVAVEDLAVSGLARTKLAKSVHDAGWSQFLRMLQYKAQRYGRTFVRIGRFEPTSQVCSTCGYREGPKPLEVREWTCPACGTLHDRDHNAAKNIKAAGLAVSACGAQVRPERVPAPRGEAGSQGIRTGAHASQRHSTGPEGQNPWASARGASQRWVRDGHTTRW

SEQ ID NO: 33898 - protein, 404 aa, unknown
  TnpB Polypeptide
MTMIVIRTIRIQLKPTPEQVTLLHQTMQEYTRSFNDVCQVADTEKVSNGVELHKLTYGTQRTTTHLPSQLICAARVKATEALKAVLTRRKKQVKKYETVQKQGKAINPWKLARTPHSDLCAIRYDARSFRFDRDTRMVSLVHVQQPGQVRNRATMQVKVPHYYEQYLTQEWQQESADLMYRKGTFWLHMVVSCEQSTILPTTENKTVGIDLGINRLAVTSQPRFFGSKHLKEMNNRYFRLRRSLQAKGTKAARRHLKKLSGKLKRFQADSNHVVAKQIVSSLKPGDTIAMENLTDSRERVKGRRKQRRAMSNWSFAQLQGFVAYKAAYQSITVEFVDARYSSQACSRCGHIDKRNRPCQSEFSCKKCGYSNNADENAAYNLASRATSAASGPNVKRPIVSSPRT

SEQ ID NO: 33899 - protein, 435 aa, Psychrobacter sp.
MKINKAYKFRLEPNAEQAVILNNLVGSARFVWNQMLAISFEMFAKNEFINATNLVNKIIGLKNNPDFAFLKTHANAVSLQQKVRDLAAAWSRFFDPKVHARLKENKNKPRKPKFFKLADGTEIQHRPLMPQFKRKSDGRDSIRLVQFDKYCRIEGNRVKLPNGIGLVKFRKSQDIIGTIKNVTISKKSGHWYISFGTERELAQTPRHPATSAIGLDMGITKLLTTSNGEVIKPKNSFKANQIKLAKLQRQLSKKVTFSQNWKKQNRKIQKLHHHIANIRQDYLHKITTTISKNHAMIACEDLSVTNMSKSASSTTAQKGCNVKAKSGLNKSILDQGWTMMVNMLEYKQQWRGGLLVKVNPRYTSQTCSQCQHIAKENRQTQSKFECVKCGHKANADINAARNILAAGHAVLSAEGGCGKGRPLKQKTCDIREKVA

SEQ ID NO: 33900 - protein, 408 aa, Streptomyces sp.
VGASSVKRAFKYRFYPSDVQAAELFRTFGCVRKVYNLALEARTEAWADSRQRLGYGQTSAMLTSWKQTAELAYLGDVSSVPLQQTLRHLQAAFTRFWGNRSKYPRFKSKRKSRASAEYTRSAFRYQEGRLRLAKMAEPLDVVWSRPMPDGAEPTTVTVSRDGAGRWFVSLLCEGIPHAVPDTGAVVGIDVGLTALVTLSTGEKVANPGHRRGERERLARAQRALSRKKEGGRNRAKARMRVARVHARIADRRRDHLHKLTTRLVRENQTLVVEDLAVRNMLRNRRVAGAVGDAAWRELRTMLEYKAAWYGRELITVDRWFPSSKLCSVCGAMAGAMPLHVREWMCEGCGTVHDRDENAAVNLLAAGLAATACGAGVRPQRESSSRSGRSVVKQEGPPVRVGIPSGYGG

SEQ ID NO: 33901 - protein, 433 aa, unknown
  TnpB Polypeptide
MCTQTLTYVCKIKNYDQVADALDRMGLACSKLWNVALYHTRLVWEQTGQIPSAYGTQKAVQDHYWFKQLPTHTAQAVTQELWQAYKSSFGHRRNGNPQAHPPKYRKRSGNVPLSTATFKRSGFKLEDTTLRLSRGKAVTSETRERYLYLELALPPEADMSHPKLVRLVPRNGRWEVHMVCDVPIAETSPGDRVAAIDVGIINLAAVAYSDATAELYSGRGLLAQEYYFAKEIAKCKPADWRPGSRKRAASKRERRLHRKRTQRRKQFLHAVTRYIVDTCVEKRVGVIVLGDLKGIRQQANGEARNHGRAGNLKLHAWPFDTFAQVLCYKARLVGITLVEVSERNTSRMCSACGYLNANSRVHRGLYVCSECGATLNADVNGAVNILHKYLQGLDESTGVPVRVGDLPTIWPEPSVNRYDWGKPNPIACAEGFD

SEQ ID NO: 33902 - protein, 299 aa, unknown
  TnpB Polypeptide
VIIRLHLSFENFFDIPGFGRPKYKKRGKYRSAKFQSGYKLQEGRVRISFKAWDEPSQSFRFNKRWFSFHQHREWKGNVRYIQILRDAVGTYWLYIVTDDVSREVLPATGESVGADFGMKDAFLTLSTGKKIQSPQHLKQALKKLRSLNKALSRKVVGSKNWWRCVRQLARLYRHVANQRKDWHWKLATDLCRRFDTIATEKLNLRGMKRLWGRKVSDLAFGQFVGILKFKCFKHNREFLQAGQWTPTTKPCSDCGYHNEDLTLSDRQWTCPECGSHHDRDINAAINILRAACDPSVEQI

SEQ ID NO: 33903 - protein, 351 aa, Alishewanella sp.
MKATKTLQVRVRDKHAKALSAQARQVNFVWNYVNELSARNIREHGRFLSDFDIQKYTNGCAKDLGLHSQTVQEVSKEYVTRRKQFKKAKLRWRKSDGTKRSLGWIPIKSGAACFKSGQVYFNRQYYKVWDSYGLSGYTFKSAAFSEDTRGRWYFNVVVEVDTTQSTGTASVGIDLGCKATATDSNGVSVPSRDYRTLEAKLGLAQRASKKRRVKAIHAKIKNRRKDKLHKYSRKLVNENAAIFIGDVSSTKLTKTKMAKSVLDAGWGLLRTMLAYKCAHAGIVYQSINEAYTTQSCSRCGSRHSSLKGRPGLGIREWTCHDCGTHHDRDINAAKNILALGHQRLAGGIPVL

SEQ ID NO: 33904 - protein, 404 aa, unknown
  TnpB Polypeptide
  misc_feature (151)..(151): Xaa can be any naturally occurring amino acid
  misc_feature (161)..(161): Xaa can be any naturally occurring amino acid
  misc_feature (179)..(179): Xaa can be any naturally occurring amino acid
VASYPVKGEQPEIVEVLKARAVPKGSYEHLLEFLRMYRDAVQMVVNELWNLGEKLSRKKLHKMFYDKLRRLGLRAHHVKEIYIYAKSIVESAKANGGKNPILKKLSARIDKYDYRLDLDNMTLVLKLHDGYEVKLKLLTSRERIEKFRSWXNYELVVKYDXEGFWVAIYFKKTAKPAKXKTVMAIDLNFDNLTLAVFTLNGRLIKLKRFKTSSRKILTHRIWIERIQKRYPRSWRFIKGVKRAIERHGERIRNISWGYSHKIGDLIADLAFNHNSIIILEDLEKLRDNAKKGKKFNKKLTLWFYRRMQFCIEYEARERGLRVVKVSPKGTSTKCPKCGSKLVDNGHRTLKCGKCDFIGERDVVATVNLFKRFASYSRCGGLGVSPNAPSPVRTRVGCRGTGMRQ

SEQ ID NO: 33905 - protein, 315 aa, unknown
  TnpB Polypeptide
VVHRTARAGLRLTAAQRRRLLALLVSGGDVWACVLEINAWRRARQDRPLVSYQALCRELAAAGPGCFGELDTEGARSVLRRYSEAWFAAAQRRRDGDRTARFPRRRRALMAVRWYHGTFTLDGRRLRIPVARGRPPLWVRLDRDLPYPPGQVRSVTLLYDAGRLWADVTAEVPVRAYPAGQEPDPARVAGVDLGIIHPYAVAGPGGEGLLVSGRAIRAEHRMHLADSKARRRAVARRAPKPGQKGSRRWWHYRRQQRLAEARHRRRVRQAQHEAAKTVIAWAVERKIGALAVGDPRGVLKLQAGRRQTSAPATGG

SEQ ID NO: 33906 - protein, 370 aa, unknown
  TnpB Polypeptide
MRLIAAIKLLPTAEQAERLRTTLETANRAANRASEIAWEQQTFGQYAIHKLCYRLLRLEFGLTAQMAVRVIAKVSDAYKLDKKSKRLFRLHGAISYDLRILRYYPDSVSICTMKGREKIPFIAGLHQARLLKSQLGESDLVLRNGKWFLFAGCEVVEAPLDSDPDGYLGVDFGINRLATDSTGESFSGAKVRNLRKRHRHLRAKLQRKATKSSRRLLKKRREKESGFARDLNHCISKRLVEKAKRLGCGIALEDLKGIRCRIRARKSRRAELSSWSFGQLRAFIEYKARLAGVLVAAVNARNSSRECSKCGYVSKRNRTSQSNFQCRRCSFSINADINAARVLRSRALVNAPDAAACAISSHDLAASPRL

SEQ ID NO: 33907 - protein, 237 aa, unknown
  TnpB Polypeptide
LKEHLKGSDQVTFWGFPVIALPRYISSPMYRYCNGLRSNNRKAIKVKVAKLHKRINCQRDDFLHKLSRMYVNDFDIICVEDLDVKGLKEKGYNNGIHRSIHDAAWSKFIFMLSYKAQSAGRILVKVDPRNTTQRCSACRSIVKKDLSFRIHECPYCGFTCDRDYNASKNILIAGREQPVAPIEPKPLHRISVMLGLGYEVESRALQDAVVHGLREEMKKIITEPSAPSQSAAPPTPC

SEQ ID NO: 33908 - protein, 395 aa, Veillonellaceae sp.
MIGEFCHLAKNLYNHGNYLVRNRFLKNGQWMRYDELDRVLKADLDYPDYRAMPTAQAAQQILRLLDKNWKSFFAAIKDWKEHKEKYLGRPKMPKYKEKNGKFMLVLTNQNCRLKEAEIVFPKAFRGFKVTPEFVKDKESQREFDTFQQVRFVPNGTDIVMEIVYTIKAVPQKKDNGRYAGIDIGVDNLLTMATNIGKSPLIVNGRVPKAMNQFYNKELARLKSSCQQMTGHYSSHKIRRFTAKRNRKIDDYMHKASRLIVEKCAEWGINTIVIGQNKEWKQDSQLSRRVNQHFVQLPFARLIQMMEYKAKERGIAVILTEESYTSGTSFLDGESPSKENYDKTRRIHRGLFRANDDRLINADVNGAFQILRKVFPNVSADGIEGVVLRPVVVVAA

SEQ ID NO: 33909 - protein, 398 aa, Streptomyces sp.
MIRAYKFLIRPTVGQQAALSAMLRDHCTLYNAALQERRDAYRHTSKTTVRYGQQSAQLKDIRAFDPDHARWSFSSQQATLRRLDKAFSAFFRRVKAGEVPGYPRFRSHKRFDTVDFPKDGDGCRWDATPHDLVTRVRLQGIGCVKVHRHRSVVGKVKTISVKREGRRWYVILTADQAQPEPLPKTGSVVGIDMGIANFLADSGGEFVPNPRHGAKAAAKLESAQQALGRCKRGSKRRRKAVETVARLHRKVRRQRLDHAHKTANTYVCGNDFIAHEDLKIRNMSKAPVPKPDADRPGAFLPNGAAAKAGLNRAIADAGWGVFLQILTAKAACAGREVMAVDPRNTSRRCPECGHTAKENRPTREKFHCISCGHNAHADTVGALNVLRAGLVRRDANPA

SEQ ID NO: 33910 - protein, 392 aa, Cyanobacteria sp.
MYALKRELKLNNRERSLMRGCAGFKRFVYNYCLALIVNSWDFEDVKASDSKRITAIKKVFTGVTMHKPEFAWMKNYPSTVYQSAFIDIKKAFARWRKGLAGFPQKKSKKKGDSFSVYKTSGIYPKKGEPALLFTNRVVVNPGKLIKLPGLTTFRLKEKIGFMCSSQTFTVSRNADKWFVSFVLDAEKIPPVFHPIERAGVDLGVKTLATVSNGTKYEMPLETKRAKTKLSKLQWRNRHKVLGNKRLRITASNNANKYYNQLSRQHLRISNIRQDTTQKMTTDLSRKIYNIKIEDIKVAGLMANHKLAEAVSNNCFYEIRRQLIYKQVHYGTKVELVDRWYPSSKTCSQCGHVQDMKLSDRVFNCQKCGHFQDRDENASLNLENAPDSRVRLA

SEQ ID NO: 33911 - protein, 406 aa, Bifidobacterium sp.
MNGRHPVKRAYRFRFYPTPQQETLLRRTIGCCRKVYNMALEARSAAWTAEHRNVTYTQTSAMLTAWKKTNEYSYMNDVSCVPLQQALRHLQAAFSSFFKQVSDYPRFKRKSHGGSAEFTRSAFTWNEDKHELTLAKMREPLPIRWSRTLPKRCAPSTVTVSLDAAGRWHVSLLVEEHVTPLPPRSDAVGIDLGVKSLAVTSKGQVIGNPRHYAKLAAKLEREQHALSRKRQGSNNHRKAALKVARTYARLADMRRDFLHKLSTTLIRDNQTIVIEDLSVKNLTRRCAAKPDPADPTHYLPNGQGAKSHSNRNILDAGWGELRRMLEYKAEWYGRQLVVIDRYYPSTQLCSHCGAKTGPKGQKGLDVRAWTCPDCGTMHDRDVNAAENILAAGLAVSVCKDGRTKAN

SEQ ID NO: 33912 - protein, 435 aa, Chloroflexi sp.
MKQIITAKLKLQTDPAQFQGLRATQLAYRDALNYVSRYSFEHGKISNQIRLRDETYYEIRALYKLPAQMATNVPRQVGATYKTLWTKVKQNSTARKAGHTKKRYKGLDSPPKYVSPTLIYNYQRDYSLKPDHQVSILTLEGRIIVPYTGYSRHVALLHQGAAIGAAKLWYDKPHKQFYLLISLELDVADAMPEQHTTVVGVDVGIRQLAVTATTRGKQSFHSGKRIVPKANHYARLRKRLQKKGTRSATRRAVVISGRERRLKQDANHAVSKRIVTRYPHSLIGLENLTDIRERTRRKHGKKASKKQRKANAASSKWAFAELHSMIAYKALLHGSMAIKVDAHYTSKACPVCGHTCDANRPNKGLLFICQNCHYILHADLVGARNITMRTLLIRQNWVRTGQLSIAPDVSDAEAKAARLRRYAELRWSLDTSPCL

SEQ ID NO: 33913 - protein, 538 aa, Streptomyces sp.
LAASFVVPGPAGVAIRDRLRVSETDAAVLREVGMFLGSLARGDLARRSRQGGAHDAASWAVRKRELTSKSSARWAGSITKATHDQWALARRGQAAHLAWLRGQIASIEARLARPLGAKANKREGLVRGYGSRAEWHAKSRRLHALKDRLVSVEADWVAGRVRVVRGGKQLAQARHHLAAAGLDEAAWRQRWQAQRMFLAADGESGKRFGNETLRVTDTGRLSIKLPAALAHLANAPHGRYVLDATVAFQHRGQEWQDRITANRAVAYRIHHDVARGRWYVTAAWQRATALVLPLEAALARGVVGVDMNDDHLAAWHLDVHGNPVGEPQRFFYDLSGSAEHRDAQIRHALSRLLHHTQRCGAAAIALEDLDFTDGTSREKHGRNKRFRRLLSRFPTAKLKARLVSMAAEQDIAIVAVDPAYTSRWGAQYWQKPLTTPRRKISRHDAASIAIGRRALGYPIPRRTAPPHPDQSDRGGHRTVQARPETRRREEPRPHLPGPRTGCAPPGGGAKAGDQRAQHRSGHATEHESWHQDSLPLGI

SEQ ID NO: 33914 - protein, 372 aa, Clostridioides sp.
VIAVEKAYKFRMYPNKKQQELINKTFGCCRFVYNKYLAKRIDVYKNDKETFTYKQCSSDLTNLKKELKWLKEPDKFSLQNALKDLDNAYKKFFKEKAGLPKFKSKKINRFSYKTNFTNGNIMYCGQHIKLPKLGMVKIRDKQVPQGRILNATISKEPSGRYYVSLCCTDVDIEVFENTNNQIGLDLGIKEFCISSCGEFIENPKYLKKSLNKLAKLQRELSRKTIGSLNRNKARLKVAGLQEHIANQRKDFLQKLSTKLIKENDIICIEDLQVKNMIRNRKLSRLISDVSWSEFIRQLEYKANWHGRQIVKVGKFFASSQICNKCGYKNEEVKDLNIREWICPSCNETHDRDINASINILKEGLRLITIQNK

SEQ ID NO: 33915 - protein, 267 aa, Actinoplanes sp.
MEVRFPRRRRALMPVRWYHGTFKLDGRTLRLPVARGRPPLLVRLSRPLPYPSATVRSVTLLYADGRLHVDVTAELPVATYPADRKLDPNRVAGVDPGVIHPFAVVSGEGLGLLVSERAIRAAHRMHLSDAKARQRATAARAPKKGQQGSRRWRKARRRARLVMGRHQRRVRQAQHEAAKTVIGWAVEHRIGTLTIGDPRGVLNVPAGRRHNLRLRQWQLDRALRMLQEKAAGRRARYLVDMPGLPKEDHQTARQDYVLSALCVRRAS

SEQ ID NO: 33916 - protein, 672 aa, Mycobacterium sp.
LHDPVVAAAVVVRRRGKSKTANWRRPEQVAVIALELDLCGDAVMRRRVEKHWDAVFGLRRAVQRGAGAASRAYLAARHERAGDPQAVRHRLGLSRKAIEDRAKVHVERAGWMRAHLSKATALHVADEVWQSCDRFLFCDSRGRRHGLPRVGLWWDFTRIPGRARSHTKTQPVWETYRLVGSLQGHLDTYGQRATIAAAGAMESGRSVLAQPKRLPAPAGNRRSWWDYDGPLAVVYTGLPGGDLVMPVRLAQGAGQFGRLAHFLADPARWHKIDLCRVRDRRAPGGWRYQAHLTILGPGWVGPTTAQLRRFAPTGRIGGVDGNVSNIAVASIDTHGERPAVLTSHVTATPDQQQITVREAKKARDRMRALDRSRRATNASQYRLSPNQQARADRRAAAGLPTRTVDTPAGARVATSAGIPVQAYRKDVVSQAYRDLRADHAAAASAATRRKDAFARQTAQAIVAAHGPHLITEDVDVRTWARRWGRGVAAFTPGRMLSRLAGECTATGGTLLTASTFTTALSQHCTCGARTKKNLSQRWHICPCGIEGDRDIVSAAMAATVALTDTADPRTARIDHNQRQRLHATVLAGRVHDIPVTRETAQHEGLVRSTIHHNPTTTPGAGEDGSPNPRAPAGQGERPALPRNRPHGYTRGRRRTRRTNTNPTIQQSAPADL

SEQ ID NO: 33917 - protein, 421 aa, unknown
  TnpB Polypeptide
MDYDLKYRLLPDTQQREQLDWVRDTVRQLYNHSLHRFNRIPETAGTVKHRVKQVRDEIPDLKDWWTDLTNVYSTVLQQAVEQIATNIENLGKLKDNGFTVGSLNWKAPHEYRSFTYRQRGFELDEKSGPTGRGLLTLKKVNGDTIDVPIRLHRAIPDETDVKHVTVKKDRTGAWYACLNVEQDTPEKPDPTEIDTEETVGLDLGILNFIHDSDGRQIDRLDLSDDRERLEREQRNLSRKDHGSTNWEQQRRRVAEVHKRMHNKKRDFKHKLAAFYTSEYDAVFVEGLNVKPMLEGERNGRNTHEVGWRDFITILKHHGKKRGCHVVEVDPADTTKACNKCGVKTEKPLWVREHSCPSCGFETDRDYNAALNVWERGLDDLGVGHSEDTPAETGTAVDTRNVSASTVVETGSPCLTEAVADG

SEQ ID NO: 33918 - protein, 415 aa, unknown
  TnpB Polypeptide
MYLCVKQQLKKLTKQQYSDLRELCHIAKNLYNVGVYNVRQYYFIEKEYLNYNKNYRLCKDNENYKLLNSNMAQQILKEVDGCFKSFFGLLKLAKKGKYDYNSIKLPGYLPKDDFTTLVIGFVRLNENELVIPYSNSYKKEHGQIKVTIPPILKDKNIKEIRIIPKFKARYFEIQYTYEVEEIQSELDNNKALAIDLGLNNLAACVTNNGESFIIDGRRLKSINQWYNKENSRLQSTKDLRGIKHITKKQYLLTAKRNNSVNDYINKTCRKIINYCIDNNIGNLVVGYNETLQRNINIGCKNNQNFVNIPVGNIKEKLEYLSKLYGIKFTKQEESYTSKASFLDNDDIPKYNQDNPVDYKFSGTRKYRGLYKTKKGILINADVNGALNILKKSSVVSLEALCSSGEVDTPVRIRIS

SEQ ID NO: 33919 - protein, 422 aa, unknown
  TnpB Polypeptide
MKLTFRYPVYPTKTQETTLLNWLDHLCELQNSARHDRKVAWETESKRVSCNEQQRKLKVAREKYEDFREVPQDMQVCTLERTDKAYDGFYRRCEQGAVKKGYPRHRKSIRSMSWKLRKHTLKSGERVRQNPIRETAWKHDRLKVPKLGEVRIYMYRPLQGDPKSITLVKKASGWYAHIVCELPDTPKVEATEAIAVDMGTTHYLTTSEGEKEDNPRWYRQAEGLTRKHSKDLSRKKLGSNRKNKQQHKLTLHHERTTNRRKDFIGKLVYKLYHHYGNNVLVAENLHVSNMVKNKHLSKSISDASWANFFKWCGNIAERDGFHFHQVDPKNTSQTCSSCGQKSSKKLSLAIRTFNCSFCGTSLDRDHNAAINILLRAAAALRGERWLTTLYETRNKNEVRDLDLTDAIQLTLLSVRSPSLRLG

SEQ ID NO: 33920 - protein, 337 aa, unknown
  TnpB Polypeptide
LVVLLPAGHPAASRQGIPGVLPADQVRRYPRLPEVSGPNWFDTVGFPKDGDGCRWDSTPHDPTTRVRFQGVGHIKVNQHRAVAGRVKTISVKREGRKWFVVLTAEQDRPEPLPATGSVAGIDLGIANFLADSGGEFVPNPRHGRRAAEKLEAAQQVLSRFPRRKAKDRTANHQRAVEKVAQLHGRVRRQRLDHAHKTALGLVRAHDFIAHEDLKIRNMSKAPAPKPDPDPDPDQAGAFLPNGAAAKAGLNRSIADAGWGVFLTILHAKAESAGREVIAVDPRNTSRTCPECGHVSAENRPTQEKFHCVACGHTAHADTVGALNVLRAGLVRREANPA

SEQ ID NO: 33921 - protein, 390 aa, Lachnospiraceae sp.
VVEIIKEGGRIKTRTLRVRLVLTKEQKQQIDTTLNCCRFVYNHMLARNRKVYERRKEHMNYNTMQNLLPVMKKYLPWLAEADSQALKNACRQLDDAYKRFFKKNSGFPRFKSKKNEVQSYTTTNSKAIYYETGRVKIPCIGWIKALDNRALPESAEIRRVTVRRDHGQYYASICYKVESKVFPHAVDEDNVTGLDYKSDGLYVDSDGNCCNMPHYYRDAQPAVAKEQRKLAKKKGARKGEKQSSNYRKQLKRLFKKTRHTMNQRKDFLHKRSTEIANRCDAVCVEDLDMKAMANRGFGNGKATLDNGYGMFLAMLGYKLEDRGKKLLRVDRWYPSSQMCSCCGHKEAAVKDIRVRHWVCPACGAEHDRDINAAKNIRAEGMRLLNESTFT

SEQ ID NO: 33922 - protein, 296 aa, unknown
  TnpB Polypeptide
MKRAGRSTSRRSDGYRRSRFINGKLRSVTVMRKADGWYVSILTEREIEAPVHPKAGREIGLDAGVKKTAALSNGKIYLPVDAFRSSKDKLAKMQRRLKRMVPHSENWKKQQQKIAVLHKEIADTRRDHLQKLANDICKNHAVVYREDLKIKNMTASAKGTLEEPGKNVRQKSGLNAAILDQGWGILFSLLDQKMKELGGEVFAVPPANTSRTCPKCEDVSPLNRLTQARFCCRKCGFEGNADVVAANNILRRGQRLRACGELQSTAAVQVNRPSRKRRAGQQQEPIRRDPQAPENA

SEQ ID NO: 33923 - protein, 389 aa, unknown
  TnpB Polypeptide
LRNYKFRIYPNLEQEYKLQNNLNVCKWVYNKFVEQAQKSFLSRNDMNYILTELKQSEPWLYRYHSKMLQMVSTQLEGAEKAIIELTKKGHKTGQLRFARYNEFRTFTYNQSGFKLDNNRLFLSKIGDIRIKKHRDTSGIIKQVIVTKSKSGKWHACLTCELVKINPPKINFTKAVGIDVGIKSFAYDSDEHNTPNPLNLKKMLKPLVRAQRKVSRRKKGSNNRLKAIQHLQRIHERIVNRRKDFQHKLSSIYANHYDVIFVEDLQLTNMVKNHKLARSIMDSSWNSFLQKLEYKCKLLIKVPARNTTIDCSRCGNKVPKSLAVRIHRCDKCNLVIDRDYNASINILQKGLKIFNLSAKADYRLPQELRKVTPVEISKSVKQEIHCFSGE

SEQ ID NO: 33924 - protein, 383 aa, unknown
  TnpB Polypeptide
MKSVATIKLKIPKNKLLLRTMKIYSKAVSYIAEQGFKSDINNRYELHHLCYYKARKKFNLPSQFIINANRVASQTLKSVKKIKGNKPVFKANMPLAFDKRTFTFFEDKIKLTTIKGRIEIPITIPNYYLKYMDWSWQTAIITLDKKDRMFIHISFSKDIKADTILCSNGNTVGVDVGINQVAVTSNRQFFSGSKIKNYRLKFKRLRARLQSKGTNSARKLLKKISGRERRFKAYWNHVISKQIVDNCNAGTIVLENLKNIRKARRGIKMNFWLNGWSFFQLQEFIRYKAERKGIKVIKINPYLTSQTCSKCGKIGSRSSGYFVCSHCGYSLNADLNASYNIAKHHSISDGVLATVTSPDIQSDDVKGSSRATATELMDKSPAL

SEQ ID NO: 33925 - protein, 204 aa, Escherichia sp.
MGLEHYAIRSDGAKIANPRHLINASRNLRRKQKALSRKQKGSVNRKKARIRLAALHERVANARADFQHKLSRTIVDENQAVIVETLKTANMMKNHNLARVIGDAGWHSFITRLEYKAAEKGAHLVKLDQWFASSKTCHCCGYKMSEMPLHKRIWRCPECGIEHDRDINAALNIRQKGILELKAAGLVVSAHGGQRKSVAQTVAA

SEQ ID NO: 33926 - protein, 536 aa, Thermodesulfovibrio sp.
MGKEVAGDMITIQTKLAFSNIEDKQAVVDLMRRWSSCMRFAYNRLLEDKSRNELKRKLQEVFNINSRYVDDAIAKAKSMLHSYKEKGKDPSKVIFGGRSLFEKLKKRHINGKAYKKLKQMWQEKRKGNLYSRGDRSKKGNLNARIERNENGIYLRINIGERKYAYAKIQAGWKKGKSREELLKAIGTCGEAYSVELKLKNGKIYAYFAIKENSPETLVTKENGVIGIDINAYPDNIAWAETDVNGQLVSYGKIPMPCLTSGSSNKREYYRWLYAHEIVKLAEERKKAIVIERLDIKNKGRRGDYSGRKSRRIRHNFSYRSFLNKLKVLAQRKGIQVIEVNPAYTSVIGLLKYAPQYMISKDVAAAYVLARRGLGLKEQIPDGYMKVIEHLNVDDLDRLKDYIKKVVKNRYLKRKHFKEIERVKNLIQNLKSESGRVSGPLDGTSLGTCSSSYKTWQVLKVAVVTPLSPEKTLRDVSVLRRIIHLGQVGRPWHGRKFLLLGAGAMVVPNTASWGWNNLKGGKKYPSRLNLYSFVQFK

SEQ ID NO: 33927 - protein, 344 aa, Microcoleus sp.
MITLTYEYKLAPTPAQIQTFDRWLEIGREVWNFALRERKDVAHSRKCKIDACSIVSEYIIPPDVKRPTYASQCKALTSAKKEFPHLKIVHSQVLQQVLKQLETAFVSMWSRGFGFPRFKKKMRSFVFPQMKAEDLVGDTVKLPSIGIVKMRLSRPIPEGFSLKQSRIVKRASGYYVMLSLQCDVKIPDVLPHGEALGIDLGLLSFVATSEGELVARPRFFVDASRKLKLLQRRLKHKKKGSKNWHKLNQKIALLHEHISNSRKDWHFQLGHDLCDRAGMIFAEDLNLKAMSRGMLRKHTLDAGFGQFLNILSWVCWKRDVYFAKVDCQGTSQLAPCAIHTLPKI

SEQ ID NO: 33928 - protein, 88 aa, Microcoleus sp.
MEKEDLAIKNMVKNHQLAKAISDASWGELIRQLAYKCQWYGRELVKIDRWFPSSKRCGNCGYMKEAETQIAMFGNPCAFAPGCMSTSC

SEQ ID NO: 33929 - protein, 221 aa, unknown
  TnpB Polypeptide
MQSVPSCVQTELSWEESLLTFPVTKTGCTVRWDGSEDFSGNMDRVRRRKMAYAKRLNTELGRKIAKEIVFYASENKADVIVFEYLEMKGKLSGKKKQKLQMWRKRDIQKRCGQQAHRKGIRISRICAWNTSRLAFDGSGEIARDTRDHRLCTFQTGKRYNCDLSASYNIGARYFIRENLKPLPETERSLLEAKVPAVKRRTSCVYADLRELISEMELRKAA

SEQ ID NO: 33930 - protein, 365 aa, unknown
  TnpB Polypeptide
MKVKKTIKAKILELRKGKEELLKREYENWQRYLRGDKTVPLYSATKQQADRLLKRLKGRLKPNKEYPMILRRDVYRANTKLTPYWLKISIYGVRGGINVPIKTHEPITEDMVCREAKIIRKGDEWFVYITVEKEVEERNPKSILAIDLGIRWMATTVNSNNPKPNFYGKELRKVKGHYFYLRRSLTLKKAYKTIKKIGLKERRVVNDILHKISRAIVNEALENDSMIVLGNLKGIRRNGKGRRFNRKLNNGFPYYRLSQFIEYKAKWLGIKVIKISEKNTSKLCHKCGEEGVRVGSSFKCPNCGYSCHADYNGAMNILKRAMGLVSVAGAGLTQPRTRYDEARRPKNRESPHLSGKSVKSYSFKF

SEQ ID NO: 33931 - protein, 427 aa, Escherichia sp.
MHQENTMLPRRISVSLFIDQSIIWPVKRLQAFKFQLRPGGQQEREMRRFAGACRFVFNRALARQNENHEAGNKYIPYGKMASWLVEWKNATETQWLKDSPSQPLQQSLKDLERAYKNFFRKRAAFPRFKKRGQNDAFRYPQGVKLDQENSRIFLPKLGWMRYRNSRQVTGVVKNVTVSQSCGKWYISIQTESEVSTPVHPSASMIGLDAGVAKLATLSDGTVFGPVNSFQKNQKTLARLQRQLSRKVKFSNNWQKQKRKIQRLHSRIANIRRDYLHKVTTTVSKNHAMIVIEDLKVSNMSKSAAGTVSQPGRNVRAKSGLNRSILDQGWYEMRRQLAYKQLWRGGQVLAVPPAYTSQRCACCGHTAKENRLSQSKFRCQVCGYTANADVNGARNILAAGHAVLACGGMVQSGRPLKQEPTEMIQATA

SEQ ID NO: 33932 - protein, 367 aa, Methylicorpusculum sp.
MNTQTKTLKVRIRDKQVDVLNRMAFECNQVWNAANATSAEFAWVPVPEVGYMTMQTSGFDLMKELKGIRKERSMIIGAGTVQEVIAVHAKTRKQFKKDKLKWRSSGGARRALGWVPFKSGAAQWINGQIRFCGIYFKCWDSYGLSQYDFRSGSFSQDSRGRWYFNIVVHVEAKVRVSEGGQIGIDLGLKTTATCSNGDTLERQNVYRNSEEKLGKAQRANKSKQIKSIHAKIKNRRADAIHKFSNKIVKENSLIVVGNVSASGLAKTKMAKSVLDAGWAMLKAQLDYKSRGMQGVFLEVNEAYTSQTCSCCGWISANSPKGLGGLEIREWTCAECGTEHDRDQNAAKNILRMGHHTLAVGITVSSGR

SEQ ID NO: 33933 - protein, 408 aa, unknown
  TnpB Polypeptide
MKKTLRYNYRLNPTPLQETKLIEFGATARGIWNLLLSENMRRYEYDKTFLFYIEMASLLKEIKPFEEFAWIKAFDSAAAQQVARDLEVALKNAFSKGRLQRFPKHKISYKKKKLHNDSFRAVNNSNCIRIENGAISIPKVGKVPIVLHRKLASKIKTVSVQYRHGKWECSITQEVECKTAKQVLKSITGFDINSKQTVVGSNGFVADNPKFLKQSKERLNQLQRQLARRNKGSNRWYKTKQRINKLHGKISRQRLDFAHKTSRQITNENDILVFEDLNVKAMQKFNGSMVADNVMGLITQLSKYKAELEGKLYHEIGRFEKSTGICEECGQHHVLTLNDRCFTCVACGTHQNRDISAAKSIANTGELGLIAAGIVARVSPKSQQKSAIKTKVFELSKVADGAEKKEAA

SEQ ID NO: 33934 - protein, 468 aa, Streptomyces sp.
VVEASGEDNRVRVTGAKARRVKREVLGVPDRIKHQRRVAVPMQRRAPETGNRRRVYRYRCYPSPSQAEQLIKTFGACRWTYNEGLALRDKAWREHRVSIGFAESCRALTGWRNAEGTRWLQEVSSTVLQQALRHLDAAFGLFFNGTTKHPRRKKKSRSHDSATYVRTGFRWVEDPEQPGTGLIALAKQSGPLRIRWSRPLPAGTRPVKLNVSRDRAGRFFVSVLVEERIDPLPPVFLRDSGTPKAVGLDLGLAALVTLDDGEKVDHPRLLKKYGARLADLQRNLHRKERGSRNREKARQEIARLYALIGDVRRDALDQLTTRLVRENQVLVVEDLSIASLVRSPKGKGRRRKAGLNRSILDASWGELLKQLLYKCAWYGRTLVVVDRFFPSTRRCSACGAAGPKLDLAVRGWSCGGCGAVHDRDVNAARNLRDEGVRMYELVASALPPGRAMPSVIRASEMPRVALTA

SEQ ID NO: 33935 - protein, 439 aa, Desulfotomaculum sp.
VKPVLLTEKVVLSPTPKQEQWLWQMSMAATELYNIALQQRRWHFYRHHGTTQSLSYTYQNSQLVELKKAFPCFNQLYSLVAQEVLRLVNKDYRSFWGRLKNQRLNGDEVTARPPWFKSALKYFTLPYIQSGFELDGEYLVVSGGMESYKTSKGKTKRRQYKERIKIEGYRNLPDNIHSLTISYEKGKYYANLVYEITPAKLGSERPLKVVAFDPGVKTFLTGATDSGCLIEVHSTVNRSTRYFDKEIDLVKSKLDRCKKGSRRWRRLKKALSTLYQRRAGQINGTLHATAKLLANSRHDIISVGSPNKLGMVSSDPAKGKGNQRINRAVQNNWPHKKFLGYLGYKTESRGKYTHKADERYSTQTCSNCGNRQKLKPTIRTYKCPKCTMVLGRDDNAAINLLNNLLTSFYRPKVNYRDYRKKIYSRTLSGQWYVAYKKVG

SEQ ID NO: 33936 - protein, 374 aa, Desulfotomaculum sp.
MSNNMSSPKEIRNYKFRIYPNKEQESKLTNWLTTCRIIYNSALADRKNYYERTGNGLTRIAQQETLKADKAKHPKVKEVHSQVAQEVLFRVERAYNNFFRRVQAGEKPGYPRYKGPGQYKSLTFTQFGDGLGASFQNDKLKLSKIGLVKIDLHREIHGQVKICTIKREQSGKWYAVLAVEEYPVLFSPNWQTIGLDVGIKEFAVLSNGEKIANPKHLQKSERKLKTLQRSLSRKKKGSKNRAKARNKLARQHEKIRHQRKDFHHKISDQLVWRYGKIVVEDLQITNMVQNHKLAKSISDAGWGEFISMLTYKAESAGRMVEKIPPYGTTQQCSRCGSIVKKDLSVRIHACPHCGLVLDRDHNAAINILHKSKAS

SEQ ID NO: 33937 - protein, 487 aa, Desulfotomaculum sp.
MKTTVRGVIPALTAEQESFLSDLMNRYCAAVRWSFKRLLEGLKTQDIRLAVQPNFNLNSRQANDAVYDAKTVITSQKELVKLHYANAQKKVEFIEKRLKKAKSPKRITNLQKRLDKEHRALAFWQKHIDNGTFPPVVFGGKKLFLKRCRGLISREEWREARSNRYLSRGDKTKGGNLNTRIYLVDDNIYLDIAAEQVQAGKSVRYNRITVPVYLAHKPSKKTGQINGINYRQIVLDYLKTGNAYQVEIIREQGRYYIHVSIEEETPAPYTARNGAIGVDTNPDGLGITRTDYLGQFKENMWLSLSECTYARTNRRENLIGETAANVVDLAQKLNCLLVVEDLEFKDDKSMTAKFNRMSHGFIWSKFLAMTQRRALRKGVPLVKIKPAFTSVIGILKYQVQYGLSNHEAAGYVIARRGLGLNCEKVPKPLVKQFIKKKKKDGFSKLTNWKQWSSIKKAVVAAIKKHTKKEVQSLVSWQHYRKQLLVSG

SEQ ID NO: 33938 - protein, 479 aa, Desulfotomaculum sp.
MGIILELTPEQKDYIDNLMERYCAAVRWSFKRLLEGWKTQAIRIAVQGRFNLNSRQANDAVYDAQSTIKSQHELVKLHYENTKAKVEFTEKRITKAKSPEKITKLQKRLDKEQRKLAKWHYYHETNTFPPVVFGGNKLFQERCKGNITKETWREARTSRYLSRGDKTKGGNLNTRLCQIDNQIYLDIAADPVQTGKSIRYNRITVPIYLARKPSKKTGKINGINYRQMILDYLKTGDAYQVEILRQGGKYYIHVSIEEETPVPLKPYGAIGIDTNPDGLGIAIVDYLGQYRGSRWLGEGEWTYASSTRRTNLIGEKAKQVVTLAKETGYALAVEDLQFKNDKSVTAKFNRMAHGFVWSKFLEHIDRCAAREGVPVIKVKPAFTSVTGILKYQHMYGISSHESAGYVIARRSLGFNDDKVPKLLLDKLVKKKPAFKQMTGWKKWSAVKKAVLARIKKLTKRKVKSLASWQVHRKNVLGIG

SEQ ID NO: 33939 - protein, 332 aa, Acidimicrobiaceae sp.
LTISRAQSGSWRASVGFRNVAARRLAPSDQVGGVDRGVAVTAALPDGTLLEMPGFLAEARDRIAELSRVREAHPKGSVGWRQANKAIAKEYRRARHRSENWARHTAIGIVAAYGVIALEALRLPNMTRSAKGTVENPGKGVAAKRGLNRSLQDAALGRLAWWICVGAEDAGRRVYKVDPRNTSRQCAECGHHDPANRPSRSRFCCQSCGHEAHADVNAANNIAARGQAADTAWKAAGSPLLTRPTPRNRRHRTITTPPQGAGSAPHSLIPFGSGPQQNRPGRSGGGPAGGRPTRSEPTPGVVWTDPAAPPRRGGAPPRGRSHGSRDAHLRGG

SEQ ID NO: 33940 - protein, 400 aa, Blautia sp.
MKTGYSIKTIKYKLRCSHPEWLTETEKYYRQVLDFYFRLLLEHEEIWELNVLQMQGSLERLTIAGRDGRIPEQPLPFGRVPVYFRRSAINKASASLKSYTEKYKNSGDDLVYTIPDTIDASVTYFKGMYKDFKENRISLKVWDGNRWNWMDCRLKGQSIPEEALMLSPTVVFKEKEFWLHVPVKQQTEDARNAKERMKDRENVCSVQFTNTDIFAMCCVLDADGKQKAVYSCRGGDAYRSKCKVLLEKIEKSRVYTDKDNVTQPNHKYYLRLKNLSDHYAHQVSREIVDFCVREEARVIVIPSYDKEFSKMVQYRSGMYSPLYLGSRIREFLKYKAWIAGIVVLELSAEGTSSRCFVCGGKIRKNGAMFECENGHQGSRFLNSARNLGVKCQKDFERKRK

SEQ ID NO: 33941 - protein, 300 aa, Bacillus sp.
LKEVDSLALANAQLNLQTAYKNFFSGQNEFPTFKSKKDRKSYTTNVVNGNIMLLNGQIKLPKLKMVRIKQHREIPQDHIIKSCTISMTPTGKYYVSILTEYEKEIVQKEVETVVGLDFTMDGLYVSSEDERANYPRFYRKMLNQLAKAQRVLSRRTKGSERWNKQRIRIAKLHEKVSNQRKNFLHHKSKELVDNFDVVAVEDLNMKGMSQSLNFGKSVADNSWGMFTSFLAYKLHEQGKQLVKIEKWFPSTKTCSSCGSVKDMPLSERVYSCICGANLDRDYNSAINIKNEAIRRLVALT

SEQ ID NO: 33942 - protein, 531 aa, Streptomyces sp.
MSAPFVALGSSGVAIRTRLKHLTPEDEGVLRVVGAHLGLLASRDLRRRCADGLEHSSDTWAERKRALTGESSSRWAGSITKVNHDQWALSRRAQLAHIQGLEAGMKTIEHRLSLPVGERGSKRAPGGYRSRQEWFAKTRRLHVLEDQLTAERADREAGRVRVVRGGKKLARGRHHLEAAQLTAEQWRQRWEASRWFLAADGESGKRFGNETVRVTPDGEVSLKLPAPLAHLANARNGRYVFAARVHFHHRGDQWADRVSAHRAVAYRIHLDVERSRWYLTASWTIPPVKTVPLARARKGGMVGVDANADHLAAWRLDEHGNPCGAPSRFFFDLDGAASFRDAQVRHALIRLLHWAQRHNLSIAIEDLDFGAEKTREKHGRRKRFRNLISGMPVSKLRARLVSMAAELGITIVAVDPAYTSQWGAQHWRKPLTSKTRKTTRHDAASVAIGRRALGHRIRRRTAPPHDDQSDRRGHRTAQAGGGARGREGTCPRIPGPRTRSDGAVCGAKAGDQDAQHRSERPAEPVQLMLSL

SEQ ID NO: 33943 - protein, 499 aa, Hormoscilla sp.
MSALTYTKGLPTPPEELNSLGFTQFEMFLTSYATIYRLAVYQTVNHLLKGVAFNKSQWNRHLQQTYRINKHHAGGVIADAVGQVSSAKECRQNHIKQLQGKLKSTLEWIRKAEKKLNLARKFYRKKSWQHSKSGCRFPIASSLQYRKTNWQYLRFQIHQKKRKACLIERKINHLKLKPIRVKVPHSQCFVVGCKAEKWGNQVCQWDGVTLKFRVPACLEDRFGEYVTTKLGSYDRKINRLPSIGAKSWHFYLKNGKWNAAVQFTPTQPSRVSRHSSEGCIGIDMNPGDIGWAYVDKDGNLKAKGQIPLQMGLPHGQQDAQKVDACLQLVAKPNTFKCPIVCENLDFSRKKEQLREYSSKYARMLSGWAYARFYQLLESILSNRGIYLLKINPAYTSLIGKVKYARLYGLASDEAAGLAIARRGMKLKELIPSSITAYLDVKSPKHVWSLWYQLNKLLKSCNRWKNRHSFYSVSNWGLEVKEMVDPACGRSQTKRKRTSS

SEQ ID NO: 33944 - protein, 379 aa, Enterobacter sp.
MVFCKPMKRAYKYRFYPTPDQVELLAQTFGCVRFVYNSILRWRTDAYYDRQEKIGYPQADKRLTAIKAMPEYSWLADVSAVPLQQAIRHQQNAFSNFYAGRAKYPTFKSKRHKQAATFMNTAFKYKDGCLYMAKSKAPLDVRWSRPLPSVPSSITISKDSAGRYFVSCLCEFKPVSLPITAKTVGIDVGLTDLFVTDTGFKTGNPRHTAKYAKRLALLQRRLSKKKKGSKNRAKARIKVARIHARIADCRLDNLHKLSRKLINENQVVCVKSLKVKNMIRNPKLSKAIADAGWGEFVRQLEYKGEWSGRSVVAIDQFFPSSKRCSGCGYTMPKMALKVRSWLCPECGANHDRDVNAAKNIKAVGLTALAHGATVNPKAA

SEQ ID NO: 33945 - protein, 501 aa, unknown
  TnpB Polypeptide
MSQLAAEVQGISAYATYVVRNDTKLAADLAQVAVPQPATAGRRAGVTIPAELVVKGKVYRNKAGKLVEEKVFGKSRKEWLFRHRVVTEHRSWQERIKAANGENDKYVSQGWKRTVDASAPSYGEDTINLGAIDRQYAVIENDPFATGEIVLKMVVKGKWYRLIFPFDNKRFREGKVTLPVIKVEDSQPVFIFSVVTDNPVVQFSGDYIIGVDVGINNYATIAVRNSTTGRIVQQTTLSQRVHSLWNSVRASERQVRALNEKADKLLCNRQGKMAALDEAQLHREAASRKKRELAVLAAQEIAYLSYSYGNAVVAVEDLSWVVNTMQNGRWNRGTFVQWLTHYVTQNGGWIVAVNAVNTSQVCHICGEKVAHPEHNVSVCAEHGEMDRDVNAAANIAARAVSKVEKARKTRAKNRKLQRKAQLKTPVARETLKYPGRDRMKNAPTPKRKNRRTREVTLPFSPARVNMTTVLADCGEYGVVETNQAAINQGNVTCKCKLCSLN

SEQ ID NO: 33946 - protein, 472 aa, unknown
  TnpB Polypeptide
VVRNDVMLGERLALAGAVQPSTAGRRAGVTMPDFLVTGKSGRSRKEFLVQHNVVTAFRSWQERINAANGESSKYVSQGWKRTVDASVPSYGENVVNLGAVDKQYAAIENDPVADGEIVLRMIIQGVWYRLIFSFDNERFTEGKVTLPVIKVEDSQPVFIFSVVTDNPVVQFSGDYTIGVDVGINDYATVVVRNSTTGRVVYETTLSQRVHSLWNSVRASERQVRALNKKADKLLYQRQAHMSAVDEGQLHREAASRKKHELAILAAQEIAYLSHQFGNAVVAIEDLSWLRNTMQNGRWNRGAFTQWLTHYVAQNGGWVVSVNSADTSQLCHLCSSKVTHPTHKVSLCPEHGAMDRDVNAAANIAARAVPKVEKARKTRTKNRNLQCKARLKTPPTRETLKYPGRDRTKNFPTPKRKKKRKGVNLPLSPARAQASRLNVRVLADCGAYGVVETNQAAIMQGNVTCECKLCSLN

SEQ ID NO: 33947 - protein, 506 aa, unknown
  TnpB Polypeptide
MAELASEVRNLSAYATYTVRNDEVLGAELSLATATAPAEVGRQAGVVMPDFLVPDKKGKDGNPLTDKNGEPIKLKTGKSRKERLFRHRVVTEYRAWQERIAAASGESSKYVSQGWKRTVNASAPSYGDGDFINLGAVDKRYAVIENNPLIDGEIVLKLVIQGKWYRLIFSFNNKRFTEGKVTLPLVKIENGKPVFIFTVVTDNPVVQFSGDYTVGVDVGINDYATVVVRNSNTGHVVHETTLSQRVHSLWNSIKASERQVRALNKKADKLLHHRQVHMSAIDEAQFHREAASRKKRELAILAAQEIAYLAHSYGNAVVAVEDLSWIRNTMQNGRWNRGAFVQWLNHYVAQNGGWVVSVNAANTSQVCHLCGEKVAHPEYKVSVCPKHGAIDRDVNAAANVAARAVSKVEKARKTRAKNRKLQQSVPLKTPIARDSLKYPGRDRTKRVPTPKRKKRVVREVNLPFSPARVIVTSVLADCDTYGAVETCKAAINQGNVTCECRLYSLN

SEQ ID NO: 33948 - protein, 452 aa, unknown
  TnpB Polypeptide
MSLSQTLAVDSTSKEKDLTPYWNESCLEMSQKLLSHTKTGCVGSDLNLLNLLPKSTIAPSWFSMKVRCHHKQNLSKTSYPSSSLVDCMDLESTVVRSKKIRIYPKNRQQARRYLGLSRWWYNRTINYLRQEGTKASLYDVRKVVQKGDDIPDWAMDCPQRIREHAMSDACNAVKNAKAKCLKIGKVQQVSFRAKRDPIQSFGFDKIALNQDFVFGSKKFKMEFEASETFHTDLEGTRIVREGSRYFVIIPQKLPYQVPENQRIDAVALDPGVRTFISFYSEVLHGKIGEGDFQRIYRLCLHLDRLMSLISKAKCEQKRRMRKAAERMRWRIWDLINELHKKVTNFLVRTFNRILIPTFETSQMVTKLASSTARNMLTFRHYGFKEYLKARGQQAMCEVIEVNEAYTTKTCSYCGTEHKMGSKKRMKCECGADVDRDLNGARGIFLRALAASP

SEQ ID NO: 33949 - protein, 146 aa, Solobacterium sp.
MEKSIIYHKKKKEIAKIHNKIQRSRRDRLHKLSNEMTNKYDYIFVEDIDLIALSKNNKLKNATKDNGYGEFVKMLEYKAKEKGTVVKRIDRWYPSSKRCHVCGNVIDRLDIGVKEWMCPACRTLLNRDINAAINIKEEGLKKHTVD

SEQ ID NO: 33950 - protein, 440 aa, Ktedonobacterales sp.
MKTVITAKLKLQTTPAQFAALRATQLAYRDSLNYVSHYAFAHDKMSNKVKLQEGTYDVLRSRFHLPSQMACSVPRQVGATYKALWSKVKQNATHRKANHTKKRYKGLDQPPKYVSPTLDYQYGKDYSFKKDQHVSVLTLHGRIILAYSGYERHVALLQHGAEIGAAKLWYDKARKTFYLLVPLHINVPDPMAQTLTGIVGVDVGIRYLAVTSDTKGACSFYSGKGIVPKATHYARLRKRLQKKGTRSATRRLVAISGRERRLKQDANHRVSAHIVKTSPHSLLGLEHLTDIRERRRRKRGKKASRKQRKANAASCKWSFAELQSMIAYKALLQGSMAIKVDAHYTSKACPLCGHTADANRPNNGLLFVCQNCHYTLHADLVGARNIMMRTLLARQDWASTGSLSMSPDVSSAEIKAARLSRYAELRWNLDTSSLPSGGSN

SEQ ID NO: 33951 - protein, 406 aa, Ktedonobacterales sp.
MCKQALKFRLSPNKAQEKMLFWTLSRCRELYNAGLSERRDSYKYTGKGVTYYEQKRDLPEIKAMIRPEYQNIHSQVLQDVLNRLDKAYKAFFRRIQNGEKPGHPRFQGRNRYTSFTYTQGGYTLFEKHVTFSKIGKIKCKFHRQIGGTVKTATIKYEAGQWYVVFACERPEGTSTQTPYTDEEIGIDLGLLHFATLSTGDTIEKPQHFRKGEADLRRKQRHLSRCKRGSHRREKAKKAVAKAHRKIRNQRHDFLHQASRQLVNTYETIVFEDLASSNLSKRPKPKQDEETGRYLPNGASAKSGLNKSILDAGWSTFVMYCSYKAEWARNVQVHQVDPYKTSQICSQCGKEGPHKDLGERTHTCVHCGAVLDRDHNAAINILSGWKSPTVRARLRGKRECAVEAPTL

SEQ ID NO: 33952 - protein, 594 aa, Ktedonobacterales sp.
MFERAMRNAAITQTLSYPLRLPDFIQADALRLLDVSREVINLTITALWDRLDAFATRTNTYAYKQVEEMMAPPLKHGHRQWRAEAEQAGRILRGQAERKKLFGVVLPLLEQGMIVPKTDKRRAGKNRKTIKQAMADLCEANTDGGSTVELQSLIEQACNFYLENGCFPATYEEMQRVPVLKAGIVPYASDDGPKMGQTYRLSLDLDHQRLTLALRTPDEVGTWARSWRERTCQMSLPDVLAARLQEGAMQAPILREIKEADGSRYAVLDFMVLVPVCSVEAWETCQNVLGFDWGVRKLLTASVVDLNGNQVGRPFFLDTGPFDGRQARLRRQIDQLKVKVGRLEQQRDRFPLGDPRRNPSEGALFVLRREINRCWRQYEARNNDLGHLAANILLVLATAFDCHLLAGESLKTLKSAGRGRSAKGRWRNWRNNAQVRGALWRVLRYKCFLSGIRLEWQHPRYTSHVCPRCGSSANTYQSPEHRAKVNDWGAWLCCSNPSCLWSGSRDYAASLNIARLGTALIRHAQTTGKVVHLSVLNTSVQPVSYIGTRTALRFPPSVPRGRLIHSGRVSCNGWCSSVRLRSSYATSILLRLCG

SEQ ID NO: 33953 - protein, 387 aa, Ktedonobacterales sp.
MYSRAKKKERASSKDVLIYEYKCTGSKAQYAAIDDAIRVCQFIRNKCVRLWMDEHATKNELQVYCAVLAKDYPFARSLNSMARQASADRAWFAIVRFYENCKAKKPGKKGYPRFQKHTRSVEYKTSGWKLEPDGRHLSFTDGCGIGRLRLVGTRDIERFPIQQIKRVRLIRRADGYYCQFVVQAQRHVEHVWGGQAVGIDVGLKAFYTDSQGSTVENPRHYRRAEKRLKRLQRRLSKKQKQSANRQKARKTVAKAHLKVQRQREDFARKQANALVTSHDLIAFEDLHISNMGRNHHLAKSIYDAGWDSFLSWVNYYASLHGTAVVAVSPQFTTQDCSACGTRVKKSLSVRTHLCPGCGLVLDRDHNAAVNILAKALSTVGQTGTDAP

SEQ ID NO: 33954 - protein, 428 aa, Ktedonobacterales sp.
MAQTLATRAHNALNRVCLGKARRVRFRSKGRGLESVEGKRNDTVLRFVLQPPQEGNQGFVVWGHDRLPVLLTWQDPVIVHGLHQRVKYVRLIRRSASSPRAKGADRSSHRYFVQLVLEGRPYLKPKNQPGSDTVGLDIGPSTLASVGREGPARLQLFGEELQPNARRPRRLQRHLDRQWRASNADNYDGQGCIKQAGMQRLRWHESHNAQLTRRRLATVARRLAAHRKSLHGRLVNTLIRQGNHMQIERTSFKGWQKCYGKSVGLRAPGMFVEHLKRTVAKTGGILWEVSTFHTKLSQYCHGCGTYVKKPLVQRWHHCPCGIGPIQRDLYSACLLAFLSPTHHIPSIAQSDWARVESRVKAAMEELIQRAKAGQPLPQSFGIPGARARQPASLAPNRSEPVGLLLRTPLDALGLAQEPLLLSLREIQV

SEQ ID NO: 33955 - protein, 197 aa, Ktedonobacterales sp.
LKSAFDRKAKGRKAGQPQSKLCPIRYNERTYVLNWQTQEVSLSTLEGRILIPFQVPPYSSKYAGYQVTTADLCIRNGRYWLHVVVSVPAPDGSQSDEIIGVDLGLNRPAVTSNRHFLGSHHWKEVERRRKLQSKGTKSAKRHLKKLSGRSLRFHRDCFHVLSKHIVQNATPGSTIVIENLTHIRSTSKIRRKGRANA

SEQ ID NO: 33956 - protein, 437 aa, Ktedonobacterales sp.
MQLVEQHIIDRNDPRYHVIDEAAFKSKNLYNAGNYEVRQSYILAGKYLNYHEMDRRMQSHEAYKALPAKVSQQVLMQLHHDWEAFFKARKAYNEDPSKFRARPRIPGYKQKTEGRNMLVYTIQALSRGKRGLKHGIIKPSMLAIEVKTKQKDIHQVRIVPRKGFYVIEAVYSREEKQSPVNSAYYAGIDIGMNNLVALTSNKPGFRSVLVNGRPVKSVNQFYNKHKAELQSQLRRKGTTKRMERMTNRRNRRIDQYLHTVSKRIIDLVVKEGIGTLCIGKNDGWKQEANMGRRNNQNFVSIPHARFISMLTYKAELVGIRVEITEESYTSKASLLDLDPLPVRTNGDEKHTFSGKRIKRGLYRAKDGRKINADINGAGNVIRKVAPDAFSKVEGVEDGKAVLASLVVHPVRLVVAPARTQKASNGASKRSRERSKTL

SEQ ID NO: 33957 - protein, 418 aa, Ktedonobacterales sp.
MLISKKIRLEVSDQDAATLEFMQGKCRGLYNWWVMRLRDGEKWPGWEEAKKTLQASKEHDPELKFVYGKLLQEVYFRLDGSMKAFFRRVKNGEKPGFPRVRPRHNFFTLIYPAMYIQVEGLSLRLPTGGKGKNKRYPDVIAKLTEEAPTGYKDVAISRDGQGHYYASFVHDEEEETHEHDGVLAIDLGVKTLATGVNEQGRFYHINGFKGSRWYCRQLDKIRSKRDRCKKGSRRYKRLSQVYKRVSQQKRNKQNDSLHKASHLIAHKLVERTVVVGDLSQRQMVMKEHRERNKHLNRAVFNEWGLYTFIQMLLYKCQLYGKDLQILDERDTSKTCSGCGQKQAMPLWKRTYRCPNPECRLVIDRDENSAVNILKRYLARLGPHTGDPVRCADVFTAIENRCAEVSNATDQCVNTFEHI

SEQ ID NO: 33958 - protein, 590 aa, Ktedonobacterales sp.
MGTQQLKQSLSYPLRLPDDAQVEALRLLDLSREATNHLITVLWPRLDEFIVRSNKYAYKQIEAMMVSSQTHGSRQFRCEAEQAGRVLRAQAKRKQQFALIQPILTQGMIMPKSESARPRKHSPTIKQALEALTQSDADGGNYVELRSLIEQACNFSLKNGSFPDTYEEMQPIPLMQAAQLPYAGDDGATMGQAYRMAVDLKQKQIRLSLRTPDAQGNWGRGWRDRQIRLPIPDYVVAKMEQGSTQAPVLREIKEPDGTRYAVLDLIVEVLVEEEPEPPEMNTILGFDWGVRTLLTMSVIDLEGHQLTRPFFLGTGCFDGEQARTRQQIDQLKAAVARQEAHLSRLKEGDARREVCQRKLKRWRREISLCWKKYENRNHDLAHLAANVLLLLAAVTGCSLIVGESLKSMKSQGRGRDTKGRWRNWRNNTQVRGEIWRVLKYKCFMTGMHLEWQQPRATSHTCPRCGKPAQTYTSSEHLGKVIAWGAWLWCHHCGWSGSRDYAASLNIARLGAAWLKEAQRQKRLMRIHHPQIQENHVNPVCYMLAGSPLRFPARSPRACLHDAAKMYINGWTHSVTLHSSYPTAIMLDACG

SEQ ID NO: 33959 - protein, 594 aa, Ktedonobacterales sp.
MFVKGGTMRTNRTHQPLTYDVRLPDEAQADALRLLDASKMVVNKALIILWPFLDDFGSERTGPAWKQVGKCIGSPLPHGDRQWRCESEVVGRLLRGQAERKKAFAVVAPILSDGFIRPQTDKRPAGKNRQAIKEAITTLQKSLEEDDTRFVTLQNVVEQCCNYFFQHDQFPQSYEELQPIPVLSVGMLSYAGDDGREKGQAYRLALDLDAGVARFRFRYPDEAGVWRWRKTDTIIALPECLKERLWEGELMAPTLREERRAEGERFAVLDFIVEVEKTELPTWEQVERILGADWGIHTLLTATAVNEHNEQVGKPLFLNTGNFDGRQARTRRQIDELKKKVALYEQQRDALPEEDSKCLWYAKRLALYRREIERCWRKYNWRNRALAHLASNVLLLLCQIHDCSLLSMESLKTLKSTGRGKGVRGRWRNYRTNATIRGEIWRLLRYKCHLVGLRFLTCQPRGTSHTCPRCGVPANTYRSPSDRQEGVKWGRWMYCTNCSYNGDRDYCASVNIARLGVAYLVQMKQAGKARACSISDPRVKPVAYTTTGSALLLPPTGETPARFLRGKIYYYPGWFASVFLQSSQPRAVFLRLCG

SEQ ID NO: 33960 - protein, 420 aa, Ktedonobacterales sp.
VVQRGKQTHLKKVRKPNNPHLRNKAYKFRISPTQKQIGKLEWTLRRCKELYNAALEERREAYRMNGVSVSYNMQAHQLPAIKALREEYQDIYSQVQQDVLKRLDKAMDAFFRRVKNGETPGYPRFKSADRYDSFTYPQGGYEIVNKRLSLSKIGHIKIKQHRQMQGTIKTCTIKREGEQWYAVFTTEYAFAASMAFHPSEEEIGIDLGINTFAALSNGTFIENPRIYRKAEEAIKKAHQKIARRKKGSHRRNRAKKELSRLYRKSRNKRRDFLHQASHKLVTTYGTLVFEDLKIENMTKAPQPKQDENGTYLPNGASANGGLNKSILDAGWGAFVALCSSKAEEAGSTVAQVAPHGTSQACSQCGCVVPKDLSVRWLSCPHCGCELDRDHNAARNILHRYRLKKVNGAGSVPQRSHAGGL

SEQ ID NO: 33961 - protein, 351 aa, unknown
  TnpB Polypeptide
MLDEVVWQCRRLYNTALEQRIILWKQRCVTITRNEQEAELKDLRAVMPDYAAINSHVLQDVLARLDRTYQAFFRRLQRAEKTGFPRFQARSRWHSFTYKEYGNGARLDNGFLVLSKIGRVAVRWSRPLEGKPKTITLSREADGWYVCFSCANVPIHPLESTKQETGIDLGLESFATLSDGTIVHTPACYRKAERRLKTAQRRVSRRKKGSNRRKKAVSLLAKAHQTVKRQRLDFHHKAALALVRQYDTVYHEDLQVANMLRNHYLAKSIADAGWSQFVSILSFKAACAGRSVVAVNPAYSSQICSGCGILVQKGLSVRWHRCPGCGTSLHRDHNAAKNIERLGQSLRGEVA

SEQ ID NO: 33962 - protein, 253 aa, Burkholderia sp.
VPLKGRDLKREGEAFRFAGNTFRVFNSRPLPEGKIKDGTNFAQDARGNWFLNIVIEMPDVQARPIRSGVGIDLGLKDFATLSTGEKLPNDRFGRRAAEKLAKAQRARKHKRHIAKLHAKVANARADFQHKLALDLVRRFDYLAVGNVSTAKLARTRMAKSVYDASWSSFRDKLRYKALAHGATFEEVDESGSTQSCSSCGSKDSTTRPKGIAGLRIREWTCSECGVEHDRDTNAALNILRCGRASPGVGILRL

SEQ ID NO: 33963 - protein, 392 aa, unknown
  TnpB Polypeptide
MKKSYKYRLYPNRDQKILINKTIGSCRWIYNWGLEKTIKEYNENKKRFSRIDLQKEITILKKQTETEWLKEIHTNALRDSLLCLEKSFQYFFNGKTKFPRFKSKYGKKSYAFPIGMKTDFRNQKFYVPSVGWIKTIFDREYEGKMRKATVSVTPSGKYFISILVEDKHEPPQTTQIKSETSIGIDTGIKNFLVLSNGIVVDNPQYLRRSLDRIRILSKRFSKKQDGSKNKNKARIRLAKAYEKVANQRMDYIHKVTHELTKGENQADSIFIEDLNIQGMLANRRLALSLHDSSLGIFYKTLEYKCRWNGINLIKIGRFEPSSKLCTCGIKNDELKLSDRSWTCKHCGATHDRDLLAAQNIKRIGLEKYSGGGTPGEPVEVSTLVEPLKQEKF

SEQ ID NO: 33964 - protein, 191 aa, Sulfurisphaera sp.
LKPYEKALVKLRRLHKALSRKKFLSKNWFKVKVKLARAYEYLKNLREDLYMKLGKWFAQHYDVVVMEDIDVKQLVDKSERKLRMRLHDIAFHEFKEMISYQLEKYGKKLVLVNPACTSKTCAKCGYVKKDLSLSDRIFICPKCGWVGDRDYNASLNILRRSGWEPSLVPVELRPLPMAKSYGQGGAMNQEA

SEQ ID NO: 33965 - protein, 206 aa, unknown
  TnpB Polypeptide
MKDTAAKTKQQMKITAMPKYWGLIMRCRGWQCFQKRLNLKKQGFFRRNEKRLAREQRKLSRCVKESRNYVRQKKKVARCHEKIRNQRKDYLHKLSRRITDQYDIVAVEDIDMKAMGQCLHFGKSVQDNGYGMFRNMLDYKLAWKGKKLVKIDRFFPSSKKCSKCGKIKKELGLSERVYRCTCGNEMDRDRNAAINIREEARRMLAV

SEQ ID NO: 33966 - protein, 386 aa, unknown
  TnpB Polypeptide
LIKAFQYRLYPTSSQRKTMESTVETCRRFYNDCLAERKDAYEDRKEFIGKFAQLRKVKVLKETNPYAKKIHSHVLQVTVADLDEAFQKFFKRCGTGKKPGYPRFKGQNRFDSFGFKEYGNGFKIDGRRLKLSGIGRVAIRWHRPLEGKIKTLRITRKAGKWYASFACDVEEKPIQQTGNIVGVDVGINSLIATSDGELVENPKWYRDGQAKLRILQRAISRRKKGGSNRRKSVHALKIHHEHIANQRKDFLNKLANELVVNNDLIAIEELQIQNMVKNHNLSKSILDGGWGYFAKRLSDKAVEAGRKVVRVNPAYTSKTCSGCGTIFEDMDLSVRWIDCDCGVSMNRDVNAAINILKRALQNRDGQSRWELTWAVAPCVSQEAPAL

SEQ ID NO: 33967 - protein, 375 aa, unknown
  TnpB Polypeptide
MFKAFKYRLEPNVNQTRELETSLETHRRLYNACLRWRKESYETNKHGVNYVEQSAQFTLDRKINPYYARINFSSAQATMRNLDKAFKAFFRRVKSGGKPGYPRFKARNQFHSITFPSGGGDGARIIGNKLRLQHIGLVRINLHRLIEGTVKTINIKRELDKWYVTAVCKFPLVPQIITCKPIIGIDVGLESFLTTSDGEHIYPLQPMKPNLGKLRISQRSLSRKKKGSNSREKQRRIVSKLYLKISNVRKDAHHKIAVNLINRYGAFVVESLNVQGMVKNHRLARAVLDAGWASFLMILKNKAESAGLRYEEVSARYTSQICPECGKVKKKTLSERRHDCDCGYSAHRDHAAARVILARGIQAGTQPEGLNVSVS

SEQ ID NO: 33968 - protein, 308 aa, Escherichia sp.
LKAGKPTFKSKHGRQSSYHCVGIKVLDGAIKIPKILPIEARLHREITGMLKSITLSRSATGKYYASLLCDDGMEAPAKPALISNVTGLDMGLAHFVIKSDGNKIASPRHLINASRNLRRKQKALSRKKKGNANRRKARIQLAAVHERVASARADFQHKLSRAIVDENQAVIVETLKTANMMKNHHLARAIGDAGWSGFITKLEYKATEKGVHLVKLDQWLFDCLLNEYTPLLFHAGFTQLLVDCRTFSGINMTITFSGKDQRKDQTFRTLIQRRTLRAKLRFVLMRRANFIFVFIPQHRTRDRSAANQ

SEQ ID NO: 33969 - protein, 260 aa, unknown
  TnpB Polypeptide
MDQIKQLRIYPPEKGSCKIIVVYEVPDQEELPQNGHELSIDLGLHNLMTCYDSENGKTFILGRKYLELERYFHKEIARVQAQWYGQQSGKGVKHPVTSKHIRKLYKRKQDSVTDYLHKITRYLAEYCREQEITCVVTGDIRNIRREKDLGHRTNQKLHSLPYNRIYIMLEYKLKRYGIRFIKQEESYTSQCSPLSPKVEKRYAEPSKRKERGLYRDGNRTYNADAVGAYNILRKYHSVSGVKKELSVTGLKTPEIIKVAV

SEQ ID NO: 33970 - protein, 411 aa, unknown
  TnpB Polypeptide
MIIQQVEKHVIKKSHPYYSMFCEYTHLAKNLYNHANYLVRKEFTETGNWLRYQDLDKLLKQDTDYPDYRNMPVAQSAQQTLQLLDSNWKAFFRSIKNWSKNKDKYPGKPNLPKYKPKDGRMVFILTNQQLRLRGDLLHFPKSFNGFTIKPRCVTLSNFEKINQIRIVPRNQIFCVEIVYSMVIDDTLLPDNGRYMSIDLGLDNLATVVTNTGLQPILVNGKGLKASNQYYNKQKAYYQCIAKRMNDKFYTNRLYRLTQKRNFKIEDSLHKISRFIVTSALDNEIHTIVIGNNKEWKQSISLGSRTNQSFVSIPHKKLVDKIIYKARNVGINVILTEESYTSGTSFLDGELPQKEFYNKDRRIHRGLFVSNNDVHINADVNASYQIMKKVFPNVFADGIEGAVLHPVRVDII

SEQ ID NO: 33971 - protein, 388 aa, Kribbella sp.
MPGVKIVVPVKLMPDAVQAPAIGSTLHTVNDRANWVSEVAFATGVMREYALRKHTYAELKAAGLGAQAAQHTIKKVCDAYATLRGNLRAGNLGEPGSKRRKKAESKPVVFRPQAAHPFDERCLSWQYDAQTVSIWTISGRLKNVRFACSAGALKTLRECRKGESDLIERDGVFYLIAVCEIPEAEQYEPDQFIGVDLGIANIATTSTGYLAAGHGLNRYRKRQLRLRKKLQTKRTKSAKRRLKVRRRKEARHAANVNHIIAKQIVTEAERTSSGIALEDLGGIRQRVRLRKPQRVALHSWAFHQLRTFLEYKARRAGVPLVYVDPAYTSQECAHCHHIDKKNRVDQARFVCRSCGVVAHADRNASHNIAARGEAVWTAGRESRVPDTP

SEQ ID NO: 33972 - protein, 477 aa, unknown
  TnpB Polypeptide
MRTYKYRCYPGQQAQAAANRIMACVVKPIWNEAQRERQENFDARCKAKTKEEKPPKWVSWYSQRHLIDPKTHPDYEGTRYGLRDGVLAALDWGYKSCWALRKNGHKDARPPGPMKWCDWVTYRWRDCRLDGHTLRAPGIGDIPVRMHRPVGGRIKTVTIRVKNAKWYVYFSCEIENFPGACRSLSGAKARKGKGLRQKHPESGGTTPQMRGVDNENLGGYDNEDGGTTPQMRGVDNVSEALNEVTAEMWGADNFSGPRSRFPTDGCTHQSDDIVVIWLRPEEGCFLADSTGRWVDVPGFYEAGLPEERRLNRLLSQKKRRSNGPDSPEKGRNQYKARLRLAKFREHVANQRSAFLWSEAKYYATRYRQIEIISRPAKIPIQYAKDERTARGLCDGAYGLFEQRLAQKCEEYGTEFRSKERSTWLKEKEVCQEQGKMEKLQPILRKAKRKVKRRIKGLPASTRSLQRACEELTTWQIT

SEQ ID NO: 33973 - protein, 370 aa, unknown
  TnpB Polypeptide
LLKAFKFRLYPKKVQEILINKHLGSNRFIYNYFLNKRIENYKENQTTLNYNQCSNNLTILKKELEWLKEIDSTSLQQTLINLDRAYKNFFRELKKGNKNQGFPKFKSKKDNHKSYRTNVTNNNIRLEGDKIKLPKIGFIKFAKSREINGVIKNVTVSQVPSGKYFISILCEVPEPQKLPESKMNIGMDLGIKDFAITSEGEIIDNPKYYRKYEKKLAKLQKQLNRKQKGSSNRNKARIKVARLHEKISNTRTDFLQKLSTRFINENQVICLEDLNVEGMIKNHKLAKSIADVSWSSFVTMLNYKAIWYGREISVIDRYFASSKLCNICGWKFVDLDLSIRNWICPDCGTNHNRDVNAAINIRNEGLKLIA

SEQ ID NO: 33974 - protein, 415 aa, unknown
  TnpB Polypeptide
MINTIKVKRNAKMIGIDMRTLREPYNVWRNTCTRLSAWMNDAIKNNNLDLKSYGAGYKFDYKIDKKYWTDKRDSDKVDDDQCTSAELVKYLSAETDVFCECDPKTSTQRRDVLNYVAERYYGYKKRNGSKKIPHPTFHEDIAWYFKEQFLTINSKKKTLKIKTLKGYVDTTYKYGLKDELLHEKNKGGNLRVKTKEFVAAVAFDNDVLYHPKGVIGFDINFQKGCWLTMNDGSEISMPDNLYELVQKQKELNTKIADRTKPVKERKIKSKERKRLRVLKDKITKQMNKIIRSVADKILDDAIENKYLLAIDGMAPQGCWGQDKLIAYLQTQCENKGVPFYIIPAAYTSRTCSVCGFESKKNRKKTDEFKCQECGFECSAHFNAAVNIANKAQSLLDDGMPYGKPPRFIKQKTVTV

SEQ ID NO: 33975 - protein, 212 aa, unknown
  TnpB Polypeptide
LCGIIEPGFPRFRGCERYDSFCYPQSGYRLNGARVFLSKIGHVKAIIHRPLEGVVKTCCVRRTSAGKWFVSFSCEVEDAPLPATDALVGIDVGLEKFATLSTDAQIANPRFFRRDERDLARAQRRLSKEPRPGKGQRATPARRKRRTVVARIHARITNRRADFAHQESRKIVNTYGVVAVEDLSINTMVHNHCLATSIHDAAWRQFIRLVAK

SEQ ID NO: 33976 - protein, 372 aa, unknown
  TnpB Polypeptide
MEKGFKFRLYPDKEQEIQLAKTFGSCRFVYNYYLAKRIELYNNGKQSMNYNACSADLTKLKTELVWLKEIDKFTLQNVLKDLDRAYGNFFREIKKGNKEQGFPKFKSKHNHEQSFRTTWTNNNIEVKGDKIKLPKLGWVEMVKSQDISGKILNCTITKTCSGKYFVSICCTDVIIDKYKKADSTVGLDLGIKELATTSDGEVIENPKHLAKLEKKLKREQRRLSKKQKKSKNRNKQRKKLNRVHEKIANKRTDFLQKVSTRLIKENQIICLEDLGVKNMVKNHNLAKSISDVSWSEFVRMLEYKALWHDRIIQKVDRFYASSQTCSSCGYKNAGTKDLSLRQWECPQCHTNHDRDANAAINILNEGLKLLSA

SEQ ID NO: 33977 - protein, 399 aa, unknown
  TnpB Polypeptide
MLIAHKIALDPNNVQATYFARASGTARFAYNWALAEWQRQYEAWKTDNALPKPSQAALRRQLNAAKREQFPWMLDVTKNAPQMAIIQLGEAFKNFFAGRTKYPKFRKKGIHDRFSLTNDQFSVEDSRIRIPNLGWVRMRESLRFAGKIMSATISRVADRWFVSLTVDTEDPPKRKAENQGLVGVDLGVSALATLSTGEVVQGPKAHTALLGRLRRLSRSLSRKQKGSSNRRQAKAKLAQLHARIANIRQDALHKLTSDIARRFHTIGIEDLNVRGMMANRHLARSIADMSFHEFRRQVEYKAERRGGRVVVADRWFPSSKTCSACGEKIETLPLSVRQWDCPACGAHHDRDVNAARNLATYAVSSTVSACGEEGAGSGRKTRVKPASVKQESSSKATYG

SEQ ID NO: 33978 - protein, 207 aa, unknown
  TnpB Polypeptide
LFGLKSQLAQSSIKTTIARYKTVKQQLFQNPYRYKDEDGRWQRIPKTLEWLWNPVFFRRPQADLVRNRDYSFVDDGQVLSINTLGKRTKCTFEGEHFAGYLNVSYQLGTAKLVELKGRWYLHIPFTKAVEDFQKECVRHVVGIDRGLRFLAVSYDEQGKTKFVSGKKIATKRHKFQEVRNSFRPKGQNQRSANSKPFLGERTVGCLM

SEQ ID NO: 33979 - protein, 385 aa, unknown
  TnpB Polypeptide
MKQTAEKTVVAKILTDDLTQSKLDAINHEYEAFQRYIRGEEEANLYSATKQCADAYVDTDNLRDDHDYPWFIRNDVFDVGVDVEQHNTDLTDWWLKLPVSQVWGGVNVPIQPHDEIPDEADVKDSKIVRKNGDDYAHLTVRQEVEVSEGYDGVIGVDFGVRWVATSVALPSRNTEFYGREIRRIRRHHHDLRTRLQEKGAYDTLKSVKGKEFRQVNDCLHKISRAIVEEAKERNSLIVVGNLEGIQNQDLGAEMNRRLHSMPHHTLKNYIEYKATFASIAVKSVNEYMTSQTCWRCGEQEATTRKGQGQHLCHECGLDDNADKNGATNIAKKGLGKDIACPLSSLGAVCEPALEPSGTDQASATVRLRVDLEAPASTKRAVRRAK

SEQ ID NO: 33980 - protein, 396 aa, unknown
  TnpB Polypeptide
MVLTHRIRLQPTRGQEQYFCRACGVARFAYNWALVEWESAFATGEPRSEIALRRRLNSIKDVEYPWMREVTKNAPQQAIKNLGRAYSNYFADIRMAQDGKLPWRSVRKPKLKRKGLRDSFRADSGPERSRPNGVPTEGRRIRLPRVGWIRMREAVRFDGRILSITVSRQADRWYAAVAVEVAHIVPCRTDTAIAGCDLGITTFATVADGQNCTKILAPKPLRRLIGRLRRLNRSLSRKVKGSCNRRKAKTKLARLHARIGDIRTDALHQLTTRLVRSFRVVGIEDINVAGLLRNRHLSLAISDLGWGEFRRQLLYKAKMQGGAVVVADRWFPSSRICSSCSSRYKDLRFGVRRWTCAACKSEHDRDENAAQNLFHAASSAVSACGANGSGSTVKAG

SEQ ID NO: 33981 - protein, 417 aa, unknown
  TnpB Polypeptide
MNRTNTILLAPTETQEQELHALAEMSARLWNMANYERRQAYFTGRRVPTYEKQWRTFKDTDPFRQIGTCKGQALLLKLREAWGSFFALKKLASHGQLPPHVRRVSPPRYLKDRSTRRLKAEAVYVRNDGYRQQENMLVLSKHLRVPFKAGELWVGKQGRLELHYDRLRGKWYGHIPVKVQWPRRKTASTPHQLTRKHASIDLGICNLATCVVEDASTAYVYSGRAVLSDWRYWTKRIAETESILKKTNGRNSSKRLSGLYRTRKRRLDHAVKSMLRNLYEHLDAHGVTDLLVGDLKHIRDNTNHGRVGNQKLHNFWPFQQIRQRIHELSEEYGIRVHFKSERGTSKRCAICGRTHAKGRIHRGLYKCSETGRTINADVNGAYNILYGRKVAAVSGSRPLAWPLLLRWNTQNWWVSAA

SEQ ID NO: 33982 - protein, 377 aa, unknown
  TnpB Polypeptide
MKLIRSTKCGLRFSTEKKLRDLTTVLDEYGKVVNIFIQYFWLNPEKTSKGELLKPVVDIPETWLSARLRKVAAREAIDMINASKQRWKDKPLKLVMPVHKGKRMYVSCTIADLISTKNNGYKSEDSLRFDAWLHIASVGNKMIMDLPIKYHKHFNKYNNIGKRLNSYIITKDYVQFSFEIITAEKRSGTECIGVDTGINALASLNNGRQYGKDIKDCIERVKRCKQKSSGYYQAKRALKQRIDEVAKEIIITENPDLIVVEKLKNMGFKSKAKRLLAKNIRRSIGTWNWKYWLKRLEAQCELNRVSFRSVAPYYTSTTCPVCGHSDRGNRSGEVFSCLSCGHGDNADINAGKNILNRFLTGQYGARYKQENLVTNFL

SEQ ID NO: 33983 - protein, 382 aa, unknown
  TnpB Polypeptide
VILTYRYRLLPLKSQHRALERLCASQRELYNAALEERIDCYRKTGKTRTYMDQCKALTECRHELPDMGELPANLQRWTLKRMDDAFQGFFRRLKARNGKAGFPRFRGKGRWQAFGFAEFRGIRFDGKRLRFSGMPGGLKVHVHRELPEGADIRSCVFRQDASEWFVCLHIAVPTPQKRTIETVIGVDLGLSVFAYCSDDVEIPNPRIARRAEKELRRRQRVLSRCQRGSHRRHKVRAQVARVHRKITNTRNSWLHKESAGLIKRADLIVVEDLKVANMIRHPTLARSIADASWSRFVSMLDYKAEKAGRHLIRVNPRNTSQECSRCHKLVPKSLAVRTHECPFCGLVIHRDYNGSLNIRRAGIGAGALNVISSDERAPGNMC

SEQ ID NO: 33984 - protein, 417 aa, unknown
  TnpB Polypeptide
MDRTIIVQLKPSPEQAYSLKATLEQYTACFNTVCREGFTTGCSNGVELHKRTYYPLRAEYPDLPAQLVCSARVKATEAVKSALTWKIKKEKAYPQRVEKARKQGKPLPVFKPVRCPHSKLVCIRYDQRSYWVKWETLTCSVATVNGRVELPFTVPAHLRQYVGYKVCSADLCYRKGRFTLHIVVSLPEPAIVPTQEMIGVDLGLNRPAVTSNRHFLGEKRWKEQERRIFRLKRKLQAKGTRSAKRHLKKLSKKQFRLHRDHDHVLSKRIVQYATPGSTLVLENLTHIRETSQMGRGKQKKNVENKRRLHSWSFAQLYSFIEYKAQARGIAVVRIDPRHTSQTCSRCGYHHRANRRSQALFHCRSCGYQLNADLNAAYNIREKYLASLAQDGTPILSGPTCQAGSRVRPSGRDASPRL

SEQ ID NO: 33985 - protein, 373 aa, unknown
  TnpB Polypeptide
MRRSYVYKVKMPPSAERRAGRMLDLCRELYNAALEHRRHVYHRTGQSVSKYAQMAELKDVKKVRPEYADIDAQVLEGVLKRLGAAFDAFFRRVRQGGPAGYPRFKGRDRYRSIVFRQTGWKLDGRRLTLRGIGTLRLFLSRPIEGAIKNLTLRRDSCGDWFVSFSCDDVPAKALPETGATIGLDLGITNFIATSDGETIDNPRPFVAAEHRLAIAQRKRSKQERGGARYRQQSRHVAKLHRKVARIRRDFHFKTAVDLVRRYDVIAVEDLNVVGLARMRLSKHVNDAGWGQFIEILRAKAEEAGRTVVAVNPNGTSQACSGCGCEVRKRLGVRTHGCPDCGLVLDRDVNAARNILTRAGAPLTASRPASRAAA

SEQ ID NO: 33986 - protein, 348 aa, Okeania sp.
VKGSHGGQKIVVQLTLVPRWMPIPQLRDNPDYYSQKKDLLNTKDKFSEYKLIHSQVLQDCIKRVKLAFDRWFKADKSGNKLGKPRCHFSYQLSVISYQLSVFSYQLSVFSTSSCSFGIKNTEYSFFYPLKRGDFRPQFFGKIKGRYCSFTYPQIKFYCRSGNKINLPKIGNIKLIRHRLLPDGFQIKTVTISRKADGYYVTLSLEYKSVRALTTKVEPTLKNTLGIDMGLKEFLVTSEGESIPIPQYYRKYQQRLKTLQKRLSGKKKGSKRWLKAVKAVAKQHKKVADKRKDFQFKTANELLLKAEVIAHENLNIKGLAKTHLSKSINDAFGGQIPVYFDCQSRKCWR

SEQ ID NO: 33987 - protein, 395 aa, unknown
  TnpB Polypeptide
MFNATRIRIYPTDQQAQALAVQFGCARWAWNNALAESGNLYRTTGKGLNYPAMAIRLPKLKREFEWLGDADSQALQQSLQNLSRAYENFFQKRGKYPRFKSKHGRQSIQYPQRVKIEGSRIYLPKVGWVKCVVHREIIGKFKTVTVSRNACGQFHAAILTDDGEPLPAVAAEGKAIGIDVGLTHLAVTSDGSKFENPRHLRKAEKNLKRKQRKLSRKKKGSNSRNKARKLVARAHERVACARRDHLHKLSHRLVSENQVIAVEDLNVKGIMSNHCLAKATGDAGWSMLTGFIAYKAARAGKAFIKCDRWYPSSKTCSACGSICDKMPLDVRAWTCVHCGAHHDRDINAAMNIRDEGVRILAAGAVASASRGNVRPKPRRNPRSKADPVEARSSVL

SEQ ID NO: 33988 - protein, 395 aa, unknown; identical to SEQ ID NO: 33987
  TnpB Polypeptide

SEQ ID NO: 33989 - protein, 427 aa, unknown
  TnpB Polypeptide
MKQSKIKKIKETLKKTRERRKHQTPCVYQLKLQDLSTKDKELLDRLFIEAKWLYNYIIADIFTRLNNQSWKFQHVEIKTPNGLEKRIIKNLSSQMRRGIVERIFQNLKALKEAKNKGYKVGKLNFVSEVNSIPLPQYNNTYKIFREQNRIKIQKIKKTFRVLGLHQIPENAEIANAHLIRKPSGYYVYVTCFIPKEDNKPKFEIDKSIGVDFGIKNQLTLSNGVKIEWLVSDTKRLKRLHRELSRRKRRGKNYRKTQHKLRREYERISNIRKDIQNRVFSFLKCYNRVIIQDENIKGWYSGWFGKQVHSTGIGGITSRLKHGLETLILVDKFETTTKKCSNCGRLLNLRLGDRVIKCKCGLVIDRDQNAAINIIKSGLKGETTPLTNLPLDWREVTPVERKAAARILGKSPYIRVSCLAEAGSPSLQ

SEQ ID NO: 33990 - protein, 373 aa, Caldicellulosiruptor sp.
MCFKSKNLYNYANYIVRQEFINNGKWIRYGKLDKLLKSHETYKSLPAQTAQQTLRLLDRNWKSFLNAIKDWSKNQDKYSGRPKLPKYKKKDGRSIAIFTNQQCKIRDGFLTFPKTDLKLKTRIEGNLREVRIIPKGAVYVVEIVYQKEIDNTTKEPNRIAGIDLGLNNFVTLVNNIGKKPIVINGKVIKSINQYYNKRKAELMSYVGSRGISKRIQKLTLKRNNKIKNFMHKASRFIINWCKQHSIDTIVVGYNSEWKQEVELGKVNNQHFVGIPYYTFVKMLQYKCEEEGINFIITEESYTSGCSFLDDEMPCEENYNIRRRVKRGLFRSNRDILINADVNSAYNIVRKVFPEAFAEGIEGVGLHPVRLNLA

SEQ ID NO: 33991 - protein, 418 aa, Caldicellulosiruptor sp.
MDKTYILPVPNEYQVLARELSMQSGKIYSKAVSFFKKINRKGLRIKQKTFYRYMEWWIHQKGFILHSQSKQAAYQQAWTNYTATLRKIKKAKKKNKNTSKIRLPYRNKKYYKVCFKDSAIGLEGNSLILSNMKGAERIVIGSVRLGIKPKYAELLYHADKGRYYVHVVVEIAGRQKDRGQKGNVLAIDPGVIHPMVCFDGKKVAVYNGGVLNSILRYRNKKLSELQSKISGCQKGSKRWVKLQRAKIKLLRRLSNQIRDVLGKYTSHLIGYCVENGITTIVCGDVKGIRNSKEKKGKVVNQKVHQWLFRKISRMIEQKAEFADIKVVYVKENMTSQTCPVCGSKNKPQDRNYECKSCGFRYHRDGIGAINIYSKYTGSSLVVGRLACPVGVRYKAHLRCPVEWNIHPWNKSHSTGKVA

SEQ ID NO: 33992 - protein, 253 aa, Caldicellulosiruptor sp.
VDFEKGLLYLPKIKSGIKAEFHRRFEGRIKSATVVKTKAGMYYVSILVDVDDPRNKVKEPQNFICGIDLGLKSFATVVNDKKCLKIEYPRYLIKAEKKLKRLQRQLARKEKGSKNWEKARERLAKEHEYVKNAREDFLHKLSKAIIDEIQVVVVESLNVNGLSRTKLSKHVLDSSFAKFIDFLEYKAEWYGREIIEADMTFSSSKMCSKCGHIYKELELKDRVWRCPECGEVHDRDENAGKNLRDYGYRCIKR

SEQ ID NO: 33993 - protein, 381 aa, Caldicellulosiruptor sp.
VVTVQAKLIFESFEDRQKVLELMRRWSSCMRFAYKRLLEGYDRNSLKRELQGIFDLNSRYVDDAIMKAKAVLESCKQRGEDPRKAIFGGRELFEKLKKRHINGKPYRKLKIEWQEKRKGNLYSRGDRSKKGNLNTRIVANERGTFLRINVGDRKYVFARLSAGYKKDKNREEILQEIAILEVPYSVELKLKNGKIYAYFSAEELFPATEITRENGAIGIDKNAYPNHMAWVEVDRSGQFISHGKIPMPELESGNHDKREYYRWQYAHEIVKMAKEKRKAIVIERLDIKDKGRRGDFSGRKSRRIRHFFSYRSLLEKVKILAKREGIEVIEVSPAYTSIIGMIKFAPQFMINKQRHCKRICDSKKRTWGKREGTCKLYGAFK

SEQ ID NO: 33994 - protein, 203 aa, unknown
  TnpB Polypeptide
VEIIGGIRLKIIGWDRRYDQYENGEARLVYREGKMMLWISRKIPRPEPYQPRDVIAIDINERRIVYGDDKINKEIGTGIDRAYRWKLLAESLQKKYSSPRYPAWRRRRGILNRIRSYHRKARNILEDWARKTSLEIVGLALRLQYAVTREDLTGLINSLRRIESKDHRTRLTIMGYSRLGKWIDWQAMKRGSPLAIVDPRGTS

SEQ ID NO: 33995 - protein, 397 aa, unknown
  TnpB Polypeptide
MKINKSYKFRLYPNKEQKIFINKSIGSCRFVYNYFLDYKTKYYIEHKTEKKKNISFIETEHQLKLLKEKKELEWLNEINSQSLQFSLRNLDSAYSRFYKKVSGFPTFKKKRNGGSFTVPQFFQIVEERNKFSFIKIPKLKQLLKFRASRIMEGKLLYCTVSKTSTDMYFISFTTEQEVPEKENKKKKAIGVDLGIKTLAVTSNNEVFKTNNKFKVKEKKLKKIQRKHSKAKKGGTNRNKLRKKLAVQYEKIKNSRNDYLHKISNYIVENQDIIITEDLNIKGMMQNHCLAKAISNQSFYEFTRQLEYKATWNNKIFYQINRWYPSSQICNHCGYQNKQLKLSDRIWICPNCHKEIDRDFNAACNIRDLGLSDLSIVGATKSYASGRTKVTERIISFQ

SEQ ID NO: 33996 - protein, 342 aa, Actinomadura sp.
MSRYRLCPTPAQEAGLLEHCSHARSVWNLAVEQQAWWTPRRGPAPGYAAQARQLTAARAAFGWLAAGSQTVQQQTLKDFAQAMANFFAGTHRRPTWRKAGVHEGFRIVGARGRAWDVRRLSRRIGGVRVPKVGWVRFRWSRPVPPGVKSFRVTRDRTGRWHVALRRGSNRRARVKAAVARLKAREADRRKDWVEKTSTDLARRFDVIAVEDLNIAAMTRSARGTVDAPGTGVRAKAALNRGILANGWGQLVTRLEHKAPGRLVRVDPAYTSQTCNACGHRAPDNRESQAVFRCVACGHRANADINAARNIKDTAVGRTVAARGGWALARPANREPQPTLLSP

SEQ ID NO: 33997 - protein, 329 aa, unknown
  TnpB Polypeptide
MPRLFTRTLRLKVRRETYAWLDAAAVEVNEVFNYCNETSLKAATRTDTKRKWLSGFDLCALTSGASPYFDKIGADTIQSICTHYAQKRQAARRLKLRWRVSRGARRSLGWIPFKAASLKHKGVCLPVRTEAEESVAPYEAVGIDLGLKDIAVTSDGGRLAAARWTFRFAHKLASAQRRGHKRQAKRIHRKAARCRADALHKFSRTIVDRYQNIVVGGVSSSKLVQTRMAKSVLDSGWGMLKGFLEYKSQQAARGFEVVSERNTSVTCSSCGALSGPRGVNGLTVRSWVCGDCGESRTSIRGNEPSSWVIPPSRVYRVREAGKESARAAA

SEQ ID NO: 33998 - protein, 440 aa, unknown
  TnpB Polypeptide
MTVSLIGSPRRTSEEARLDKNRRIRESIKATKAKRKTQTCSTFDLKIVGNKLSHTQREALVRVFLEAKWLWNECIASGDPLSYKPRKNVLVKTKDGMMDEREYRTLGSQMKQSLVKTIRSNIKTLATLKKQGRKVGNVGFTNEVRSLGLPQPETTYRIRGQKARIQNIPGWVRVRGVKQLEGWEQAKAVLTSEADGWHLHVTCYMDKEEYNKRREAKKLAPVKNTVIGLDMGVETAITCSDGTEYDVMVGETDRLKREQRKLNRKKKGSNNRRRNRMRIRLAYMRQQNRLNDAANKITAELLRNEIVFMQDEQVKAWQRRYGRKTQHSVLGRVKNRLARHTSQVVTLSKWEPTTQLCPTCGKKTKIPLKQRTYKCAYCGYKAPRDVKAAQTMVWMGQSKYSDKIPSEQGEYKPVENASESYADNLRMFSMRSAKQETVTA

SEQ ID NO: 33999 - protein, 444 aa, unknown
  TnpB Polypeptide
VEYTRTLKVPVHYLTTRKKVSYLDNLTARLTYAVRLFCERISEEGRIPESRGDIRKYSPWVQEKTDLSAGFIQQAEDKALWMCSSYKKQHQKWEWMLSKAKVGGKWYRRLLKREPSLPCGSKRSKLRKIPVRFDCRTGQVQRVNLVSTKWVIHISTLKKGETIDVLLNPSEYHKRLLKEGEIRDFEIVKRNGRYYVHITCIFEVQTQLVKRFVGVDLGMCRNVSTVSINPADALPRDFHILKDGKRRRLQELNDRISHLRRLEKWEPLKRLRNKRRNVAEDCDWRLAKTVAESCTNSYVFLGDPEYIRYHNYRGNGDRTGRKLLQNWSFDRQIRCTQHQCAKLGIPSEALNEWGTSNRCHGCGAKVERPKQSRIICHECGLQDDADRNSPINIAWKGISRLGVKPLASHKALNRAGAPDERARTTDDSALEPPMSVEATHFNGW

SEQ ID NO: 34000 - protein, 645 aa, unknown
  TnpB Polypeptide
MEKEKKKNLLLSQKQVCFLDCHTKHFVNLVIARKYAAIKHLPGIEDLINSIWKKCAILILLVTKFQKMKNAIIFTLASLPKSNWMIFLDKLNTFKPEDPNTLHILLFQTLLQELISTEKDFKPFWTPVYTELSERLLLPIEIDFADSDLTSSKLLSKKVEESLPFLTMKKINLQNRNLQKTYYQLSTSTAVDKWAKEAIKPSNKLKALKIKMKPSIVQRRIIDEWINTSNYVYNNTIECINQGDSIDHFKLRDKLVTENTKKNNPEYKNYSSQLELLCKEKKPLYESLKSHNKNSTSYNEINAQIEKLKCDIEEKKKTRKEITAALKSEKNNYVHEWECNTPKCVRDGAVSDVCKAYKTGFSNLKAGNIKHFKMKYKKKTNPIKSVVIPKNLVKNKHGNIHLASQFFKENAIFKMGKRTIKKYKNLVIENDTRIVKQKNEYFIIIPIKINDTPKTSPVNYCGIDPGVRTFMTTFGNNDCIEYHHNELVLKKLNQKIKNLKELRTLKVRKRIAKKSINKIEKRKSNLIDELHWKVIADLLKRHDVIFYGDIKSHDIVKNKHNHTLNRNINDLKFYKFKERLLFKAIEKNKKIVLVNEAYTSQTCSCCGAMYKPGCSKVYECKKCNKHMDRDVNASKNILMKGIMKL

SEQ ID NO: 34001 - protein, 418 aa, unknown
  TnpB Polypeptide
MRRGYKYRITPTSEQSQAIARNVGCARFVYNALLDDYKQQLDNGLKPVMKEVSELKVDNTFLKDADSLALANAKQNLRKALDNFFKSRSGKRKGKRVKFPKRHKKHKCKWRYTTNNLNGTVSVRDGLLRLPKIGWVNIELHRPIDGEIKSCTVEMTRDGQFYASISVDLPDTHTSKDLPSYGDLRVVGIDMSLSQFAVDSDCTADDTKPKYVRLYRKNEKRRRRLAKTVSRKELKSSNRDKARKRLAKLDRHIANSRKDFAHKMSRHYADNYDVVVLEDIDLQSMSRTLRLGKSVTDLGFGEFKAYLAYKCKETDCAILYADKWFASSKTCHECGGKNDNLTLSDRRWTCLHCGAELDRDGNASENLRGYFYRVVTEETYSTAGTAGIHASGDAASTLRFVLEQAASLNEEAPSFRWG

SEQ ID NO: 34002 - protein, 425 aa, unknown
  TnpB Polypeptide
MATVIQAYRFALDPTPRQRRALASHCGAARVVYNWGLGLVEARLQQRRAGEEVEVPWTLPALRREWNRVKGEVAPWWAENSKEAYSSGLDGLARALKNWADSRAGRHKGRPVRFPRRKRKGRCRDACRFTTGAIKVLPDRQHVQLPRIGILKSHESTRKLARRLEQGSARILAATITRTADRWYVSFTVEVQRAIPQGNGHDTVIGVDVGVRHLATLSTEATVPNPRALQRSLRKLRRLNRQLARRKLGSKRRRITRDKLARVHARAANLRRDALHKLTTTLAIDYGTIVIEELNLAGMVRNRHLARALSDVGLAELRRQLTYKTGWYGSRLVVADRFYPSSKTCSACGWVKAKLTLAERTFTCEACGLRLDRDLNAARNLATLAQHVAQSGWETQNSRGADRKTQPAGQVAVKREPSSPLLQRA

SEQ ID NO: 34003 - protein, 367 aa, Chloroflexi sp.
VIRTHIFACNIDRKLADSLNRESGRIYTQVMVEQWRTFRHAGHWISPRGVEKLADFYDKQAGQKPLLHAHSVDAAQQGFPKACKTAKACKNIGLNSSYPHKRKPYRSTIWKNTGISKTEDEKLQLALARGQSPIFIELPPNLKNLVKECYVEMRLVYNKNHKFYQWHVVVDDGMDSKVASGTNVIGIDLGEIHPVAATDGETSVVFSARALRSVNQYSNKWLASFQSKISKKKKGSQSYKRMMARKRKFLAKQARRRKDIEQKVSRAVVDYAVERNCNEIAIGDVRKVANKCKLGKKSNQKVSNWSHGKIRTMIEYKANAEGISVTMVKEHYTSQTCPNLDCQHKYKPSGRTYRCPVCGFVGLSHLR

SEQ ID NO: 34004 - protein, 398 aa, Planktothrix sp.
MLTALKVRLYPNKKQQIALAKNFGCCRFVWNFYLNKTNTQYQEIGKGLNYCDMAKDLTQLKKHENFLWLKEASSSALQQSLKNLETAFKNFFEHRAGFPKFKSKHKKQSLRYPAGCSIKKHGVQLPKLGIVKAVISKELMGEIKSVTVSKDSTDKYFAAILLEVEDVPTIKEGKISGVDLGLNSLVTVFDGETTYKVDPIKPTRKYAKRLRRRQQSLFRKKLGSNNRKKQVKRVAKVHHKIANTRQDFLHKISRKLVDENQVIVVEDLCVKGVARTKLAKSVLDAGFGMLVNFLASKLKRVGGILVEVDRLFPSTKLCNCCKFKNDSLTLNDREWVCPKCETHHDRDENAARNLREEGIRILSTNTDGQSEFQACGEDVSLVSNSAKKLSSMKQESPR

SEQ ID NO: 34005 - protein, 434 aa, Thermococcus sp.
MKRTVTVKLQPSKEQEKALFQLADLGAKAWNRVNYLRKQQFFQGQIVDFNKTEKTVYEEFKREIGSATVQQIARKNAEAWRSFFSLLRKKRNGELSSWLKPRPPNYLKEDRKRKLLIVLRNDQFKIEGNKLILKGLGKFKRLEVQFKGRIHLKGEQGRLEITYDPVRRKWYAHLSLTVEEKLEDKEWIKLPRTPKGSLSAGIDLGVNNLMAVYVENGESFLVNGRPLKSIDFYWRRKIAEYQSKLNKSGAKTGRKLKRMHDKAKLQAKHYINTVVRQTVRRLYDLGVSKIVVGYPKGIARNSDKGKKQNFILSHVWRFNYVIKRLTEVAEEYGIVVEVVGEAFTSQTCPVCEKPHEGARFVRGLFKCPATGLVFNADLVGAFNILRKVAKTITPSLPSLSAGRGNWPKTGPEGFKEPFSRVALMRTPQTSPPLG

SEQ ID NO: 34006 - protein, 443 aa, Eubacterium sp.
MNSLRRTEELKMKAGYAITTYKIQLNYKHLDWFKQTQSLFDAVLAFYYKLLEKQPEILELSNQNLLRHLELQTIKQRDGTKPEIPLPFEKIPLYFRRAAINAAISMYRSYMGKLKTWAEKQIKNEKPSPPKRLHMSMLYYKGMYKNFDEKSILLKLYTGKAWVWAKHHYTGRPFPENAELMSPTVVIKKKKVMLHIPVKEIVEDGRTAKERVKQHESFVAVALTTSDSLAVCTTIQADGRASCPYFIKGGKELAHRRKQLLGYTKRGIAGNKAPRLMTQPVGNAAPSVPQEHRPNAKYYEKITRVTDHYAHEVSRKIVDYAVRQGAKLIVMPGYSNSFAKGTLPYLKTNVMDFIGRRIIRYTSYKAWQAGIVVTFNSVGNAKKECYHCGSVIYKYNTEYQPPSQNFYGGKNFRCKEGHKGSTALNTARNIGKSFYETFYEKVG

SEQ ID NO: 34007 - protein, 505 aa, Bifidobacterium sp.
MECSVVHGGGESSLGCLLVFGYSVVVVIDDGCGEALVGIGEEALKARNLKIKESRRATRERRKGQATGVVTLKVDRVKLTDAQVEAVEGQFREARWVYNEAVSSGDVFKYKPGRTVMVRLPDGSMERRDVRFLSAQEAQSIVELARNAVRGLAVMKSHGRRVGALKHVREVNAIPLKQYGNTYELRDPGDSHADGSYPYVHVLKVPGLMHVTGAGQLAAWDEVGPATLIRKGLGDYRLAVTVFMDKDRREAEREARRAAWEDAAPVLYRVGGVDAGLENAITESDGTRSGRIGIPEPAKLGHWQARLAKHKDAKGADGRGHSRSWWEAKERVDAIYDEVARARDARALEEYQRLTVKYSILFVQDEQIAPWARRDGFVRGGRTIQKGIIGRLWALFRHEANEAARLGRPSRVIVIDRCQPTTSWCRRCGRRTKHRPGLRVFHCAWCGFEEDRDVHAARNMVVLGLYPVTMEELRGDRSVPIGVYADLDTPEGAELRGVLDQLGWE

SEQ ID NO: 34008 - protein, 428 aa, unknown
  TnpB Polypeptide
MEQMTHDQTLVKTLDFQLNIQSDNEGLLEDATLESRWAYNETIRLAKQGVDWDAIPDCVADDADLVKNTTQRVVAKALGAMENYHEYDDFGLPSHTKDGAYPLRANYEEGYNLTLRDDGTVEFRISAKPYKHVKGVLEGDDTHLDILRTALSGDEWTIGTAEALFYDGTPELHVSVTKTERTVRDKQDSRTIIGVDVNEDNVALSALSAECVEDTLVIDFPEIKFERHRYFTMRKRVQKAEKPSMHDTLEGREERFVRDRLHKVSRHIVEWSRQFEKPCIVFEDLKEMRDSIDYGTRMNRRLHHLPFRALQYYTSYKAAFEGVPTAWIDPEYTSQQCPMCGHTERANRNKKRFKCRWCQHQDHADRSASVNIAVKGIEKQQDWNVPALNSLPQVRKVRRQASGAVDAPTVTSDTARGHHPDGIRGVSD

SEQ ID NO: 34009 - protein, 391 aa, Cupriavidus sp.
METVKTLKLRIKDKHAKAMLAMARDVNMVWNFCNETQYRSLKRYCKRPKVWLSGFDLQKLTNGFSKCDGVLIGSATQQQVCEEFATRLKQYKRQKLNWRVSNRNSPKYSLGWIPFKARALTYKGGQIRFNGINIGLWDSYGLSKYELRAGSFNEDSRGRWYLNVVVKFDADEKCVPDGTTSLGVDLGLKTLATYSDGEKFEPKKFYRLSEQALGIAQRARKKRRVKAIHAKIANQRKDAIHKETSALVKKHAAIFVGSVNAKALAKTSMAKSVHDAAWTMFRTALKYKAIRQCVVFAEVNEAFSSQTCSCCVAGFAGVDPFPRLDKAYRDIPMTLLAPTPHPGEKTGRKVSLATLTGTAVDRSALPEAQSPRQATRQPGAIAFALAAFNPQ

SEQ ID NO: 34010 - protein, 444 aa, Cupriavidus sp.
MLLSHTIELVTSQREVDYFVRAAGCARFVWNWALAEWNRQRAAGGKPSAMALKKSFNTIKYQQYPWMTGIHRDAHAQPFANLSKAWSKFFSDIKSGKKAYAPRFKKKGQCKDGFYVANDKLRFDGQSVVLPLIGRVAMREALRFPGRVMGAAVSRRADRWFISVQVEVADDVAFVPRTANGVVGVDLGIKSAVTLSTGETFEGPKPLKAALRRLQIRSRRLSRKVEMAKPGRAAFSREFIGPLRPNTKPQPARSSGQIDSAARLARLHARVANIRQDFLHKATTRLCRENQAIGLEDLNVAGMLKNERLARSLSDMGLGAFRRQMEYKAKRYGTHLVFADRWFPSSKLMSCCGHKLDRLALSERRVVCPACGMSHDRDHNAAINLERLATETALPVASDSATNCTARGMSPIAGGKVTSVRDEVGQQGTSGREENGAHICARFS

SEQ ID NO: 34011 - protein, 391 aa, Cupriavidus sp.
MPKKKPDPTISTRVLRLRLKDKHTAVLREKAYWVNQVWNYCNEISGKVFQRERRFIGSYEIDTYTAGASKAGIPLHSQTIQAISAEFVTRRAQARKVKLRWRVSSGSRKNLGWVPFKASALRYRNGQIFLSGIDKPLSLWDSYGLSKYALGVGNLSEDSRGRWYLNVTVKVKKAERSEGQTAVGIDLGLKDFAATSAGVTIDAPRFYRKHEEKLAVAQRANDKARVRALHAKIRNCRKDFLHKTSTALVRSHGAIFVGNVNASELAQTRMAKSVLDAGWSAFRTMLQYKSDDAGVWFEEVDESYSTQDCSCCAKRTGPKGKEGLAVRAWSCPVCGTEHSRDVNAAKNILRRGLSNLVQQNKAAHCSAAGNRSPRGEGRVGRDPLERGIPVL

SEQ ID NO: 34012 - protein, 496 aa, unknown
  TnpB Polypeptide
MRGLVHEDKKMTSNNRFPSCEKSSRITKSLKISAEVFPSNEKDLTPYWNESCLEMSKKLLSRTKTGCAGSDLISSNPLQVTTTRGSWFSTIHGSALKKSLFKTCFPLSTASPVDFTDSESMVIRSRKIRLYPKPESVNRLRQYLGLSRYWFNKSVEYLKQSGTKAYMPEVRQVQKQPHPVWAMDCPQRIREHAMSEACNAVKNAKKKCFNGQGFHCVDFRSKKDLRQHFGFDQQSLSDHFLFRKKKDKVSFSLKEDIPNDALEGTSVLREGSQWYLVVPRRVSIKVPDNQRNGVVAIDPGIRTFITYFAENCFGKVGNGDFKRIYRLCLSLDRLTSKVSKARCRQKRRMKKACERIRHRIKNLVDDLHKKTAYFLVTRFDTILLPTFETQQMLSKLRSKTARSMLSWAHYRFKSFLKAKAEEYSAKVVDVDEAYTSKTCSYCGRIRNIGSRTVFRCECGIVVDRDYNGGRGIYLRSLAATPSLSELTGQSVSVNGC

SEQ ID NO: 34013 - protein, 892 aa, Escherichia sp.
  misc_feature (318)..(318): Xaa can be any naturally occurring amino acid
  misc_feature (523)..(523): Xaa can be any naturally occurring amino acid
VKRLQAFKFQLRPGGQQEREMRRFAGACRFVFNRALARQNENHEAGNKYIPYGKMASWLVEWKNATETQWLKDSPSQPLQQSLKDLERAYKNFFQKRAAFPRFKKRGQNDAFRYPQGVKLDQENSRIFLPKLGWMRYRNSRQVTGVVKNVTVSQSCGKWYISIQTENEVSTPVHPSASMVGLDAGVAKLATLSDGTVFEPVNSFQKNQKKLARLQRQLSRKVKFSNNWQKQKRKIQRLHSCIANIRRDYLHKVTTTVSKNHAMIVIEDLKVSNMSKSAAGTVSQPGRNVRAKSGLNRSILDQGWYEMRRQLEYKQLWXNKYIPYGKMASWLVEWKNATETQWLKDSPSQPLQQSLKDLERAYKNFFQNRAAFPRFKKRGQNDAFRYPQGVKLDQENSRIFLPKLGWMRYRNSRQVTGVVKNVTVSQSCGKWYISIQTESEVSTPVHPSASMVGLDAGVAKLATLSDGTVFEPVNSFQKNQKKLARLQRQLSRRVKFSNNWQKQKRKIQRLHSRIANIRRDYLXFVFNRALARQNENHEAGNKYIPYGKMASWLVEWKNATETQWLKDSPSQPLQQSLKDLERAYKNFFQKRAAFPRFKKRGQNDAFRYPQGVKLDQENSRIFLPKLGWMRYRNSRQVTGVVKNVTVSQSCGKWYISIQTENEVSTPVHPSASMVGLDAGVAKLATLSDGTVFEPVNSFQKNQKKLARLQRQLSRKVKFSNNWQKQKRKIQRLHSCIANIRRDYLHKVTTTVSKNHAMIVIEDLKVSNMSKSAAGTVSQPGRNVRAKSGLNRSILDQGWYEMRRQLEYKQLWRGGQVLAVPPAYTSQRCACCGHTAKENRLSQSKFRCQACGYTANADVNGARNILAAGHAVLACGEMVQSGRSLKQEPPEMI

SEQ ID NO: 34014 - protein, 420 aa, unknown
  TnpB Polypeptide
VSAYEAVRVALDPTPRQTRLLCSHAGAARFAYNAGLAHVKDMLENGESPEWSHYALRRWWNANKDTLAVNPDTGVVWWSQNSKEAYSMALWGLAQGLSNWYKSRKGQRKGRRVGFPRFKSKNTAMRFAYSTGFTAPTASDPYGFKLPRIGRVHCMENVYKRVNGARLVRVSVSCRAGRWYASLTVEREQLSSPVHVRKRGAVGVDLGIKHLATLSDGTVIPNPRALDARLKALRKAQQALSRKTMGSVRRRKAKERVARLHARVTDMRMDAINKATTMIARTYSVVCIEDLNVAGMVKNHHLARRLSDASLGEFRRQLEYKTMHTGASLRVVDRWYPSSKTCSNCGTVKAKLSLSERVFCCNVCGLSMDRDLNAAINIMVAGSAPETVNARGGDTRRADTPCRATQASVKREPSSRQKVT

SEQ ID NO: 34015 - protein, 391 aa, Meiothermus sp.
MQTLTLRCTLKPTPEQAAALEATVRLFAEGCNHALRVAKEHGEFRRFKLHRLVYRDLRAMGLSANLAVQAIARVGKKKGSRAKFYQPTSCAFDQRTLSLRGEAVSLTTVAGRMLIPMKLGNYQRGMLKRAKSVQGGVLTKGPRGKWYIHLSLRVETPTLPPGGGRVVGVDLGQKALATLSTGVQFSGGSLKGKRLHYRAKRAEVRSKLDRPSERTRGVQRLWERLTGREARFVNHTLHTLTKRIVDSLDPGDTLAVEDLNGLRGRTTRRGKEARHLHHLWPYARFRSLLEYKAALRGVRVVAVDPRHTSQECPRCGHTARENRKSQALFRCTACGFQHNADWVAAHNIALRAGPQGIVAQRAGSMGMGRCKPARILRVSSLHRLLSESPRL

SEQ ID NO: 34016 - protein, 400 aa, Meiothermus sp.
MAVHRKVYRFRMEPTQAQAEALLRMAGARRFVWNWGLARRKEAYAATGKGLTYNQQAAELTALKKRPEMAWLKEADSQMLQQALKDLDNAFKAFFERRAGFPQFKSKKRDRPSFRIPQRVRVEEGKVYLPKVGWVKIRQSQPIDCAIKGATFKRDTQGHWYVTLTAEFTMPDIPLPPANPERVVGIDLGLKDFAVLSDGTRIAPPKFYRKAERKLRRAQRELSRKQKGSKNREKARHRLNRVHAKVRNQRQDWLHKLTTGLVQKYDGLCIENLNLKGMAKTKLSKSVLDAAPGEFRRQLEYKAVWYRKHLVVIDRYFPSSKLCRECGTIHTALTLSDRVWTCGCGAVHDRDLNAALNIRAEGIRAIPVAVGHTETQNAWGVSVRPAHGRQETTNQESHVL

SEQ ID NO: 34017 - protein, 416 aa, unknown
  TnpB Polypeptide
MIPQEGAAQNRWPTIQRAYKTKLVVNNREANYFRGCAGLARFVYNWGLIEAKLWYEETGKTPSPRNVLKKEFNAIKGAWFPWTADYPYAILQSAFDDLDAAFKNFFRRVKAGDPEPGYPRFKARGRDMSFRFVGGGIRVEEARVKLPRIGWVRLAERGYLPVGVDVNSATISYRAGHWCISIQVEEPAPEPVDLRPVTLGVELGVRLAAVVTEATRDGTLGNATIYDNPRVLDKHAKKLSRLQRELSRRQKGGANWRKTQAKIAKLHARITDTRNHAQHNVSAAIVRRRPERIVVAGHNVAEMMKRPEPVQAEDGHYERNDAERTRPLRRKMADAGMGELRRQIGYKAGWVGIQVEEPEAYYPATRTCSACGTVNAELPLSETILHCAGCGAALDRDVNASRNLARLAIANPPDSE

SEQ ID NO: 34018 - protein, 420 aa, unknown
  TnpB Polypeptide
VESRRTAVIKLDTPEGANEYLRETVEQFNYCANTASEWCWHGDDGYHVTSKAKAEDALYGQLREDTELTANLVQKGIRQAVEAIKSGVERLKNGQDTSRPTFTADTAVYDKRSATFHRDHVSLSTVDGRIECDYILPKDDDTPPTKYVANENYEFRRATLHRRDGDWYLHASMLKEDDTDTTTGHRTVLGVDLGVNQLAVASTGRFWSADEFNHWKREYEKRRGDLQQCGTRAAHDAIAGVERKEDGRFEIFLHRVANEIVAEAVEHDCSHIVFEDLTDIRENVPQASWHHLWAFRRLYEYVEYKAEEHGVEAVQVDPRNTSKRCSTCGFTHDDNRHGEDFECLDCGYQNHADYNASKNIGLQYLRRPQKSSISGVRTRRSASRQRRQNADVGGAPVDVRLNRGTLNVSGEYDLPAPSEA

SEQ ID NO: 34019 - protein, 415 aa, Nostoc sp.
MLVFEAKLEGEDGQYQALDEAIRTARFVRNASLRYWMDNKGIGRYDLSKFCAVLAANIEFPWVAKLNSMARQASAERAWSAIARFFDNCKKNKPEKKGFPKFKKEQTHGSVEYKTCGWRLSDDRRYITFSDGFKAGTFKLWGTRDLHFYQLKQFKRVRVVRRADGYYCQFCIDHERIERREPTGKTIGIDVGLNHFYTDSNGETIANPRHLRKSEKSLKRLQRRMSKTKKGSNNRIKFRNKLARKYLKVSRQRKDFAVKTARCVVKSNDLVAYEDLQVRNMVKNHRLAKSISDISWSLFREWVEYFGKVFGVVTVAVPPHYTSQNCSNCGEVVKKTLSTRTHVCPKCGHIQDRDWNAARNILEKGLSTAGHVGTNASGETDQYLSEEIPSSKSTRGKRKPKERSLESPAISGTPD

SEQ ID NO: 34020 - protein, 403 aa, unknown
  TnpB Polypeptide
MLIAKKIRLEVSAQDAATLEWMQGKCRALYNWWVMRLRNGEKWPGWEAAKKTLQESKAYDPELCFVYGKLLHEVYFRLHEAMKAFFRRVKQGQKPGFPRVRPRHCFFTLIYPATYIRVEGRHITLPTGGGGKHGPKRYPDVVATLTEEAPTGYRDVAISRDGQGHYYASFVHEVKEETHEQQGVVALDLGMKTLAVGVNEQGRFYHIGGFTGHRWYNKQLDKLRFKRSKCKKKSRRYLHLSKVYKRVSQKKRNKQQDCLHKASHLIAHTLVESTVVIGDLSQRQMVTKEHKERNKHRNRAVYNEWGVYGFVQMLRYKCFLYGKELVILDERDTSKTCSRCGHTQAMPLWKRTYRCKNEACRLAMDRDENSAINILKRYFAWLGPHRERISLRCADVFAATDMC

SEQ ID NO: 34021 - protein, 477 aa, unknown
  TnpB Polypeptide
LSHSHNQCDIIVNIPGRRELVMTKQDTVRYIVHTKGINHKTARCIRKTQRIYHDALVFIIGVCVDHWDEIKNLAQLAAKTKVERMIHATKKNTTPDYPDFDKKFPKFPTYLRRDAIARAIGYVSSFQTNSAHYDEIRRLRMSNGMRPQKKHAPSFNDDPFIAPSFYKDNMYVPNADGSLSVKLWDGKDWAYHRIQLRSKDAHYISKKAQDGWEMASPSLIRHFGNWVFAFVMRRKQTVLLKDTKVIVGVDLGIGNDAVCSAMLTNGTVIARRFIRLASEKDRLEHLRNRRKGIRSVSGRYASTSHISTKILGISENIACQTAHQIAAFAKEVNADVVVFEHLSENFSGSEMLAHWRNREVFHKACGMLHRMGIRYATVNPWHTSKLAFDGSGMVKRGHDVSPDTPYDVCRFTTGKIYNCDLNASYNIGARYLMRLLESNLGRGWSHVMAKVPDAAKRTKITLATYLDAFAVSRAVVV

SEQ ID NO: 34022 - protein, 441 aa, Moorea sp.
VEPLWLVGYAKRVKTVVNWLHYSYGNFKKLVIILEFKAKGKKHQYSAIDEAIRTVQFIRNSCLRYWIDNKGVNKFDLNKYSAVLAKNFPFANELNSTARQSSAERAWSSIVRFFDNCKKKVPGKKGFPRFQKNCRSVEYKQSGWKLSPDKKSISFSDKKGIGKLKLKGTWDLWRFDKKQIKRVRIVRRADGYYVQFCVSVNVSEDLKPSDANIGLDVGLKDFYTDSRGDTEALPKFYRTGEKRLKFHQRRVSRKKKGKAVGHATRTANRKKAINRLGRTHLRISRQREEHAKRLARCVIRSNDLVAYEDLRIRNLVKNHCLAKSINDAGWYQFRKWLEHFGTKFGRVTVAVNPAYTSQNCSNCGEVVKKSLSTRTHTCKCGCQLDRDHNAAINILQRALGTVGHTGTRILDLNACGDPTSTLPDSGLVEQVGSLKQESPRL

SEQ ID NO: 34023 - protein, 382 aa, unknown
  TnpB Polypeptide
MSYRAYRYRFYPTPEQLVNLNQTFGCVRYIYNRALRYRQDAWYARQENISYPQSSALLTEWKKEPEHVWLNDVSSVPLQQSLRHLQTAYRNFFQGRAKYPNFKKKDGCQSAEYTTSAFKWDGESLKLAKQSEPLKMRWSRRFAGKPTTVTVSRDPAGRYFVSLLVEVEIPRLPVVNAVVGIDVGLKDVVITSDGEASGNPRHTAQYAARLAKYQRRMARKQQGSNNRRKAKLKVARIHARIADCRRDFTHKLTTTLINENQVICVENLAVKTMVKNPTLAKSISDANWGELVRQLEYKAAWYGRTVVAIDRWYPSSKRCSCCGYTLDKLDLSTRQWTCPECNATHDRDVNAARNIKAAGLAVLACGETVNPVSAKVGIGSTR

SEQ ID NO: 34024 - protein, 370 aa, Dolichospermum sp.
MIIYEFKVKGKDRQYRAIDEAIRASQFIQNKCLRYWMDNKGATKYDLNKYCAILASEFSFADELNSMARQSAAERSWSAIARFYDNCKKKVKGKKAENAVLGFAQVERFSKTGFPKFKKNCRSVEYKVSGWKLSETRKAITFSDKKGIGTLKLKGTYDLNFYDIKQIKRVRLVRRADGYYAQFAIDVKIRIESQPTNQIVGLDVGLKYFIADSKGNVEPAPQFYRKSEKQLSRANRQKSKKFDRDKKKAKQPQSKNYLKAKNRYARKHLRVSRQRKEYCKRLAYSVIQSNDLVAYEDLNIKGMVRNRHLAKSISDAGWATFRQWLEYFGYKYGKVTVAVPPHNTSQNCANCGQKVKKSLSTSNTLVKLRG

SEQ ID NO: 34025 - protein, 741 aa, Streptomyces sp.
LRVLADPFTVAPPAGARIRDRLRLSPADEKVLTLLGGQLGHHARADLAERVRIGRVPVKDNRRAERKRVLTKVSSSRWAGAITRACEDQYQLSLRCLFDERASLRRATAKIGQRLAVPCGRRVGGVRGYPNQAERAQKQCRLQVLTARLAEVESRIEAGHPAIVVGGRRLAKVRHNLADAGLTGPGWRERWDAARMFLTADGESGAPYGNYTISVDPADGTVTIVLPEPLRHLANAPRGRYRLTCTITFNHRREEWLDRLIANRAVRYDITYDPERGRWYLDASWSTEKTVPPTPVELAATGVRLLAVDLNAGHLAVCVVDAPGNPVGEPITVPTDLAGPASKRDGRLRAAITELIALAKGNGCAGIAIENLGFDDARATGRETMGRGNRGKTFRRTVAGLPTARFRERLCGMAHHAGLVVVAVDPAYTSRWGGQHWKQPLQQQSKTTVVTGHHAAATAIGRRALGHGIRRRPGVTAHDQRIVARRVAGQTVPAPRARGTTSPPRTTGTPHRGTKTCRDRSDQLVLFPVSKTVRETPGARRPTSGQVHGDSANTGQQPQERFVGESEVGDLYAFLPVELRVLDEVVRIGLAPCGPQLAAVVLASVGLHEGRGAPGVGEEPCDAVGLGLFGEPDLATVPAVPDVLRRGVRSAGIGRQDRRHVVVDPVGRRPDAQAQDRKARALVLTEQQVEHLALLGRAESAGAVQQVGPLEGLREAESVYGLERGAEVDVVSRRGGHGLRC

SEQ ID NO: 34026 - protein, 408 aa, Fusobacterium sp.
MVLVEKHIIKPKHKYYDEIDNLCWLSKNLYNSTLYNVRQYYFENKKLLKYQIINKMYVDTNNEDYRALPAKIAKHTQMLVEHNFKSFFGLLKLKGKGKYDKPVKIPKYLDKKKGRQVVHYEKGAISFKEQGYIKLSKTNIKIKTKLTKDKVQFVRLVPKNNYIVIEIGYNIKEQEQKLNDNVLAIDIGVNNIASCVTTNGDKFLINGKQLKYINHNYNKRIANIQSKLKLTHNKNKSRYKSNITNRRNNRINDYLHKITTYIVNQAVSKNIGTIVVGYNKEWKQDTNMSKSNNQNFVNIPFYRFINMLDYKCKLKGINFQTITEEYTSKCSFIDDEEIEKHINYVGKRISRNFFRTKKGILINADINGAYNILKKYMKENATWNEKISQTLVKVCSIPSVRKINIRVS

SEQ ID NO: 34027 - protein, 444 aa, unknown
  TnpB Polypeptide
LDQEARLAKSKAIAETLKATKAKRKTQVCKVREMKIIQNKLSKEQAKHLRLLFLEAKWFYNYMLANPSLRNDTGSKTKSVSVKLPDGTFEQRELKHLSSQMKQSITSGINQSIKTLAKLRDNGIQQPGTLKFKSQLTTIELKQYDSTHRIDRELNKIFIQGLKKGLKVKGLEQLDELEAAYGDIDIASAKIIDRPDGIFFKIVCYVIDNKERKQECIGIDMGLSNHISMSNNLAFRFRLDETKRLIALQRKLSRKKGALKGEKKSKNFKKVRKELNKEHQKIINKRTNAINHIVSLIDLYQFVACQDEQIAGWSKENQTERNKEIYHSGMGAIKSRLKSLESSRVDVINKYLATTQTCSGCGNVQPMLQHERIYHCKACGLEIDRDKNSTLDMIIMSKFSNKPVSTEYRNLMPRSHIYKKVENLKKVPYLKVYELKEAWQLVAE

SEQ ID NO: 34028 - protein, 526 aa, unknown
  TnpB Polypeptide
MENVRSVRRAVAVEVESPPPGLYAVEEPYRRIVEGIAVYVAERGRLEREKYGELYGRFRELYPHLPAQLIQQAMNQGVEVGKSFLEARRDGRVRKPRPEVRHIAIRFAKDSWSYKKAVGSAAPVRLALSLPGGRREVWIKPHRRFWLYWWKALRGEAELASTLMLKRRRGRWYAVFVFDVVPKSEPPAEVVTFDVNENSVAVARVSLLATVDAVARWNRRYVDPAVYSVRTDFGRLAERYERIRNAKLEELKGKYPFAGRDEEERRQNVADAREFRRFAERLRERGRKDARVKQVAREVARSPAIIVTEDLGKNPQEEMIGVKGKKAKKGVKKVKRKELRHRIKQIPFKKLVRAVEDKARETGSVVVYVSPYRNSKVCPIHFAPLRDNGDWHTLWCPHGHEVDRDAAAVLNVLWKTTPTGWVKGVWWEMKDVKRRLERERGLVPKELAKRKNPLVPWPVVRATWASLKALQAGDKWPAMLARAASMTPARGAHEGGARAPPRGAGTPTLGEEVSPPRAPRTPAGSS

SEQ ID NO: 34029 - protein, 350 aa, Pleurocapsa sp.
IFCQSTSNACLAQRKEAYETEKKTISKIEQLRLVKELKASNPYAGKVHSHVLQNVVQDLDKAFKAFFRRIKAGETPGYPRFKGKNRWKSFGFKEYGNGFKIDGRRLRLFGVGRVVVRWHRPIEGRIKTVRIIKKAGKWYACFACEIELNPLPPTGKEIGIDVGIASLLTTSDGEKIENPRWYQNQQRKLRVLQRRVSRRKLGSYNRRKAVLALQRQHEHIANSRKDFLDKLVYWLITNYDRIALEDLRILNMVKNHKLSKSILDASWGYLIQKLLDKAEEAGRVVSLVNPAYTSKTCSNCGFLFEHLSLKDRWIDCSCGFSACRDWNASLNLLRLGRSLWELSSTVVGFS

SEQ ID NO: 34030 - protein, 421 aa, unknown
  TnpB Polypeptide
VSTGNYRRRTAITRLSVSEEDDERLQKTVSAWLEGCNVASELAWDVADSPSAVQRLTYDRVREATGLGSQHAILAARHVARAIKSGIERRLRGRKASRPEFTSRSMTFDARTMTVFTDRKQVSLTTADDGPRVRADLVLPADEDGYQYRYFDSDEWEVTESTLHHRDGEWFLHLGFRKPATDEPTIENGTVLGVDFGVAQIAVTSTARFFSAGELNHRRREFERVRADLQARDTRGARRTLERLSGRETEYVKHVLHQVANGIVEEALDHECDGIVLEALEGIRERLPKANWHSTWAFDTLQGYVTYKAEAEGLFVETTDPRHTSQRCPECGFTHEDNRPARGRFECRACGCAGHADYVAAKNVAATYLRRDRQSSRRRGVGQYALKSGTITPVTDPTVSTDESNPDEARAEGSSERGFGS

SEQ ID NO: 34031 - protein, 545 aa, unknown
  TnpB Polypeptide
MKINQNIETTEYKQLLKVYHKKSDRHVLVLETNLSYQAKCKVFHYAELERKAGNELVAIMKNNYIQLIRTKKYRKLKLLYGKYANSSDKKKCKEIANELNTLQKQYNVTWDYCRTAMIPIGKKYGLNSIFALTKAEDVWRALEKCLYSDGNNIHYSKKENLPNIRAKQSNRGIAISNVENKLQFKFNNLKFGVFVKDRFQNDEVNSILKYLLQPDVSDKQAIDVFRKDNICISTYRPCYAALVCKKIRNKLRVYVHITLEGTAKPKYDRFGNVKHKLGKGIVGCDIGTQTIAYTSDSEVGLKNLAERGRSIFTNERKERLIYRAMDRSRRINNPQNYNDDGTIKKGHKVWKYSNRYKKLKNKHTQLCRINSINRHLAINEDINHLRSIADTFVTEPKNAKKLQRRAKNTTINAKGKINRKRRFGKSIKNRCPGYFQLQIKNKFNNTNGVYIEVPNDYKASQYDHTADNYIKKKLSDRMYKLSDGTLVQRDWYSSYLLYCIDYKTKNIDKEKCKSEFEEHYNKQKLLIEWIKTNNIKILNSGIKVC

SEQ ID NO: 34032 - protein, 435 aa, Bacteriovorax sp.
MSLPNAIEQPEPHMRAWKFVLRATSAQEALLRRVSGQARWVWNHALAEHHARDVRKEPHANYNAMALWLTAWRTAPETVWLAQSPVHAQQQVLKRLDAAFQRYFAPVKARRKLGYPRFKKYGDDPGLRFPVAPLLDQANGRLKLPKLGWVRLRQSQAVAGEIRNATVRRDAGKWTVAIQTRHAGVLPAGGLSPSLGIDVGIATFAADSSGRMVEPLNALKAQAVRLRRYQRSVSRKVKGSCNRKKAVIKLRALHKKIANQRSDWLHKLTTGLAREHAVIAIEDLRVANMSASAKGAVEHPGAKVRQKAGLNKAILDQGWSEFARQLAYKLESNGGALVKVSPAYTSQTCSCCGHVDKLNRKTQASFVCVVCGHAEHADTNAAKNILAAGHAVWTAMSDACGGDGSGLVRKRKARPAAVKQELTEAIVPAQQAEHA

SEQ ID NO: 34033 - protein, 397 aa, Lentzea sp.
VNGLVKRAFRYRFYPSEAQAAELSRTFGCVRKVYNLALRARAEAWSLRGQRVGYEATSALLTGWKRTEELAFLAEVSAVPLQQALRHLQTGFTNFFAKRARFPRFKSRKKSRASAEYTRSAFRWRDGTLTLAKMAEPLDIRWSRPLPEGAAPSTVTVSRDPAGRWFVSLLCEDPGVTPLPATDAVVGIDVGLDHLFVLSTGEKIGNPRQERRDRTTLARAQRTLCRKQKGSGNRDKARVKVARIHARIADRRTDFLHKITTRLVRDTQTLVIEDLAVSNMVGNHRLARAISDAGWRQFRQQLQYKASWYGRDVIVADRWFPSSKLCSVCGALAAAMPLRVRMWTCGCGATHDRDVNAARNILAAGLEASVCGAGVRPQRKTPGGQSATKQKTPRREP

SEQ ID NO: 34034 - protein, 312 aa, Proteobacteria sp.
LPLCAPCPRVAPRSRGSGSLPYITDQPPRPSPSIASASHRARRHTPTVQAPAVCHQGFADCGLRPFKAAYIRLQDDTVTYCGHRFRLWLSRPVGGVVKTGSFTQDARGRWYVNLQCEVPDATEPVGTLDLGIDLGLKSHIACSDGLVYRRDNLTRQYAEALAMAQRAHKKRRMQGVQVKMDNTRRDWAHKATTAIARRAKLIVIWDVPSTKFFKTIFAKSTHDAGWGIVRHQLRYKAIRLAGVCVDGNERFSNVTCADCCARSGPRGLRALGVRTWVCTCCGVAHERDVNAARNILAFRTGRGTPVKGIPVL

SEQ ID NO: 34035 - protein, 395 aa, Ruminococcus sp.
MLTAKKIRLKPTPEQEILFRKSAGGSRWAYNYFLSENNRVYQEYLANGETGEKSISEGKVRKYINNVLKKTTHTWLSEIGSNVMKQAVKDANNALQRYFKGVSEKPCYKSKHKSKLSFYVNYESLSRRNGGFHGEKIGFVKTSEPLPKLSKGEKYSNPHISFDGKYWYLSVGYEIFNVESELTGESIGIDLGVKELAVCSNGKTYQNINKSKKVRRLKKKLKREQRKLSRKLKNNTKDYEVINGYRHPVYIKPLRECRNIQKQKSKIKLIYRKLTNIRNNHLHQATTEIVKTKPSRIVMETLNVKGMMKNRHLASSIQEQKFYEFKRQIEYKCQRYGIELLNVPTFYPSSKLCSQCGNIKKDLKLSDRVYHCDCCGLVIDRDYNASLNLANYQSA

SEQ ID NO: 34036 - protein, 398 aa, Anabaena sp.
MILVERHIIKQSHQHWQEIDQLSFLSKNLYNVANYICRQHFFATGKKYSLPELYHLVKDYVDYHALPTKVSKQIIKRLVSTWTGYFEAHKEWKKNPSKLLGEPRIPGYKDKTKGRNAVIYYHESVYKAELKKGICHLSMSDIKIPTKVDNVIEVRLVPRPTYYVVEIVYEKEEQEQCTSNYVAGIDIGLTNLVTLTSNQPGFKPLLVNGRPLKSVNQFYNKTKAKLQAQLGDKHKTSKRIQLMTAYRNNYVDNYLHNTSRTIVNLLKTCDIGTLVIGKNDNWKQNINIGKKNNQSFTQIPHARLIDQLTYKCQLAGIKVVVTEESYTSKCSALDLEPIQKHSSYLGKRVKRGLFKSAQGILLNADCNGSANIVRKVFPNAFANGIESVAVTPIKVMPL

SEQ ID NO: 34037 - protein, 374 aa, Nostoc sp.
MKTLKFKLYQHKRNRFLKRMINAGGAIYNHCIALHKRYYRMWGKHLNCAKLQAHIAKLRKRNPFWQTVGSQAVQDICQRIEKAYQLFFKHNKKGVRPPGFKKVKKYKSFTLKQAGYKFLDGNRVKIGSKIYQFWKSREIEGTVKTLTIKRTPLGELFMVVVVDEGNKPETKFMTGKIAGFDFGLKTFLTCSDGTTIESPQFFKQSLNAIKKASRQHSKKLKGSANREQARKNLVRRYEDIFNRRRDWFWKLAHELTDKFDVLCFETLNLKGMQRLWGRKISDLAFGELLQILEWVAKNKNKLVVFIDPWYPSSKTCSSCGHILENLDLSIRRWRCPSCQSENDRDGNASLNIKRVGSSTLGVGDVRQSQTAISV

SEQ ID NO: 34038 - protein, 262 aa, unknown
  TnpB Polypeptide
MMATSEQELLGTDLGQYFSAISDKRRKNSEGRNRMYSLFRNLLKKSGKDNLAKAERIRKHNLGRKKQRARYTRDIGVIKTIVNRELNLLFSRKKNPIKEIVVEDLSARMKVHFGKKWNRRLSGWMRGYLQERIRYKAKKFGIEVSEVNPAHSSRECPRCHCTDKKNRLGDSFKCSFCGYHGHADLVAALNILGRLGDKDIRIGMSPSRVKAVLDGRYVGWKSLNHTVSDRTSGAARVVNESPRSASSKSELRSNVQVCTASK

SEQ ID NO: 34039 - protein, 421 aa, unknown
  TnpB Polypeptide
MYELITSNQYEILSLMLVTRAYRYELDPNNRQKSHLHQHAGVARFAYNWGLEHRIELFKNNHGTERFTDAMKQHRLLNSLKETQFPWMYQCSKCAPQEALRDLHRAFKNFYRGLKKGRKVGFPRFKRKGVRDSFRLTGTIRFERRKIRLPRLGVIRIKERRRSYFSGRILSATVRRRADRWFVSVTVEEEIPNPTSPTGGAVGVDLGVRTLATLSDSTTFVNPRALGRRLRKLKQLSRSLSRKRKGSKNREKAQLRLAKMYLRVFNIRQDTLHKVTTYLAKNHSKIVIEDLNVSGMMRNRRLARAIADVGFYEFRKQLEYKCLWYGSELVLVSRTFPSSKMCSCCGLRKKELSLSEREYHCEACGLRMDRDLNSALNLVAVSLPETEKACGEDVRLLACPLGVAEQTSAKQEPNISPRLNV

SEQ ID NO: 34040 - protein, 399 aa, Cyanobacteria sp.
MLVIEYKVKAQKTQYRAIDEAIRTTQFIRNKALRYWENNHGATKYDLNKQCKILAEEFEWAKKLNSQARQSAAERAWSAISRFFDHCKKKVAGKKGYPKYQKNNRSVEYKTTGWKLDPNTKKHITFTDGNGIGRVKLIGTRDIFFYSKEQIRRIRLVRRADGYYCQFCINIDVTEDVEPANQVLGIDVGLADFYTDSNGHKQPNPRFFRKGEEELKRCQRRLSRKQKGSSNRRKARQRLAKKHLRISRQRREHAMRLARCVILSNDVVAYEDLQVKNLVKNHNLAKSISDVGWYQFRVWLEYFAYKFGKVTVAVPPHYTSQQCSKCGWSVKKSLSTRTHTCKCGCQLDRDENAAINILKKGLSTLGHSGNYAWGDGTATQVGDAQFEQVRSQNQESNCL

SEQ ID NO: 34041 - protein, 417 aa, Mycolicibacterium sp.
MARFEIPEGWTPQAYRFALDPTPTQLRELASHAGAARFAHNHMLALVKAVMDQRAAERSYGIDETELTPALGWSLPALRKAWNQRKARCAPWWEQNSKEAYNTGLDGLARGLDAWSASRRGQRHGRVVGFPRFKSARAGKSVRFTTGAIRMEADRRHVRLPRLGAIRTHESTRKLARRVEAGSARILSATVRQDSAGRWYCALQVIVEAKTRPAHARRSAHAVVGVDVGVKADALLVVATPDGIEVNRTRAPKSLTAAQARLRALQRRAARQHGPYDPAAKAKRTPSKRWRRTQARIGRTHAHAAAVRCDALHKATTALAQQHQVIVVETLNAAGMRAAGGARKRGLNRALADAALAEIRRMLGYKTRWYGSHLVEADRFFSVVEIVHGLWEAKAKPHPGRPDLRMRRRRMRHADRS

SEQ ID NO: 34042 - protein, 372 aa, unknown
  TnpB Polypeptide
MTKGYKVRLYPTKEQEKLLWKHIHTCRFIWNYMLAYQNENYANGGKYISEFGMNRLITPLRKQDEHSWLNEVSFTSLQVVCRDLNKTFQLFFKKQSKYPKFKSKHRCKHSYPVCTPRFRIISNELVQIQKIGKVKCKNISISQGKISNLRISFVNNKWILSFGVECENQTFNELTDKSMGIDLGIKELAVVSFGEEKLVFHNINKSKRVKTLEHKLKHIQRVIARKYRTNGNYEKTKQIQKYEKIQKELYYKISNIRQNYIHQTTHTLISYRPNRVIMEDLNVVEMMKNKHLSKVIGEQKFYEFTRQMKCKCEWNEIEFVKADRFYPSSKKCSCCGKIKKNLKLSDRIYRCDCGLSIDRDYNAAINLMKYVG

SEQ ID NO: 34043 - protein, 371 aa, unknown
  TnpB Polypeptide
MIRTYTTRLKVARKQNTRFEYLLSQLCKIYNMALEQRKDAWMQFHTSLSQYDQHKELTELRVWFPEYEELPAAIERDPLHRLQLAFNGFYRRAKKEENPGYPRFKSATRYDSFSVDSQNFKFDFIKSQISLVGLGTFHYKTHFKIAGEPKQIHVKRCGKRWQAQVVCDIGPAPEKKPVHKSVGIDLGLTTLVTCSDGAEIENPRWAKQEADKLAEANRFLSRKKRNSNNRSKAKENLRRCHQRIKGKRNAYLHEVTQKLIDSYDLIAYETLKINNMVKSHLAKSILDAAWGELIYQLKYKAEETSISTVAVNPRNTSQLCSGCGRKVPKDLSQRIHACPFCGLVIGRDLNAALNILDRGMRSVVFSTRGSN

SEQ ID NO: 34044 - protein, 459 aa, Moorea sp.
MQESCLSDIACGNMVWMIVREAKLLNGSLAQYQALDEAIRTAQFVRNKAVRLWRDEPKVNKGRLSLLCKELAHAQEYPWVKKLNSMARQASAERAWNSISSFYRRCREGANKKGYPQFKKHSRNGFADAARTVEYKTTGWKLSEDCLTINFTDGFQAGRFSLFCNHETREDLFRLKINWVRVVRRVDGYYAQFCFDANRKEKGNYTGNVIGIDLGLKYFYKDQNDNAAIYPKYLRRAEKRIKKLQRRLSRKFVKGNKPQSNNYHKARIRLGLAHLKVQRQRKDWAVKLARCVVHSNDVVVYEDLKIKNMVKNHHLAKSIYDASWYQFTQWLDYFGKVWDKTVIAVAPNYTSQDCSNCGHRVKKSLSTRTHQCQRCHTEICRDTNAALNILNKGMKILGVEYNSAATPHGFPVLGNPHQESTQGHWETAGKPGTLGESSTAVDEGKPDSISCLAEPGITL

SEQ ID NO: 34045 - protein, 374 aa, unknown
  TnpB Polypeptide
MKLTRIIKLKLDMPESEILPTIQAYTKAYNLVCQQGWQDKDYNAISLHHKTYKTIKEQLNLPSQLVISSRTKAAESLKSVRSRLKKKQKATQPVSKQCSIRYDKNSITIWFDKEKISLLTIEGRKKFSIQVPDYFKQYITWKKCSAELFVRNHTVFLNIVVSTEKTDIPANDHYIGIDRGIKKIAVTSEKQFYSGSKIKQVTDKYEKLKSKLQSKDTKSAKRHLKKLSKKVNSFRRDVNHCIAKQIVESVKPGSTIILEELTGIRQNVRLRKKQRAEVHKWNFYQFEQFLKYKAEAKGIQIEYVSARYTSQKCSKCSHISRSNRKNQSQFKCTKCSYQLNADLNAAFNIKLNYLDSISYLSRAVVNQPIVVSSS

SEQ ID NO: 34046 - protein, 212 aa, Bacillus sp.
LRKENSFGKFVKFRIYPNKEQEICITKTIGCSHFVCNHFLGLVRFTKSSDVEGLILHAKIRYNPSGKYFISILVETKVQTIPKTESTCGIDVRLEDFAILSDGTTYTNPKFFRTLEEKLVKAQRILSRRTKGSSNGNKQRVKVAKIHEHIANARADYLHKLSTEIIKNHDVIGMEDLQVSNMLKNRKLAKAISEVSWSQFRTILEYKARWDG

SEQ ID NO: 34047 - protein, 286 aa, Bacillus sp.
LLPTKEQACLLEQSSREYIKVINELVSEMVEAKKSTKKSTKDVLANLPSAVKNQAIKDAKSVFSTKVKKSKYKIVSILKKSVCVWNNQNYSFDFTRISIPFMVNGKSTRLKIRALLVNKHNRNYDLLKHKLGTLRITKKSRKWSAHISVTIPTTEKTGTKIMGVDLGLKVPAVAVTDSDKVRFFGNGRRNKYMKRKFRSVRKQLGEVKKLHAIRRFNDKEQRWMQDKDHKISREIIDFAMDNHISVIRLEQLTNIRQTARTSRKNEKTYTLGHSIVYHNLLCTKRH

SEQ ID NO: 34048 - protein, 97 aa, Bacillus sp.
MAKTESTCGMDVGLKDFAIISDRTTYNNSKFFRALEEKLAKVQRTLSRSTKGSANWSKQRVKVARIHEHIANAREDYLHKLSTEIIKNHDAIGMEDL

SEQ ID NO: 34049 - protein, 375 aa, Bacillus sp.
MLVNKAYKFRIYPNKKQEILIAKTIGCSRFVFNHFLALWTATYKKAGKGLTYPFCSAELTQLKKQPDTIWLKEVDSIALQSTLKNLADAFSRFFKKQNDMPRFKSKKNTIQSYTTKQTNGNIGIVGNTIKLPKLGLVRFAKSREVEGRILHATIRRNPSGKYFVSILVETNVQEMPKTESTCGIDVGLKDFAILSDGITYKNPKFFRTLEEKLAKAQRILSRRTKGSSNWNKQRVKVARVHEHIANARADYLHKLSTEIIKNHDVIGMEDLQVSNMLKNRKLAKAISEVSWSQFRTMLEYKAKWYGKQVVVVSKTFASSQLCSNCDYKNKDVKNLTIREWDCPSCGTHHDRDRNAALNLRNEAIRLLTVGTTGIA

SEQ ID NO: 34050 - protein, 396 aa, unknown
  TnpB Polypeptide
MSRYRVCPTAAQEALLLGQCAHARYVWNLGLEQRLMWRRWQGPTPGYTAQAAQLTEARAAEPWLAAGSQMVQQQALRDLDQAWRNFFGGTHHKPTWRKAGVHEGFTIVGAQARRVEQVSRRWSKVLVPKVGWVRFRRSRAIPESRSYRITRDRAGRWHIAVAAIPAPIPAPGTGQVVGVDRGVAVAVALSTGETSGPARPGPKQAERLVRLQRRLARAQRGSNRRARTRAAIARLRARDADRRTDWIEQTSTDLAVRFKVIRVEDLNVRGMTRSARGTLEAPGRNVRAKAGLNRAILAQGWGRLVTRLEQKAPGRVERVRAAYTSQRCSVCGVVDQESRKSQADFSCTSCGYAGNADVNAARNIAAGHAVTARGDRGSPARSVKREPQHARPPQVA

SEQ ID NO: 34051 - protein, 349 aa, Bacillus sp.
MKKAYLTEIKPTNEQVTKINQTIGVCRYVYNLYLSKNKETYEKEGKFITGYDFSKWLNNEHTKVSDQWIKEVSSKAVKQAIMNGERAFKRFFNGLSRFPRFKKKKKQDVKCYFPKNNKTDWTIERHKVKIPTIGWVKLKEYGYIPKNATVKSGTISQRAGRYFVSILCEIENTNTKIKRNESGLGIDLGIKEFAVRSDGEVHKNVNKTENVRKLEKKLRREQRSLSRKYENLKKRGEKSATKLRANMNKNIFRVQKLHARLANIRLEYVKSVVDDMVTTKPAFITIEDLNVKGMMKNKHLSKAVAQQCFYTFKTWLIAKCKKYGIELRQVDRFYPSSKTCSCCGQKKLI

SEQ ID NO: 34052 - protein, 384 aa, Euryarchaeota sp.
MLANSAEFARHLQWWLQQASSGNDCWKLTKELSKRLGIHSKDGLFLRLLKHYLAYLLLRPSVPEFRAGDLITTPVYKRTTIWLVMGSKYVIRRPGDASTMRQMILDGKDIELHFGYKYKIPVKGLLKVHHKMRQILKTGDLRCIALSINPKNNLIRAQLIVDRTDFRIKLRKLKVPRAKVVGIDLNKIGKHIVAFSIPYTDPELNKLCAKYWQYKNLIRELQSKLDRQRCPNPRLHEQIRQLHRKRKDIRRAIHNMLVPLIASVVASSGAETLVMERLHMKPHGLKKGLAEAVNSMPKTGLQLRLQQALPNVEIVSIDPWKPAFKIHANCGGKLDRKKNWHYPPCSKCKIEVNSHENAAKMLVKYHLSSSTIQQFLSSLTGRKP

SEQ ID NO: 34053 - protein, 455 aa, unknown
  TnpB Polypeptide
MKIISSYGVELRKQNIPIRQTLEIYRSAVSYLIGIYVQVWEELAEIPDAKRRFNAAEHLVHTTKKNHACFDFDIRFPKMPSYLRRSAIQHALGTVSSYKTRLDLWEKTARKSGKPKLVYENHAMPVFYRDVMYREGAEGKDEAYLKLYDGHDWKWFCVRLEHTDMEYLRKCWSGKKASAPTLEKRHRKYFLRFSYTEEVTLTKTPVKEQIICSVDLGINTDAVCTIMRADGTVLGRRFIDHPSEKDRMYRTLGRIRRFQREHGSAQTQGRWAYTKRLNTELGKKIAGAIVRYAEENHADVIVFEYLEMQGKISGKKKQKLHLWRKRDIQRCCEHQAHRKGIRVSRICAWNTSTQRIIDEAPNSVSTVQMPMKASALIDTVNDMLYHLERRIKKEKKKPKPRSEKEQNYISNAKRLLMEKNQMTEEEAYRHIQKCSMDSGTNMVETAQMVLSIMAE

SEQ ID NO: 34054 - protein, 378 aa, unknown
  TnpB Polypeptide
MIIIKSIKIRLKPTKEQEILMFKSCGVARFTYNYGLAKWEELYKQGLKPSKAIIKKEFNNTIKKQEEYKWLYEVSGQATAQAFEDLNIAYQNFFNGISKKPKFKTKKKSRKSFYVRYDAIKFKNGKVNLEKIGKVEYKSNYSIPHLDKYINPRCHFDGMYWYLTLGFEQGENKTELNQDLSIGIDLGIKDLAIINCLDKPIKNINKSKEVKRLKKKLKRLQRQVSRKYKKNKQGNKFIKTNNIIKLEKKIKLIYRKLTNIRDNHIHQSTSKIIKLNPYRIVMEDLNVKGMMKNKHLSKAIQEQKLYEFIRQMKYKCNFNCIEFIQVDRFFPSSKICSDCGFKKKDLKLSDRIYICDNCGLVIDRDKNASINLGNYKLA

SEQ ID NO: 34055 - protein, 662 aa, unknown
  TnpB Polypeptide
MSEEQYHSASHCKYLIQYHIIWCPKFRFSVLKGNVEDTLKQILQKICDDYNYHIKALEVMPDHIHIFIDVPQTVAPCDVVRTLKSISAVELFRVFPKLKQFYAKCGVLWSRGYFVSTVGHISEATMISDEEYKKLLKQFHKLSDRHILVVETDMPYSDVFKVVLLSDKIRKAGNELVSFMRKNYDQLIRTKRYRKLLKLYGSTKDKKKRKDLADQLNEMQKAYNVTWDYCRTSMIPIGKKYSIDAVFALTKAEDIWRGVEKCLYGNGNTIHFSKYGELPCIRAKQINRGIPISVKDDRLQFKLGKTAFGIQVNDRFQQDEVNAVLTYLAEPEIVDHKAVNTLIEDTCCIDTYRPCYATLVPKMIRGRYRIYLHLTIEGKAKPKYDKYGNLRHKYGKGVIGADIGTQTVAYTSDTEVGLKNLSERGNSIQTSERKERLLYRAMDRSRRAANPQNYNEDGTVKKGRKTWKYSNHYKKLKAKHSELCRINAVNRQLAINEDANHLRSLGDTFVTEPKNASKLMKRAKEITVNSKGKFNRKKRFGKSIKNRCPSGFQTTVEKKFKTTGGTYIEVPNNYRASQYDHTVDDYIKKKLSDRLYKLQDGTEVQRDWYSSFLLYCYDYKIQNIDKNKCITKFDNCYKKEKALITWIKAHKIKVLNSGIKIA

SEQ ID NO: 34056 - protein, 430 aa, unknown
  TnpB Polypeptide
MVNISRERRMFFMSEITQTMKLRIHVNNEQEALFLALTQKYAEACTYISRYVFDHGFIMNFMLLQEDLYRIIRSEFGLKSQTTISALKTVTARYKTIQEQLKKKPFKYCDDNGKTQYINRTLDWLMKPVVFRRPQADLVRNRDYSFVVDKKTGECLLSLNTLNDRIRVSYDLPKNFQKYFDGTWSFGTGKIVSLKGNWYFHIPMTKDASEFDPDEAVHVVGIDRGLRFIASTYDEKGKVDFINGKVIMRKRDKFAKVRAELQSKGTKSAKRKLKELSGRENRWMTDVNHRISKTLVQKYGSNTLFVVEDLTGVSFSEESLFSRSSKQRQSLRTWTFYQLEQFLTYKANAVGSCVIKVAPDYTSQRCPKCGRIHKENRHHDTHEYICDRCGYRSNDDRIGAMNIQFLGTMYISGDDNPKFVVRKKKKAKTK

SEQ ID NO: 34057 - protein, 392 aa, Thermococcus sp.
MPSETIKLTAKFKLKEAPESLDYLFSTYRKIVNFLIIHAFENNITSFYRLKKETYKGLRKEYPELPSHYLYTACQMATAIFKSFRKRKKKGKANGRPVFKKEVIMLDDHLFKLNLEAGVVKLLTLKGRILLEFYPAKYHEKFKDWKVGQAWLVRMPKGVFLNVVFSKEVEVSEPKAFVGVDLNENNVTLSLPNGEFVQIITHEREIRAGYFVKRRKIQQKIRAGRKRRELLEKYGERKRNRLNDLYHKLANKIVELAEKYGGLALEDLTEIRDSIRYSAEMNGRLHRWSFRKLQSIIEYKAKLKGVRVVFVNPAFTSSLCPVCGGKLSPNGHRVLSCKCGFEADRDVVGSWNIRLRALKMWGVPVPPESQPMKTGGWKVSRNDIYKLYKSYG

SEQ ID NO: 34058 - protein, 436 aa, Thermococcus sp.
MKRAVMVKLQPSKEQEKILFELAQATAIIWNKLNYQRLKQFKEFGKIDFSTTEKEAYHEFKNWIGGSTAQQLARKNAEAWRSFFSLNRKRKNGELPEWFKPKPPKFIREENGRRLFVIPLRNDQYRINGNVIELRRLGKFGKLKIQFKGRIHLKGKQGRLEIAYDDVKRKWYAHISFTVSEKLEGDEWVKLPRTPRGNLSAGIDLGVNNLMAVYVENGESFLVNGRPLKSIDFYWRRKIAEYQSKLNRSGAKTSRKLKRMHDKAKLQARHYINTAVRQTVRRLYELGVSKIVVGYPKEIARNSNKGRKQNFLLSHVWRFNTVIKRLIEVAEEYGIVVVVVNEAFTSQVCPLCGQRHSDGRIFRGLFKCHREGVVMNADLVGAFNIWKRVVKTITPSLPALAGGRGNWGETLPEGFREPLKGLLMETPQTSPSMARG

SEQ ID NO: 34059 - protein, 222 aa, Thermococcus sp.
MAVYVENGESFLVNGRPLKSIAFYWQKKIANYQSKINKSGCKKSRKLRRMHEKAKLQAKHYINTAVRQTVERLYQLGVKRIIIGYPKEIARNSNKGKKQNFILSHVWRFNTVIQRLKEVAEEYGIKVVVVDEAFTSQLCPLCGKPHKGARFVRGLFKCPTEGLIFNADLVGAFNILKKVVKTITPNLSSLYAQRRGNGGKTVPEGLIFGFNETPQTSPSIAR

SEQ ID NO: 34060 - protein, 435 aa, Thermococcus sp.
MKRSVTVKLQPSKEQEKILFKLAQATAIIWNKINYERLKQFKKFGKIDFATTEKEAYYTFRDWIGGSTVQQLARKNAEAWRSFFTLNKKKKSGELPEWFKPRPPKFVREENGRKLFVIPLRNDQYRIEGNVIELRRLGKFGRLRVQFKGRIHLKGKQGRLEIIYDEVKRKWYAHISFHVEEKLEGEKWAKLPRQAKGNLSAGIDLGVNNLMAVYVENDESFLVNGRPLKSIAFYWQKRIADYQSKINKSGSKKSRRLKKMHEKAKLQAKHYINTAVRQTIEKLYQLGVSRIVVGYPKEIARNSDKGRKQNFLLSHVWRFNYVIKRLKEVAEEYGIKVVIVDEAFTSQICPLCGQRHSNARFVRGLFKCHREGVVMNADLVGAFNILRKVKTITLSLPGLTAGRGNGLKTEPEGFEEPVLTGSLMRTPQTSPSIAR

SEQ ID NO: 34061 - protein, 432 aa, Thermococcus sp.
MVKLQPSKEQEKILFKLAQATAIIWNKINYERLKQFKKFGKIDFATTEKEAYHKFKNWIGGSTVQQLARKNAESWRSFFSLNRRKKNGELPEWFKPKPPKFVREENGRKLFIIPLRNDQYKIRRNIIELRRLGKFGRLRIQFKGRIHLRGKQGRLEIVYDDVKRKWYAHLSLTVDEKLSKKGWIKIPREPKGSLTAGIDLGINNLMAVYVENGVSFLVNGRPLKSIAFYWQKKTSEYQSKLNKSGAKTSRKLKRMHQKAKLQAKHYINTAVRQTIEKLYHLGISKIVVGYPREIVRNSSKGKKHNFLLSHVWRFNYVIKRLTEVAEEYGIEVIITDEAFTSQICPLCDQRHSNARFVRGLFKCHREGVVMNADLVGAFNILKKVVRTITPSLPALAGGRGNWGKTIPEGFFEPLSRVPPMRTPQTSLPLARG

SEQ ID NO: 34062 - protein, 251 aa, Thermococcus sp.
MIGRLGRLWIVRTPKGVFLNVVFPKDVEVKEPKAFVGVDLNENNVTLSLPSGEFVQIITHEREIRTGYFVKRRKIQKKLRAGKRGRELLEKYGERERNRLNDLYHKLANKIVEFAEKYGGVALEDLMEIRDSIRYSAEMNGRLHRWSFRKLQSIIEYKAKLKGIKVVFVNPAHTSSLCPMCGEKLSPNGHRVLKCSNCGFEADRDVVGSWNIRLRALKMWGVTVLPESHPMKMGGWKVIHYDGFACFKSSG

SEQ ID NO: 34063 - protein, 392 aa, Thermococcus sp.
MPSETIKLTAKFKLKETPEGLDELFQTYREIVNFLISYAFENNVTSFYRLKKETYKSLRERYLELPSHYIYTACQMATAVYKSFRKRRKKRKAKGKPVFRKEVIMLDDHLFKLDLEKGVIKLSTPNGRISLEFYPAKYHEKFKDWKVGQAWLVKTPKGVFLNAIFSKDVEVKEPKTFVGVDLNENNVTLSLPNGEFVQIITHEREIRTGYFVKRRKIQKKLRAGKRGRELLEKYGERERNRLTDLYHKLANKIVELAEKYGGLALEDLTKIRDSIRYSAEMNGRLHRWSFRKLQSIVEYKAKLKGVRVVFVNPAHTSSLCPICGGKLSPNGHRVLSCKCGFEADRDMVGSWNIRLKALKMWGVSVLPESQPMKTGGGKVIHYDGFACFKSSG

SEQ ID NO: 34064 - protein, 436 aa, Thermococcus sp.
VNYLRRQQFFNHKPVDFNKSEKIVYEKYKREIGSATVQQICRKNAEAWRSFFSLIKKKKELPKWLKPKPPNYLKDNGKRKPLIVLRNDQYRIEGNKLILKGLGKFKRLEVQFKGRIHWKGKQGRLEIIYDDIKRKWYAHLSFNVEEKLSKKGWIKVPREPKGSLTAGIDLGINNLMAVYVENGKSFLVNGGPLKSIAFYWQKKIANYQSKINKSGCKKSRKLRRMHEKAKLQAKHYINTAVRQTVERLYQLGVKRIIIGYPKEIARNLSKGKKQNFILSHVWRFNYVIRRLKEVAEEYGIKVVVVDEAFTSQLCPLCGKPHKGARFVRGLFKCPTEGLIFNADLVGAFNILKKVVRTITPNLSGLYAQRRGNGGKALPEGFREPLKGFLMKTPQTSLPLTRGFHQEPSPFRAGRRSVTGARWQHCPQLHTVSFKIF

SEQ ID NO: 34065 - protein, 433 aa, Thermococcus sp.
MKRSVTVKLQPSKEQEKILFELAHATAIIWNKLNYLRLKQFKEFGKIDFNGTEKEAYHLFKNWVGGSTVQQLARKNAEAWRSFFQLNKKKKNGELPEWFKPKPPKFIKEENGRKLFIIPLRNDQYRIDGNVIELRRLGKFGRLRIQFKGRIHLRGKQGRLEIIYDDVKRKFYAHISYTVEEKLIKGEWIKVPRHLKGNLTAGIDLGVNNLMAVYVENCESLLVNGRPLKSIAFYWQKKIAEYQSKINKSGRKKSRKLRRMHEKAKLQARHYINTAVRQTVRRLYELGVSKIVVGYPKEIARNSNKGRKQNFLLSHVWRFNTVIKRLIEVAEEYGIVVVVVNEAFTSQVCPLCGQRHSDGRIFRGLFKCHREGVVMNADLVGAFNILKKVAKMVTPSLEGLKAFKVRGNGLKAEPEGLIFGFNEAPQTSPPMAR

SEQ ID NO: 34066 - protein, 404 aa, Spirochaetes sp.
LSGIYAIIDHVSINQRAYPEPGAQSEALLMHFNHARYVYNLGLEQRKLNDKTQRQRGVRVNAATQQRELTEARREFPWLREGSTVVQQAALRDLDRAFVNFFKGHADYPVYRRRGSHNSFVIRDLSVRRYNRKWAAVLVPKAGWLKFRVTRAWAEIEAGTSARVSLKHGQWFVSITTPPAAKREGGRGAVGLDRGVAVSVMSSDGEMFTAPSLTGGEQKRWLKLERRISRCAKKSARRERAKEELGSLRRALNNRRHDWVEKSTTRLAVTYSFAGIEDLNIEGMVKKPAPKPDGEGGYLPNGAAAKSGLAKAILASQWGRFAQRLSDKMEVMKVPAAFTSQCCHECGHIAPDNRESQAMFRCKRCGHAANADVNAAKNIRRLAVCGGTLRERAKVRADANLQTA

SEQ ID NO: 34067 - protein, 432 aa, Scytonema sp.
MLLSFKTQLIPNNRQVTAFRKSSGVARHAYNWANAVIIDILKTKKPEDKLKLPSAIDLHKRLVAEVKSIYPWYYEVSKNVPQKAIASLRQAWDRCLTKTSFQARFKKKGQRDSFYLESGTKAKPQIKNDGKRIKLPTIGWVRLSEPLPITATHNCVISRQADRWFIAIKYEIEKPTVSIDRPTIGVDIGINELAVCSNGKVFSNPKAYRRMSKSLKRSQRRVSRRIKGSKNRIKAIRKLAKIHAKVSNIRKDAIHKLTNYLAKNHSVVSIEDLQIKAFLKNHKLAGAIADCGMYEFKRQLEYKTEKFDSKLILVDRFYPSSQICSNCFNHRHKMPLKNRVYICPDCGHTEDRDLNAAKNIDRWFENIFIPEWSEMVSSTKIACGVDKPLRSHPKTTVKQEVSTNEYDMWFWSSQDTEKSGFGKLIPVLYRVG

SEQ ID NO: 34068 - protein, 344 aa, unknown
  TnpB Polypeptide
MRKTIKAKISNQTNNSKMEIVEREHQRWKEMMHEIFEKGKSDYQEVRTEDRHSMYASYATSKADSKNHPMPIHNDFMKIERRDTEPFEYWLSIPTKERHGGVYVPLEIPYKYYGFEEEWEIGDSYITKQDGEFYVHIKVEKEVEEQNEYSGVLAVDLGVRHVAVTWNTSRKKPRFHGKELRQVRGKYQYLRKKLQSEKKIEAVKKHKDKEKRKVENQLHNISREIVDEAVEDDLAIFIGDLSGHRESDFGKKGNERLHKAPVYQLKQQIKYKAQEAGVLCKEIDESYTTVTCSSCGYERDSRPGNEFHCPECDYQVNSDVNGAKNIASRGSGYMSESEAVVVQP

SEQ ID NO: 34069 - protein, 470 aa, unknown
  TnpB Polypeptide
LKLNPSTEQQRELEKRFRMATDIYRNSLFEIFKRVRNQKKDPLYKKAYKLPKGKERNEILKELDKKYDMNSWQLFAALANKYRNARHYDLHIPSTSACKLGRRAYESYARVKFGAAKRVNVPRMIDSFEGGQKNGLRVRDGQLVLSKSTHRMFIPILFRNTEYEAWVLRDSLRCVRLLRREENFRTQYYIQLVMEGTPPNTHYRSSATGAVGIDIGTSTVAIVSDTKAILQELAPNIDKRANELTRLQRKLDRQRRANNPNNYNEDGTVKAGPKRWVESKRQRKTRETIANIQRKQAMTRKLSHNAQTNEVLQQGDTFIVEKMNFKGLQARAKETTVSETTGRFKRKKRFGKSIAHRAPASWVSTLAYKAAYAGKTFIEADTYALKASQYDHTTGEYTKHSLSTRVKQVGDATVQRDLYSAFLLSCVNDAGNEIVQEDATRKFPRFLQHQKDAMNRLESNLQSTGVKHWK

SEQ ID NO: 34070 - protein, 410 aa, unknown
  TnpB Polypeptide
MQLVEQHIISKGDPRYARIDVAAFASKNLWNLANYYVRQSFIFEHTYLDNIAVYHLVKSSDAYKALPAKVSNQVLLQLHNAWLGFFEAMEKWREHPEQFTGRPKLPGYQPKTTGRNLLVYELGAVWKRELDRGLIAVSGLGVLVQTAQARSTLDQVRIVPKAGQYVVEVIYQCEITQAQVDPDLFVALDLGVNVLAALTSNKPGFIPRLVNGRPAKATNQLYNKQRAQEQKQLARGKAPHFTSHRLDRITTKRNRRIMHYLHTASRRIIDLLVAEGIGTLIIGKNPLWKQRVELGKKHNQEFVQIPHARFIELLTYKAALVGIRVILTEESYTSRASFLDRDEIPVYDPTRSGEPRFSGRRDGRWYYASGKRVIHSDVNGSYNIGRKVVPTAFDGPGIAAPAVRPRRLAV

SEQ ID NO: 34071 - protein, 437 aa, unknown
  TnpB Polypeptide
MALGLQHIENHISKFMKGENRMYLTVKQQIKHLSKGNYITIRELCHTAKNLANEAIYNVRQYYFTEGKFLKYEKNYTLLRNSPNYKALNSNMAQQILKEVDGSFQSFFGLLKLVKQGKYAFMDCKLPHYLPKDGYTTLIISFVRLNGNKLILPFSNSFRKSHKSIEITIPPILLDKAIKEIRIIPKANARFFEIQYVYKAECIQRNLNTNNALAIDLGINNLVTAVSNIGKSFIIDGKRLKSINQWFNKENARLQPIKDKQHFGRKTTNRQKAASRNRNNKVNDYMSKTARKVIDYCITNDIGTLVVGYNETFQRNSHIGKQNNQNFVNIPYGQLRNKLEYLCKLNDIVFIEQEESYTSKSSFWDRDNIPVYNADNPKEYKFSGRRLQRGLYKMASDKTINADVNGALNIMRKSSVVDMNILYSRGEVDTPIRIRIA

SEQ ID NO: 34072 - protein, 371 aa, unknown
  TnpB Polypeptide
MQRPDAMAQSQCWSGRDERQSEQVTLKRLHLAFQHFFRRLKNGETPGFPRFKTLHRYPGWGYKTHGDGWKLHPGENGAHGKLYLQSVGNIPIRGKARTPGIPVTCEMLHKAGKWFASVTLEVETIPRERGTEIGAFDWGLTEFLTVATPDGIETVANPRHLKNQLVELKRLGRQVSRKIRMAQQLSGKQRGFPLSANLRKAIQQLSRLHAKIARQRKDFLHQESAELVKRFGAIATEQLAVKNMVHGGGARKKGLNREIHAASPSAFLQMTRTKAEEAGAWYEEAPTRELKPTQRCHACWQLPGEKKTLSDRQHRCPHCGASCGRDENAAQVLWRWLETRLAGVTGSGREPPEVWSGGGFTALKHETHAIP

SEQ ID NO: 34073 - protein, 405 aa, unknown
  TnpB Polypeptide
MSPLEARRKSLKRRKQLKCKAFNLKIDNKSIKENELYFKMLFLEAKWLYNHFLSQEDIFKINITDIKYVQVKVKDKFEEREIKYLPYNVKQTIYDKIKQDIINLAKTKNKGFKIGKLHFRNEVNTVSFKYFKIKNNKLCIPRKGKKKSDVQSTPLKIYGLNQIKGALEIGQVIFVKKPSGIYLRVTTYWPKENIQPRENLGIDFNISNTLVISNGQQIDKISIKESKRLKRLSRQQNKKTKGSKNRFKHNRLIAREHEKLSNRKEDIINKIVNKLKNYRIVIQNDSLQDWKQNRSYGTSIQHSILGGIKSRLISLETTKVINQFERTTNTCFNCGNRLYLKRSDRSFTCKECGFTHNRDLNAAKNIMKIGLEQSEFTPLESYIDFGYIYGIEVKTLKKENVSNET

SEQ ID NO: 34074 - protein, 405 aa, unknown; identical to SEQ ID NO: 34073
  TnpB Polypeptide

SEQ ID NO: 34075 - protein, 568 aa, unknown
  TnpB Polypeptide
MQKELRIPLLSNTSPQGKQPKSLGSMSGHSGAGMNKGKSKQSGPKASSADTTSKAIQLELNLAWTPESTSSTPESVLAINCPISTDKSNISSPDTQTEKLSQKLEEGLTSNAKRCLPYWDKSCQEMSNALWLLTKTDWRDSDLTCLDGSVNKTGVNSWFSMSQVSLLPRRWLKTSSPFFTASVQGFTDSANTRLRSRKIRIYPSVKLNKVWRKWLAACRYCFNQAIAYQRQNKRVGKLKLRNIVMQSDLPEWVKQTPCHIRQNAIFDAHRADNASVNAKFRSCRDFQQTIKFNDSNFSSGCWYPRLTKGLEFIASESLPQACSNATQLTFSKGRWFAIIPEEVKVNRQDKDGVIALDPGVRTFLTGFDGSRFVELGRGDIGRITRLCQHLDNLYSRMSKAGRKQRRRMRQAANRMRAKIRHLIDEAHKQIVGYLTNNYRVIFLPTFETSQMVAKASRKIRSKTVRSMLTWAHYRFELFLNQKAEMTNTIVITGSEAYTSKTCTKCGHIHQTLGGSKVFKCPSCGHVLPRDMNGALGFMLKALRDTAFTINSDGVAIAALSGNFPYCVA

SEQ ID NO: 34076 - protein, 402 aa, Shigella sp.
VKRLQAFKFQLRPGGQQECEMRRFAGACRFVFNRALARQNENHEAGNKYIPYGKMASWLVEWKNATETQWLKDAPSQPLQQSLKDLEWAYKNFFQKRAAFPRFKKRGQNDAFRYPQGVKLDQENSRIFLPKLGWMRYRNSRQVTGVVKNVTVSQSSGKWYISIQTESEVSTPAHPSASMVGLDAGVAKLATLSDGTVFEPVNSFQKNQKTPARLQRQLSRKVKFSNNWQKQKRKIQRLHSCIANIRRDYLHKVTTTVSKNHAMIVIEDLKVSNMSKSAAGTVSQPGRNVRAKSGLNRSILDQGWYEMRRQLEYKQLWSGGQVLAVPPAYTSQRCACCGHTAKENRLSQSKFRCQVCGYTANADVNGARNILAAGHAVLACGGMVQSGRPLKQEPTEMIQATA

SEQ ID NO: 34077 - protein, 364 aa, unknown
  TnpB Polypeptide
LHKAFKFRLYPTKEQIVLLNKTIGCTRYVYNHFLDARIKLFEAERKTLNFNSCCLELTQLKKQIEWLQEVDSMALQQTLKDLDKAYQKFFKEKKGFPNFKCKKNPKQSYRTNANKSSIEVSDSKIKLPKLGWVSFAKSREVDGKVISATIRRSPSGTYFISILCEVEIQPLPRVDQAVGIDLGIKEFAITSDGEHFRNPKHYRKHERKLKRLQRKLSKKQKGSLNRDKARKKVAKAHETIRNCRQDFLHKLTTKLIRENQTVCLEDLQVKNMIQNHNLAKSIADVSWSEFRSMLEYKAGWYGRELSIIGKTFPSSQLCSACGYRNKDVKNLNLREWICPICGLYHDRDENAAKNILREGLRLAG

SEQ ID NO: 34078 - protein, 371 aa, unknown
  TnpB Polypeptide
MQKLNRAIKYRAYPTPEQQVLLSKTFGCVRFVWNHMLTDARQFLNEAGTFFIPTPAKYKKEFPFLKEVDSLALANAQLDLKEARKKHRENPKSCGAPKLKSKRKSKMSYTTNTHSYKTNDGHVVHTIALGYDSIRLPKIGWVKINKHREPEANWVLKSATVSCTRSGKYFISLLYEFEKDIQPIKPTKETSLGLDYSSHGFYVDSNGDVANYPRFYRQSEAKLARAQRRLSRMQFGSHHYDKQLYRVRVLQEHIANQRKNFCHTASTAIAKQYDAVFVEDINLRGLAGSLKLGKSTNDNGFGMFRTMLEYKLTSQEWNRSRKPTMGNCPKVRILQQAPLPSFCALSVQMRAFSFAFRFEFRTRMALMVGYS

SEQ ID NO: 34079 - protein, 379 aa, unknown
  TnpB Polypeptide
MLRAIKVRLYPNKQQEQTLNKVLGCYRFVYNHMLARKQEAYKSDKTNLSLTELSKYFHHELLKDEQYTWLKEQNTKVMKQSIRQMLTAYDKFFKEHKGFPKFKSKRDKQSALFPIGAISKKNTFDTRKITLTTKLKDIKFRCSDLYHKRLQKYKDNIRSATLSKTKSGCYTLSILVEMKEDEFVKFGKTNRDVGIDLGVKDFVITSDGDVFENKRFFKKDEKRLAKLQRQLSKKCKGSSNFHKQCKRIAKVFETITNKKENYIHFVVNYLLRHYDTVYMEDLNTSGMLKNHKLAKAIQEVGFFKFKTTLQNKSLQNDKKVVLIGRYYPSSKTCSQCGYIHKDLKLQDRHWQCHNCGSYHDRDLNAALNILNEGRRISAV

SEQ ID NO: 34080 - protein, 379 aa, unknown
  TnpB Polypeptide
MLRAIKIRLYPNKQQEQTLQKVLGCYRFVYNHMLARKQEVYKTDKTNLGLTELSKYFHHELLKDEQYTWLKEQNTKVMQQSIRQMLTAYDKFFKEHKGFPKFKSKRDKQSALFPYDAISKTNAFDTRNITLTKNLKNIKFRCSDLYFKRLQKYKDNIRRATLSKTKSGCYTLSILVDIDNNEFVKFNKTSRDVGIDLGVKDFVITSDGNVFENKHFYKKSENRLAKLQRQLSNKRKGSNNFHKQCKRIARVFETITHKKENYIHFVVNELLSHYDTIYMEDLNTSGMLKNHKLAKAIQEVGFFKFKTTLQNKALQNDKKVILIGRYYPSSKTCNKCGYIHKRLKLQDRHWQCPNCGSYHDRDYNAAVNILYEGRRISVA

SEQ ID NO: 34081 - protein, 379 aa, unknown
  TnpB Polypeptide
MLRAIKIRLYPNKTQEQTLNNVLGCYRFVYNHMLARKQDAYKADKTNLGLTELSKYFHHELLKDEQYQWLKEQNTKVMKQSIRQMLTAYNKFFKEHKGFPKFKSKKDKQSALFPIGAISKKNTFDTRKITLTKNLKNISFRCSDLYLSRLQRYKDNIRNATLSKTKSGCYTLSILMDIPQNEFVKFNKTSRDVGIDLGIKDFVITSDGDVFENKHFYKKDEKKLAKLQRQLSKKRKGSSNFNKQCKRIARVFETITHKKDDYIHSVVNELLRHYDTVYMEDLNTSGLLKNHKLAKAIQEVGFYKFKTTLQNKALQNDKKIILIGRYYPSSKTCSQCGYIHKDLKLSERKWQCPNCGINHDRDKNAALNILYEGRRISAV

SEQ ID NO: 34082 - protein, 739 aa, unknown
  TnpB Polypeptide
MRAHFKGIISSSFDWQLYMHVFTCYQNKFKALQRKLQFEVYEFNGFEFYQRDSKNHKKGELKQVLVKKKQTPLSNCLTYLVRYGNEGIIEYIKDNLDTCDVKKRKFYQNILRCCEKYGFNRLYNLALSKRKRIIKRYSEYPIEFKSLSFCGRSRKKHIVDFNKNFGSVINSFISLSGFSRKSLDIPVKYHKGYHGNMKDYRKDNPSYEYVITFDEQKHQVKINLCKDGERYIPELHGDTVGVDVNCKHNLFSLSNEMTYDYDRKLVNDYCKLSCDIDDLKSKNKSYTVGKRKQRKLDVMKVKMVKSEQQLIANMCKTLQSQGVGHIVMEDLDNGFARCYIKDPDNEDINYNRKVKFIGLSSLKGEVEHIARKYDIAVSTVHPSYTSKMCPVCGCIDNKNRPNQETFKCIECGHGSNADFNAAKNIRNRVLVTVLREKLLKRLDNGAFEPKKLKREKIKDALLSFRRSLSNVGCECVEGDITTFEYAQLFENRKDLLKEYFTSVQDEDVKKFMERCIETIPEYWFHVGASSTGKYHPDYACGEGGLMRHTIALLRFFDRLMRNDIYGKKFTEREKDLLRVACLMHDTRKSGTQDEYEVNKYTKHDHPILAADVIRSIDSSYVTDDEKELIANAIESHMGQWNTNKNSSVVLPTPENKYQKIVHLCDYLAAQKGVEVQFNGFTPEPRVVNTKTCTVETYVFPFGKYKGMKLTEVNEHYPDYIDWAKKNIDHEPLMSLLKQI

SEQ ID NO: 34083 - protein, 401 aa, unknown
  TnpB Polypeptide
MFGFIDILKYNKDVNKIILIMAMLRAIKVRLYPNKQQEQALNKVLGCYRFLYNHMLALKQESYKSDKTNLSLNELSKYFHHELRKDEQYVWLKEQNTQVMGQSIRQMLTAYDKFFKEHKGFPKFKSKKDKQSALFPLNAISKRNTFETRHITLVKQLKNIKFRCSDLYHKRLQRYKDNIRSATLSKTKSGNFFLSILMNIPQSEFVKFKKTNKEVGIDLGVKDFVITSDGKKFENKHFFKKDERKLNRLQRQLSKKKVGSKNHNKQRIKIAKAFEHITNKKENYIHYVVNELLSSYDTIYMEDLSVSGMLKNHHLAKAISEVGFYKFKEILKSKAIANDKKVVLIDKFYPSSKTCSQCGYIHKGLKLKDRHWQCPQCGEIHDRDLNAAKNILCEGQRISAA

SEQ ID NO: 34084 - protein, 379 aa, unknown
  TnpB Polypeptide
MLRAIKVRLYPNKTQEQTLNKVIGSYRFVYNHMLARKQEAYKSDKTNLGLKELSKYFHGELLNDEEYQWLKEQNTKVMKQSIRQMLSAYDKFFKEHKGFPKFKSKIDKQSALFPIDAISKTNTFNTKHISLTTSLKNIKFRCSDLYHKRLQKYKDHIRRATLSKTKSGCYTLSILVDLDVTEYANFKKINRDVGIDLGVKDFVITSDGEVFENKHFYKKDEKRLTKLQRQLSKKHKGSSNFHNQCKRIAKVFETITNKKENYIHSVVNYLLRHYDTIYMEDLNTSGMLKNHKLAKAIQEVGFYKFKTTLQNKALQNGKKVVLIGRFYPSSKTCSKCGYIHKDLKLKERHWQCPNCSTSHDRDYNAALNILYEGRRVSAA

SEQ ID NO: 34085 - protein, 426 aa, unknown
  TnpB Polypeptide
MEIFTKICGFVKNIVLLQKFRLFNNRMKLIHKSYKFKIYPTKEQESLLSKHFGHCRFVFNKFLNDRKEKYLNEKTSLNYYDNARTLTDLKKEEEFVWLKEVNSQSLQASIRNLDIAYKNFFNKQNKFPRFKSKYDRQSFKVPQNVLVEDGKLVIPKFKEGIKLHLHRKLEGEPLFATISKSTTGKYYVSITCEIEYKPFEKTGKSVGVDTGIKELAILSDGNSYENIKSLKTKLKKLKYEQRQLSKKVKGSQSRNKQKIKLALVHEQITNIRKDYLHKVSTEIVKNHDIISVEDLVVKNIMKNHCLAQAMSDVSLGAFYTMLEYKANWNDKQFVKIDRFFPSSKTCSSCGWIKQDLTLSIREWTCESCGEHHNRDVNAAKNILNQGINILSGCGMQSDTKQKQGEALPLGESVTLEAQPISFAVGG

SEQ ID NO: 34086 - protein, 550 aa, unknown
  TnpB Polypeptide
MITIFSNRIYKKALNTSDEIDIEQESYKSNRAKWYLTKLLTREYNEEICLLKDPSLHVFTKKKFGFNDYFANSVINEAKAALSSRVQLHQVETKEFKERIEVKQKKIDELQRELNGKRAMLQSCVKISKASKQGKPKKKDLKLKTYKGCKERQLPSGLYGVTYKKYTRVFYNLYDFEHQYLKPEIKRLKNIISQIKHSINIMQARLERMESRLPGITFGTKRLFRARFTKYWHDCGKWKAEWRKARLKSFKIVGRHDAKYGNFVFKYHPDTKTLDVVLSKDRTIIVKNIYFTYGQELLEAVLNTKTPITWEITDHGEYYIFKAMFTPPTAERNYCTDNGVIGYDKNYDHFAWAETDGKGNFLRHGKIPFNLEGKTTGQVNKILEAAAIGLVKIAREAHMPLVGEKLDTSDSKTRLKYSSKKRNRKISRFAHQKMDRSIESRANKEGVGVIRKDPAYTSVIGKLKYMRAFGIPIHSAAACVIGRRGMGLKEKVPAAYRKTIPEANIKKHHWSHWRFLHRHLKGIQTKGFYRLTLNKQMFLSIKGVKAALKA

SEQ ID NO: 34087 - protein, 196 aa, unknown
  TnpB Polypeptide
MAVSVTLTNTSIKPKFWGKEIRGVRRHYQYLRKKLGKKKLLKKIKQLGNKEKRTVDDYLHKISRAIVTISCQEHSLIVLGDLKGIRKLNKGRNFNRIVSNWAYYKLTKMIEYKANWEGIRVIKIDERETSHICSRCGSKGKRPKQGIFNCSKCGLKNYNADINGAVNIAKKLLSGYNLDSRALSEQALNSAISREA

SEQ ID NO: 34088 - protein, 268 aa, Microcystis sp.
MKARYQYRLYPTDQQKRLLSHLFGCVRVVWNNTLAYCQELYRQGEKKPKYTELSKRLTQIKKTEEKKWLTEVSSVPLQQSLRDLETAYSNFFASCKGERKGKKVKPPKFKKRKSKQSARFTDNGFTVNQHHVTLAKIGDLKVVWSRPLPSKPSSVTVIKDAADRYFLSFVVEIRPETLPNNKQTVGINLGIATFATLSTGEKINAPKPLKKRLKRLRKHRETFLENRKEVNDGKKPENKWLKSTQKLKTLGLISCINYPLELFVKIKR

SEQ ID NO: 34089 - protein, 426 aa, Streptomyces sp.
MSQDTLVKRQFGHRARLALSPAGVLKTDDQAHAARTLWNLLHAWWQMMPKQERTLANADAAIRQARQDIDFLAVLPAQAAQAVLKTYFQAWKNCWNGRADAPNFKSRLRTVMSVDIPQGRDLNIVRVHRRWGMVNIPKVGRVRFRWTKDLPVSKRAGAENRITGARLIKDGLGWHIAFRIQTLQAKPDPHQGPDIGIDVGVTVPIALSNGETYEHGAWLTGKEKARLLHLEQRAARRKRHREPGERTSRRLHRTYDRIAGLRAKARRRALDWQHQSTTAIARTYGTVVVEALTITNMVKSAKGTVEEPGKNVAQKSGLNRSISGEAWGRTVTLLTYKTARHGGALVKVPASGTSMRCSACGFTTSGSRESQAVFVCKNPDCGWSGNADHNAARNILHLYRTGLALVPAAGRAVVRRAKRVKPATAR

SEQ ID NO: 34090 - protein, 424 aa, Streptomyces sp.
VDDQAHAARTPWNLLHAWWQMMPKEKRTLKHADAAIRQARKDIDFLAVLPAQAARAVLKTYFRAWRNCWEPRADAPDFKGRIRTVMSVDIPQGRDLNIVRVHRRRGQVNIPKVGRVRFRWTKDLPVGKRATVENRITGARLIKDALGWHIAFRVQTPQAAPGPHQGPDIGIDVGITVPIALSDGETYEHGEWLTPKERTRLLHLEQRAARRKQRRRPGERTSRRLHRTYDRIAGLRAKARRRALDWQHRATTTTARTYNAVVAEALTITNMVKSARGTIEAPGKNVAQKSGLNRAVSGEAWGRTVTLLTYKTARHGGTLVKVPAPDTSRRCSACGFTTPGCREGSRQAHAARQARYRKVSRNLPASTGRALQGKTYASTSARYRLRRSSSSSRKAARKELRASSRSRSGPRPRVSRTASKVSPT

SEQ ID NO: 34091 - protein, 545 aa, Streptomyces sp.
MADRRKPLRAIDPPFIALGPSGVAIRTSLKHLTSEDDTVLRLVGAHLGSLASKDLRRRCVDGLEHSADTWAERKRALTQESSSRWAGSITKATHDQWALSRRAQLAHIQGLEAGIRTIAHRLSLPVGEKGDKRVPGGYRTAREWFAKTRRLHVLEDRLITERADRQAGRVRVTRGGKRLLNTRHHLDKAQLTAGQWRRRWEAERWFLAADGESGKRFGNETIRVTPDGEVSLKLPAPLAHLANAEHGRYVLVGAVAFHHRGDEWADRVGANRAVAYRIHHDVDRGRWYVTASWTIPPALTVSLDQARIGGLIGVDTNADHLAAWRLDQHGNPVGEPRRFFYDLSGNTQHRDAQVRHALTRLLHWAARHHLSVAVEDLDFTGETTREKHGHRKRFRKLISGMPVARLRARLVGMAAELGVTIVAVDPAYTSMWGAEHWQKPLTSKTRKTTRHDAASVAIGRRALGHRIRRRTAPPPQHRRDVAGHRTAQAGCGTRGREEPRPRIPGPRARPGLPDAERTRATSASTTVRDAPDTQVWVQDSLLLTE

SEQ ID NO: 34092 - protein, 503 aa, Streptomyces sp.
VGGLRELAAPFVVPGPSGVAVRTRLRQLTAVDEEVLRRVGAHLGALAGRDLKTRCRDGLEHDAGAWAARKRELTPLSSARWAGAITKATHEQWALARRCMLAHLQCLRAGVRTLRHRLALPVGSKGSKRAPGGYRSRREWHAKARRLRILEDRLERERTDWEAGTVHVVRGGKRLARMRHQLPAAQLTELQWRARWEAERWFLQADGESGKRYGNETLRIAPDGQVSIRLPAPLKQWANAPHGRYVLTGRVAFAHRAQEWADRVAANRAVAYRIHYDPARGRWYVTASWQKPVTRTVPLAAALAHGVIGVDLNADHLAAWRLDVHGNPTGSPRRFSYDLTGTTGHRDAQVRHALTRLLHWARACNVRAIAVEDLDFTTERTREKHGRKKRFRRLVSGLPTGRLRARLVSMADRTGITVIAVDPAYTSKWGAQHWQKPLKRLGRVDGHGTPDRRRGTGPEDPAGPDRPRQVPAGPSGSSGQPGPSGPSVAPGDRTCRARVGHTS

SEQ ID NO: 34093 - protein, 402 aa, Streptomyces sp.
MAQHVKRAFKYRFYPTDEQAAALSRTFGCVRLVYNLALEERTHAWYGEQRRVSYLQSSAALTEWKKTEELAFLAEVSSVPLQQALRHLQTAFGSFFAKRSKYPRYKSRKKSRASAEYTRSAFTWRDGRLTLAKMTTPLEICWSRPLPEGAEPTTVTVSRDSAGRWFVSLLCEDTIAPAPATGTAVGIDAGITSLVTLSTGEKITNPRHERRDRGRMAKAQRELSRKAKGSNNRERARRKVARVHARIADRRRDFLHKLTTRLVRENQTVVIEDLTVRNLIKNHTLARAISDAAWTELRSMLEYKCAWYGRELVVVDRWFASSKLCGACGTICGKLPLNVREWTCDCGSVHDRDVNAARNILAAGLAASACGDGVRPQRESSRTGRSSVKQEAQRVTAGIHRL

SEQ ID NO: 34094 - protein, 402 aa, Escherichia sp.
VKRLQAFKFQLRPGDQQECEMRRFAGACRFVFNRALALQNENHEAGNKYIPYGKMASWLVEWKNATETQWLKDSPSQPLQQSLKDLERAYKNFFRKRAAFPRFKKRGQNDAFRYPQGVKLDQENSRIFLPKLGWMRYRNSRQVTGVVKNVTVSQSCGKWYISIQTESEVSTPVHPSASMVGLDAGVAKLATLSDGTVFEPVNSFQKNQKTPARLQRQLSRKVKFSNNWQKQKRKIQRLHSRIANIRRDYLHKVTTTVSKNHAMIVIEDLKVSNMSKSAAGTVSQPGRNVRAKSGLNRSILDQGWYEMRRQLEYKQLWRGGQVLAVPPAYTSQRCACCGHTAKENRLSQSQFRCQVCGYTANADVNGARNILAAGHAVLACGEMVQSGRSLKQEPTEMIQATA

SEQ ID NO: 34095 - protein, 567 aa, Streptomyces sp.
MRDLRRWSSLDVVTGFFDVGIGGEGVGGRREVAAPFVVHGPSGVAIRGRLKGLTAGDERVLCLVSGHLGSLASRDLKARCLAGLDHDSEQWAQRKRALTQESSSRWAGSITKATHDQWALARRGQIAHIQSLEAGIGTITHRLSLPVGEKGTKQAPGGYRTRQEWFAKSRRLHLLEDRLQAVRADRETGRVRVVRGGKRLLNTRHHLKSAQLTEEQWRSRWEAERRFLQADGESGKRYGNETIRVTGDGEISIKLPAPLAHLANAPQGRYVLAAKVSFAHRGEQWADRVAANRAVAYRIHEDTGRGRWYLTASWTIPPVQTVSLAAARAGGLIGFDTNADHLAAWRLDEHGNPTGNPRRFFYDLSGTAGHRDAQVRQALIRLLRWAKRHGLSIAIEDLDFTAEKTREKHGRRKRFRNLISGMPTSRLRARLVSMAAELGITIVAVDPAYTSKWGAQHWQKPLTSNNRKTTRHDAAAVAIGRRALGHPIRRRTAPPPHDRSDRVGHRTVQAESVALEREGNRPRIPGPRTRSVRAGCGENAVDQNAQHRSGRSAEHEPWQQDSLPLSL

SEQ ID NO: 34096 - protein, 246 aa, unknown
  TnpB Polypeptide
VRIIPQCSCHIIEVVYEKEKEEATELDDTAYLSIDLGLDNLATSFDPQHNRCFVINGRPLKSMNQFFNKRRAFLMSLIGSRGMSIRIGRLTLKRNCKVHDYMHKASRFIVNYCKDNHIGNIVIGNNKDWKQNCNMGKVNNQNFVSIPFEKLISMIQYKCEEVGIKVIVTEESYTSKTDHYSDEAMCHHENYMGKRIKRGLFRSASGKLINADLNGAIGILRKVVGERLWQIADRGVVGTPSRIQFL

SEQ ID NO: 34097 - protein, 445 aa, unknown
  TnpB Polypeptide
MTLQVIFVSVTMLIITPHTTKLTKIFHFYKTFLVFVNTYMYICTMIKTINRTYRFRIYPNASQMELLAKHFGCTRFVYNYFLNQRQEQYKEGGESDNYYAQAKALTELKKKEETAWLKEVNSQTLQFALRNLETAYTNFFQKRAKFPNYHSKKGKNTFTVPQFATIENSKLWLPKFKSGITIRLHREIKGKMGKVSLTKTPTGKYFVSVFTIEEYQELAPANKVVGVDLGLKDLLITSDGEVFKNNRYTKRYEKKLAVAQRHLSRKKKGSNEYENQRLKAAKLYEKISNCRMDYLHKCSHSLISNYDTICIEDLNVKGMVRNHKLAKSITDASWGTFVTMLTYKANWNGRNVVKIDRFFPSSQLCNVCGYRNSEIKDLKVREWGCPSCGTHHNRDVNAAINILKLGLNNISAGTVDYTDGEDRRPNLLKGHSSVKSEAHESLVRG

SEQ ID NO: 34098 - protein, 390 aa, unknown
  TnpB Polypeptide
MIKTIRVMLIPNNKQKTKLFQYANTARFAYNWALGREKENYNSGGKFISDGDLRKEFTQLKKTEEYSWLNEISNNVTKQAIKDACNAYKRFFKGYSKFPKFKSRKYSVSSFYQDNIKIQFSDTHVKVEGFTISKRKNKQKLNWIRLAEHKKIPTDCKYINPRIKYDGLNWYLTVGVEYEYSTVIPSNEGIGIDLGIKDLAICSDGNKYRNINKTQKVKKLEKQKRRLQRSISRSYEKNKKGESYCKTKNVIKKEKLLLKLNHRLTNIRQNYLHQITSEIVKRKPSFICIENLNVSGMMKNRHLSKAVQQQGLYEFRRQIEYKSVWNNIQAVIADRFFPSSKLCSCCGTIKTDLKLSDRIYRCECGNVIDRDFQAALNLKKYGENIIKSVV

SEQ ID NO: 34099 - protein, 436 aa, unknown
  TnpB Polypeptide
MKTTISAKIKLHTTPEQFQALRNTQLAYRDALNFVSRYAFAHGKMSNKVGLQDGTYADLRQQFSLPSQMACSIPRQVGATYKGLWTKVKQNAQARKDKRTKKRYRGLDQPPKYISPTLEYHLGHDYSFKKQQHVSLLMLNGRVSIPYTGYNKHVALIQLGASIGAAKLWYDKPKKTFYLLVSLEVETPDPTPDMHRHVVGVDVGIRYLAVASSTKGDCTFYSGKQIVSKANHYARLKKRLQQKGTRSATQRLITISGRERRLKQDANHRVSKRIIERYPHALIGLENLTDIRERTKRRKYGKKASVKQRKANARHSKWAFAELHSMLAYKALLQESMTVKVDAHFTSQACPMCGHTSKDNRLKKGLLFVCQNCHYTLHADLVGSGNVTLRTLLIRQDWMRTGTLSVCLDVSDREAKALRLQRYSELRWSPDTSPVS

SEQ ID NO: 34100 - protein, 388 aa, Gammaproteobacteria sp.
MYALAGACRYAWNHFVGKLRDEYALYGHCRFGFVDLSRQFTLLRRHCDRWLQEYSCNIVRFSLRPIEVQYRKFFNHPNGGLPKFKAKWRDTPSFPIVIGQTARLDGQWLHIQKIGYVRLTGNNPYPEGIAKSGTVREENGKWYAYVVYAVEAGASLDSTEAVGIDRNAGQIALSDGTIYHAPDVAKKERRRKRYQRMMARRQRPVHKKGIEASGRYLKARRLAGRTSQKIRQVNDNWVHQVSHRIAERYSVVYLEDLKTRNMTRSARGTVEEPGTNVRQKSGLNRSILKTGWYKLEQTLAYKTTVHKVAPHYTSQRCNRCGMTDRKNRRTQSQFRCVGCGYSDNADVNAAKNILALGTGERINGRGEGRSLSVKRQKELDTTLSLSVA

SEQ ID NO: 34101 - protein, 407 aa, Moorea sp.
MITAYQYRLKPTKEQAGKIDHWLSMLCAQYNYLLAERFNWYEQNRCYINSCPLVCHLPELRENPDYYSQKKTLPIQKKTHPWYKEIHSQVLQDTVKRVKLAFDRFIKGDSKGKRSGRPRFKKRHRYRTFTYPQIKEGCLEGNLINLPKLGKLKVVLHRPIPVREASATPNGFKIKTASITKKCDGYYLILSLEDKTVPEIKADINPASIVGIDVGLKELLTTSEGETVDIPQYYRKSEKRLKVIQKRVYRRKKGSNNRIKAIKQLCIQHKKVADKRKDFHFKTANYLLSKYDVIAHEKLNVKGLAKTRLAKSVLDAGWSSFLTILTSKAVRVAWPTALNAGLLAVPVSAQNTSQDCSSCGKKVPKKLHIRWHDCPHCKCSLDRDHNAAINIKNRAAGQSVLKAQRLL

SEQ ID NO: 34102 - protein, 404 aa, Calothrix sp.
MFNLTYEFKLKPSQNQIGMFEEWLETHRRVYNHALAERKDWYKSRSCQVNTCSLRSCYIIPADAPRPTFASQCKSLTAARKESEYLQRVNAQSLQQTLRRLEKAFVSMWEQNHGFPRFKKQGRMRSFSFPQLGVNPLSNGYVKLPIIGSVKVRQSRSIPDGGVIKQARLVRKVSGWYVMLTVQWDVNPPQPLPHGEAIGIDVGLTSFVATSNGLLVKRPRFFVDAECKLKLLQQRVSRKRLGSNNWKKAQEKVAKLHEYVANCRKDWQRKLSHQICDSGGMVFVEDLNLIGLCRSMLGKHCLDAGFGQFFNILEQTCFKRDVYFQKVDARKTSQICPNCGIETGKKELSERTHVCSNCGYTTDRDVAAAQVVAIRGLAAVGYTVKMLAEGKFIGIPVKQESPRL

SEQ ID NO: 34103 - protein, 303 aa, Cyanothece sp.
LPIANSQRKELENPSVIIPSGANFQFLDIAEIRIVPQNGKLWAEYVYKTQLVKASNLDYLMLLPLIMGVDNWLSSVTTKGKSFIVNGRRIKSINQRYNRFVAKYKQGKSQDYWDDKLEQVTHRRNCQMRDAINKAARFVINYCLKHQIGNIVFGWNDRQKESINIGKTNNQNFVQIPTARLKNRIQQLAESVGIIFTEIDEAYSSKASFLDDDLVPNYGEKPKGYKFSGKRFKRGLYKTAKGWLVNADIQAAANLLKKVATQLGINLARVVKECLTVPKRYELDGLSRSYRKQAEMWLQPIEA

SEQ ID NO: 34104 - protein, 491 aa, unknown
  TnpB Polypeptide
MSRKYRIDRVEVTGATPFLGYDRCGAPMYSRDPERVMSWLGDAWRYRFNQLRSRRSRYLMGAKNVLVPISDNPDMRSIKETREDCSWLGSCPDLILLSCQYLENTEWFAATKRRKTNVKHGRKPGPMPSFRRKRSGLRFTVLRNNGKGYRIVTYSRKHAEVIIGGTNPAGHRIPGDGARFRVHIHFRLSRPVLDSTSIHVNWTARTISFTSPIPERDHTPTGRRTGIDVGVRHEAALSDGRLLDLPLAKLKQLDKRIDKLHRAQARCVREAGYSNAKPYLKHGPSKRYLELGRQARALQERKTRIITDWQHKTSRWLVDRHDLIVMETLQAANMTRKPKPKPDPDKPGQWLPNGRNAKRALNKGMQQASLSRLRGMIEYKSKAAGITFLTVNPAYTSQICHHCGHVAKENRESQAVFHCHACGWRDNADVNAAKNILTDGLRILQAQAVAEARSGRDTSETRIQDTRPQAGQAEPMAVLQRRKTGRTGNTR

SEQ ID NO: 34105 - protein, 331 aa, Solobacterium sp.
  misc_feature (39)..(89): Xaa can be any naturally occurring amino acid
  misc_feature (224)..(330): Xaa can be any naturally occurring amino acid
MSTTSLIMKHGRWNGCGNLFSLEDRRPIWCVIVTTALSXXXXXXXXXXXXXXXXXXXXXXXXXXXXXXXXXXXXXXXXXXXXXXXXXXXPASKEIDGSFDRDKPSHVVGIDRGLRFILTSYDEKGRSIFVSGKNVMRRRQKFNDVRAELQAKGTKSAKRRLKKLAGRENRWMNDTNHRLSKTLVDTYGSGTLFVIEDLKGVSFSEDNLKNRNNGGRNELRSWTXXXXXXXXXXXXXXXXXXXXXXXXXXXXXXXXXXXXXXXXXXXXXXXXXXXXXXXXXXXXXXXXXXXXXXXXXXXXXXXXXXXXXXXXXXXXXXXXXXXXXXXXXXXM

SEQ ID NO: 34106 - protein, 485 aa, Mycolicibacter sp.
MARFKIPQGWTAQAYRFALDPTPTQVRALASHVGAARFAHNHMLALVKAVMDQRAAERSYGVSEAELTPVLGWSLPALRKVWNQRKSSRAPWWAENSKEAYNTGLDGLARGLDAWSLSRHGQRVGNAVGFPRFKTARTARSVRFTTGVIRVEADRRHVTLPRLGAVRTHESTRKLARRIQAGTARILSATVRQDSAGRWYCALQVIVEAKTRPAHARRSPHRVVGVDVGVKADSLLVVATPEGREVARIAAPKSLSAAQSRLRALQRRAARQCGPYDCQTRVRRQPSKRWRATQARIGRTHAHAAAVRRDVLHKATTVLAQQHDVVVVETLNASGMRTAGGACKRGLNRALADAALAQIRRMLAYKASWYGCTLVQADRFYPSSKTCSACGRRKPNLTLADRIFECDDCGIRIDRDLNAAINLARLGVPHWGEQSPAGSGPVAGRGATQKTEPAPAGQAAGDEASTPHHHRVDQTGTAPPQGEAA

SEQ ID NO: 34107 - protein, 414 aa, unknown
  TnpB Polypeptide
MRVKQAFRFELDPNRSQRQALARHVGAARFAYNWGLARCLEALERGEKIPTAMELHRAWNRWKRANAPWWVEVSKCAPQEAFRDLERAFKNWRERRAKRPRFKRKKNFDDNRARLTGSIRVFPRHVQLPRLGKVRTKEPTEKLLVLLETGKARILSATVSREADRWFVSLTCEVERPDPERRDGEPVGVDLGLDCFAVLSDGTRIEAPRPLKRALKLLRRRSRQLSRKQKGSENHAKAALRLARLHRRIRNIRRDFLHKTTTWLAKTKPVIVVEDLNVRGMMQNGHLSRSVADAGWGTFRRMLEYKSSWYGSRLIAAPRAFPSTRSCSRCGVPGPKLSLSQRRFRCSACGFEADRDFNAALNLRIYGLAHLTGSTGSSPGSHACGDPSGGGTGGGAAARSTSHGSLKQEAEHGR

SEQ ID NO: 34108 - protein, 361 aa, unknown
  TnpB Polypeptide
MDLHKKTYLLSKQKTRFNSQAICDIERNVTKCKGTRLEAITVKFNVPRNCKTFTTRSRFFVEFGLYPYKRVAIPMRENRNMQRYRNLTASGWICKTYGLTSDGQVVAFLKKEGQTPNGRNMLGVDVNSKSFALTILTPKGKVVRQLYLGKDIWTKRTRIMLRRDRLRSLADRGRHRARRTLRRLRRKEDNFVKNRIGEVVRDITNLALQHDADIAIEELKRFKPKGHKFNRQVLRMPIFQFKRTLQSRCFDKSINLTLLDPYHTSKWCSHCGAVARKGHAKNYALFKCVKCGQVVNSDRKASLAVAVKALLARKMRDSNQAVFFQFASRQVPVSGLSRSNGADGSNGAVHFQPSPMESPCL

SEQ ID NO: 34109 - protein, 381 aa, unknown
  TnpB Polypeptide
MHFMRKSFKYRLYPTRSQETILAAQLDGCRWLYNRLLEQRKVSYETTKSAPGLYDQQKTIPSLKIEHPALVAIHSQVLQNVAVRIDLAFKAFFRRVKAGQTPGYPRFRGKFRYDSMTFPQCPSGCAVKGDRLALSKVGGVRIVLHRPIEGTPKTCTVRRSSTGKWYASFSCEVSRPDPLPVSTAQVGIDVGLTTFATLSIGPDGEPIENPRFFRIDEKELGKAQRKFAKTAKGTAERRKRRKPVARIHERIAFRRDNFVNQTTRRIVNRFGFIAVEDLEVNRMVHNRCLAKSISDAAWSMFFALLIVKAESAGRTVVRVNPAYTSQTCNACGHRQKMPLSERVYRCECCKVERGRDHNASLNILALGLQSVRDNPVEAAPL

SEQ ID NO: 34110 - protein, 466 aa, Moorea sp.
MQLGYSYKLKPNQQQKAVMNRWLDMLRCSVGAATRTQYNYLLRDRNDSYDQVKAPRLGNYCDLKSGGEACPLTCSVSKNHSVGYPWKKSQKNPRRSTYEAQSSNLPILKKERPWYKSIHSTVLQQTLRQLDVAFAKFFKGETGYPKPKRRSRFRSFKYAPGQVKLDGNKIYLPGIGWMGFYNSRPIPDGFALKSVTVRRKAREWFASLQIEDKSVLPAPVKNNTEIDPVRVKGCDLGINKLVSLSNGKTIANPAKQKSFKRRERRLKLRQKTASRKRKGSSNRRKSYSKVASLHERITNNRSAYHWNVANQLVDGTDALVFEDLNIKAMKSRCKPKPNENGGYDSAKPTLRERNGQSAKRGLNKSISNAAWGELVKKIEVVAAKSGIPVVKINPKHTSQRCPKCHHVSKNNRKKEKFVCTECGYHDDADVNGAVNIKLRGLKKLGIDPTQLPPVRGKVTPLEITAT

SEQ ID NO: 34111 - protein, 482 aa, Moorea sp.
MIETVMKLTLQYRAYLDTNQKLEANYWLRVCRYWYNRQLGDRFDWWDNNRTYVNACPLVCALPSLREKPTRYGQQSQLPNLKTDLIKVVHSGELLDFTRLDSTVLQDVCKRVDDAFKRYVSGDCDRKRSGKPRFKNQASYRTMAFAMVKPKWIHLVRKNWLYIRLPKLGMIKVRMHRPIPDGAVLKRVSLTKKIDGWYINLIVEDSTVPEFTPDQIIPTWENSMGLDAVLRGDDYIATSQNTKYKSAKPLRKSLPKLKTVSAKKSSKRKGSKSRRKLAKRESRIHQRIARQRKDHRYNLAHQLIRTEKKVFFPENLNIKGLTKRNKPKQAADGTYLPNGQSAKSGINKSWLDAAFGEFLTTLDYIASKAGAVVIKQKPAYSSMILSYRNEVIFTDCSIREYYDSVERVLVDRDVNAAINLKRLGLGVFPSIKRRSGKLVISGDMDDSTTKQIVSILRDGTDTFASSFLAYGHAKGQKRRSPR

SEQ ID NO: 34112 - protein, 543 aa, Streptomyces sp.
VGALREVAALFVVPGPAGVAIRDRLRVSDADAAVLTEVGVYLGSLAAGDLAERSRQGRAHDAAGWAVRKRELTGRSSARWAGSITKATHDQWALARRGQAAHMAWLRGQIASIGARLARPLGAKADKRAGLVRGYASRGEWHAKSPRLQTLKARLAVVEADWAAGRVRVVRGGKRLANTRHHLEAAGLDEQAWRERWRAERMFLAADGESGKRFGNETIRVTASGQVSLKLPAPLAHLANAPHGRYVLDAPVVFKHRGQEWLDRVTVNRAVAYRIHHDPARGRWYVTASWQRAAAPVLPLEAALARGVVGVDMNDDHLAAWQLDVHGNPVGEPQRFFYDLTGTAEHRDAQIRHALSRLLHHARRCGVAAIAIEDLDFTEGTSREKHGRNKRFRRLISRFPTAKLRARLASMAAEQDVAVVAVDPAYTSRWGAQHWQKPLTNPTRTISRHDAASIAIGRRALGHPIRRRTTPPHDDQSDRRGHRTVQARPDTRRREEPRPRIPGPRTRFVSPDTERKRATRTSNTVRGIRSDQIWVQDSLLLTD

SEQ ID NO: 34113 - protein, 288 aa, unknown
  TnpB Polypeptide
MVRVYRYRLKPTPAQERALDETMRLLRQLYNAALQERRDAYRLQGRTIGLYEQKREIKEVRALCPEYAAIHTHLLQDVIIRLDRAYRAFFRRCKAGEKPGFPRFKGRGRYRTFTFQDAKNRNGARIVAGGKRVELVGIGKVKFKQHRPLEGRIKQVSVSLDGDGHGYVAFLCDEVPGKPLALTGASVGMDVGISTFAALSDGVMVDNPRFYETAQPSIRRVARIVARRKRGSKRRRKASVFLQKQHARVQRQRKQFHHETAKGIVQGYDSIAVEELNVKGLAGGMLAK

SEQ ID NO: 34114 - protein, 416 aa, Actinopolymorpha sp.
VSIRQRLYPDPGQLAGLVEHCHHARFVFNIGLEQRSMWRRWKHDRGTHPEYGDLNAARITTASQMRELAQLRGELGWLRAGSSSVQQAALRDLDRAFQNFYAGRAKYPQFKRRSEREGSFVVRDLTVRRLNRKWGVVTVPKVGQVRFRISWMWADIERATSARVTHRNGRWHIAFTTPAAEKITAESGAVVGIDRGVANTLATSEGRMIQAPSLTDPEKTRFLRLQQRLARQQKGSKRRAQTLDRLATLRRRLGDRRTDWVEQTTTGLARTYDLIAVEDLRVQNMVKRPAPKPDPVHPGVFLPNGARAKAALNRAILASVWGRFLTRIEHKMPEGTVLRVDPKNTSRTCAACGHTAASNRESQAVFACQACGHQAHADTNAAVVILDRALGTTAPGHGVSGRRSPAFAGSANQPAA

SEQ ID NO: 34115 - protein, 451 aa, Anaeroplasma sp.
MEGIMAVVSYNVEVINNTNKLRHIVANTLSLYNSALNYVCDVVLMHYDEIKELNNLERRMYLEHLIHNTKNNIAKYDFDSMYYKLPCYLLRDIESKAIGHIVSYKSNLDNYKKERYNKISNGKKFKKREPSLSKCNMLPSFYKDNMYKVISDNKIALKIYEDNTWKYEEFKLKKNDLKYINKINGKRYNPEIKIIGKKIYIKFSFEIEDVKLQDKELNKRIICGVDLGVNNDATISIMNYEGTILGRHFINTNNKDLMNHLLNKKRKIQRNSGNYKYLRNLHINNKINSINENIVNHTVNQIIKICLSYGVDVIVFENLRHKFKRAKRSFRARLHRWRKIAIYNKAYEMAHRNGIRVSTVNPNGTSRYAYDGSGEVERDNDNYSICKFVSGKIYNCDLSASYNIAARYYIRETLKPLDESSRSKLETKASLALSGTKLTYNTFKVLLNVIN

SEQ ID NO: 34116 - protein, 392 aa, Actinomadura sp.
MIKSPIVKLVIQVRLLPTPEQAAALTDTLHQVNIAASQVAAVAFEEFGLSCRELPLRTLCYGDLKAGGLGAQAAQHVIKRVVDAYTTLRGNIRNGHLGGPASRRRRKAESKPVVFRLDAAHTFDDRCLSWQLDAGTVSLWTVAGRCKNLRFACSPDQAKMLAAHRKGESDLLHRDGKWLLIATCDVSEPQVCEPADWVGVDRGIVNLATTSDGDNHQGRRLSRYRRWQARKRVELQATRTRSAARLLRKQARREARHARHINHKIAKQVVAVAARTGRGIALEELSGIRARATVPRDQRARLSSWPFHQLGAFIAYKARRHGVPYIEVDPAYTSQRCPRCGHTARNNRPSRDHFECRRCGLAGPADVVAGVNVRDRARSAWVFVNMPQPAPT

SEQ ID NO: 34117 - protein, 310 aa, unknown
  TnpB Polypeptide
VALKKKGRKVGRLRYKKYGQFKSFILNQSGFKVKTTGNRLDNLYVSKVGDIPIRLHQKIEGVIKQVVIKKYRSGEWYALVCTEKEIQSTKQTPQSAIGLDVGLLHFLTDNIGRQIENPKFYKQTLKRIKKEQRRLSRKKKGSNNWLKQKKRLNTLYDKLTNQRDDFLHKLSRYYVDAYDLIAVEDLNITGMVRNRHLAQLILDSSWNKFFFMISYKAESADKVFVKVDPKNTSKECSTCGNIQDMPLSERIYHCSACDATADRDVNAAINILKRGIIRQGLPSTLLEIILLPTPIQVSASAIVEGRSPFR

SEQ ID NO: 34118 - protein, 364 aa, unknown
  TnpB Polypeptide
MALRTQKIQLNPNNKQSTLMSQHAGYARVAFNFALSSFKVGLDKDQWRDYREIKREFNAVKREKFPWCSELSQNASKNAIHNLGDAVTRWKKGQNNFPVYKRRDGKCSYQADNGQGTVDVYKKRINLPKIGWIRMREQPQWTGEITKVVVSKHNGKWYASITVRRLESNNYKHQPLLFDDSKQPIGIDVGINTLATCSNGDTYDNPRPFKRYERKLARANRRLSRRQKGSQNGYKAKAMLSGVHARISNIREDAHQQISTKIVRKASAIGIETLNVSGLLKNRKVAKALSDSALSRFLTMLKYKAERRGIPITEADRFFASSKMCSNCGHKKADLTLADRQYHCSECGISIDRDLNAAINLCPT

SEQ ID NO: 34119 - protein, 425 aa, Cyanobacteria sp.
MLNMTWEFKLKPTAEQVCEIEHILDVCRNVWNFALRERKDWLNSRKSPVNACSIRQEFILPADEPFPSYHVQSKGLTVAKSKYPRLKTVNAQVLQQVLQKLEASWESWRLKRSGLPRFKKPNRMRSFVFPQMLKNCIPPTPLGKGGEGGIKLSQLGWVRVRWSRKIPDLFQVKQARIVRKASGYFVMLSLQADVDIPDVMPHGHPVGIDVGLEYFLSTSDGEQVKRPRFFFNLHRKLKLLQRRLKKKQKGSNNWLKLQKKIARVHQRIADTRKDWHFKLAHHLCDGAGMIFVEDLDFRIMAKGMLSKHILDAGLGQFVDRILPWVCWKRDVFYGKVDARGTSQECPDCGAEVRKDLSTRIHHCHNCGSIKPRDVASGQVICTRGQRGIKNACGVEATGDRVTDSSWLAVKQEIFGATQGISTHNL

SEQ ID NO: 34120 - protein, 411 aa, unknown
  TnpB Polypeptide
MIVREAKLLHGTKEQYQSLDEAIRTAQFIRNKAVRYWMDNQGVGKADLYVLCKELAKEFPFAKKLNSAARQASAERAWASISSFYSRCRRGEKQKGYPKFKKHCRSVEYKVSGWKLSDDCLKIVFTDGFNAGSFSLYCNKETREDLFRLKINRVRVVRRADGYYAQFCFDVDRKEQGEYTGNVVGLDLGLKYFTKDQNDNAVIYPQFLRKSESKLKKAQKRLSKKFVKGVKPQCNNYHKARKRLGKIHLKIQRQRKDWAIKQARNVVASNDVVVYEDLNVSNMVKNHSLAKSISDASWYQFTQWLDYYGKIWDKAVVAVSPNYTSQDCSHCGHRAKKSLSTRTHFCPNCGMEICRDTNAAINILKKGMGILGMAWQNSTQGHWESASEEGKHGEKTASTMGGKPTIASGLP

SEQ ID NO: 34121 - protein, 442 aa, Okeania sp.
MTKKTKKQTKNYGCQQVLLHPDKDLRAVLEYLCGEANKVFNCSVYYARQVWFKENRFVKKGELCRPMKWNRHFNAMYASSVQQICNGVVESFSSFRELLKLFWKGELANKPKPPNYRKPGLFTVSYPKKWLKLTGEGIKVPLGKKVKAGFGLEAFYIQMASNLDWDSIKEIRILPRHGCFYTEFVYEMKTQSVKLDTGQALSIDHGLDNWLTCVDTQGHSFIIDGKHLKSKNQWYNKQMATLKENKPQGFWSKRLGEIAEKRNRQMRDAVNKTARLIIKHCLKHGIGTVVFGWNTGQKQSIELGTKTNQKFVQIPTARLKNRIEQLCLLYGLQFVETEESYTSKASFLDNDVLPIYGEKLGAGTRNLSPSKEAPSRRPDNWEPSGKRIKRGLYQSAAGYLINADCNGAANILRKVSGRLNLNLSQLTRGALTTPLRVHFWTA

SEQ ID NO: 34122 - protein, 338 aa, Lactobacillus sp.
MLKSQMAQSVIRTVIARYKTVKTQMIRNPYKYQDINTGEWYRETRDLTWLQKPIAFNRPQVDLQRNRDWSYLSSGQLSINTLDGRVKVNPICHGFDQYFDGTWSFGLAKLLKTGGKWYLHISATKTVANFDNQTVKHVVGIDRGLRFLATTYDEQGQTAFFDGKIVMRKRAKYQKLRAKLQAKGTKSAKRRLKKLSGRENRWMTDVNHRLSKTLVQKFGSNTLFVLEDLTGVSFERTDLPKALRNQNKSWAFYQLAQFLTYKAHLNNSEVIEVSAQYTSQRCPKCGTIKKSNRNHDLHEYYCTNCDYRSNDDRLGAMNIQLFYWVRNISVDKNNLNLN

SEQ ID NO: 34123 - protein, 368 aa, unknown
  TnpB Polypeptide
MILSLKIRLKLTKEQEILCKKSVGVARFVYNLMISENNKIYKEYLLNDKQGTYPFVSRYDFSKRVTVLKKLPDYSWLSEVSSKVAVQSCIDCENAFKRFFKGLSNYPKFKKKGISNSFYVRYDSIKVTQRGFKCEKLGEIKTSEPIPKADKYHNPHIVYDGKYWYITLGIDVPEKANENNTGETLGIDLGIKTFATVSDGTVISNINKSKPSKSIYKKIKYFQRKLDRCKKGSNNRIKVANKLKLLHRRLRNIRSNHIHQATAMLVKTKPVKIVIECLNVLGMLKNRKLSRAISEAGFYEFARQLEYKCKLHGIEFLKADRFFPSSKLCSKCGCKKDKLKLSERTYHCEHCGNVMDRDLNAAINLSYL

SEQ ID NO: 34124 - protein, 301 aa, unknown
  TnpB Polypeptide
VSCYGFKTRNGGLEIPIARGKRLSIPLTKHTLNVISQLGVKVRSFTLTKNRLSLCIALDVAKLECTSTVGVDRNLRNLTVGNEQGTSHYDLSKAVRIASTTIRIVASFKRDDSRIRTGIASKYGMRRTSRTGHLLHATTKTIVAAAVQRREAIVLEDIRGIRALYRKGNGQGRKDRGRMNAWSFSEAQRQLEYKARWTGLPVIRLSRRETRGSSMTCPRCGERLQSDKRLTRKLRCSKCRMLMDRDRIVAVNLAWRRRVRFDRSRAHEGPQGGAVEAVEGNPTPTVVPGVDAPKLTQATKS

SEQ ID NO: 34125 - protein, 547 aa, Lachnospiraceae sp.
MKRKPKTEYQKKLDTYRQLSSRHVLVLEADMSEDDKRTLFHEAELIRKAGNELTGIMKKRYDQLIRTKHYRELKAAYGKAAEKGDDEARKACADEMAQMQKEYHVTWDYCRTAMIPIGKRYGIHSVFALTRAEDVWRGVEKCLYGDGRTLHFVRQGELPNIRAKQINRTITVKVKDESLYFSHRFREKQMTIRISSPDRFQTEETAAVMHYLEAPEAEDRKAVQTLSGERVCIDTFRPCYVSFICKTIRGKLRVYIHLTIEGHAKPKYNKDGTLRHTYGRGKIGSDIGTQTVAYTSDKEVGLKNLAERGSSILENERKERLIYRAMDRSRRAMNPDNYNENGTIRKGRKQWVESNHYKKLKTRHREMCRINAENRHYAIDEDVNHLRELGDVFITEPKNSKKLQKRAEKTTVNERTGKKNPKKRFGKSIKNRCPGYFQGKVQQKFENTGGIYKEVPFDYRASQYDHTVDDYIKKKLTERMFYLKNGPEVQRDWYSSFLLYCYDLPSQSLDKQMCKDEFGRLYQKEKELLAWIKDNKIKILNSGIKIA

SEQ ID NO: 34126 - protein, 448 aa, Halogeometricum sp.
MEVIRTVKVKLDVHDKRCNDLHQTKNQFLHCANTTAEWAWRHPNNYCVTSKQKAENALYERLRNETELTANLVQKGIRRAIEATKSGVARLKKGDNTSQPHFDAWSVVYDKRSATFHRDHVSLSTVNGRVECDYVIPNNVEGTPIGKYLLNEDYEFRMSTLQYDRPTESFYLHARMRRVESNEQSTTTSDIHQTESDAAHQNAQRSEDAKHRTVLGVDLNVDGSLAVTSTGTFIGNADEMNHRRREFEKTRGSMQQTGTRSAHLSIQSINDREHRWMQDELHRASNQILEDARDHGCTHIAFENLTDIRKRMAGAKRFHAWAFRRLYQYVKYKAQMYSIEAEQVSPVYTSQRCSSCGFTHESNRRSKHQFVCRKCEYELNADYNASKNIARKLLKTLHSGQTSSGGGAPCQCALTSGTLNLNGDYTASVDSTAEGESTDKPTTEVVGN

SEQ ID NO: 34127 - protein, 439 aa, Halogeometricum sp.
MLEFHRTHRAKILNHAQVEEPLDRHGWSTSKLWNVANYHSRKEWDETGEIPDHGDLKNKLKTHQKYKGLHSQSSQRVLEELAEAFNSWYEKRKSDDRANPPGYRKENYYDQEGRRVHEEHPRSTVTWKQNGIKHDAKNNRVRLSKGANHKEHPKAWEYILVEYETRPGVTIENLQQVRAVYDKAKGCWELHLVCKDEVETPNAPGEETAGLDLGICNFAAVAYSTEDADLYPGNRLKQDGYYFPKEIAKCDDSGGERATRLHAKWSERRTHFFHSLAKHIVERCVKKEVGRINVGDLEGVRENDNGESKNWGKHGNLDLHGWAFDRFSNILEYKAKVEGIEVVEVSEHDTSKTCCVCGRVDDSQRVERGLYVCEEHGDAFNADVNGAENIRLDINQSNSESSASLDEDRSTGWLAQPAVYLHNLSRGFQPRTEVVDCKP

SEQ ID NO: 34128 - protein, 261 aa, Halogeometricum sp.
LFWDENAQTFRAFQPVTIDNSRLAHPLADETAALDIGANNLVACTTTTGTQLLYEGRDLFERFRETTHEIARLQSKLREGRYSSNRIRHLYRQRTKRRDHAQDALARDLIERLHSEGVSTVYVGALGDVLETSWSVEANAKTHNFWAFGRFVKRLACTAEEYGMAVEARTEAWTSQECPRCGSTTDTVRHQDTLTCSCGFEGHADLTASRTFLLRQLDDTQLRLMAQPVRFEWDDHDWSETSHSHRPKEVRTNPQVASVGR

SEQ ID NO: 34129 - protein, 419 aa, Halogeometricum sp.
LHGFVGTVVTATATKTLEATLAPPTAHKEQRLQRTVATYRRALSESFESGADTQTAVNDVVTSYNLTSYAKDALKNYVPQLRRTYNASELDDDHPVRFTNRGFRIDHSDDRAHEFCWRVPQAGRGNAFWIPLRINPAQESLWAELLGGDVTVGEFRLQEHRTTWVLHVTVEYEVAEPEEPDDPTPVGFDIGESKLLTGCACQDGTPTQPYIYDGGRARHLRKEMFTTLRRLQARHAAEWRVDERFDHYQNALTDIVEKVSREAVEYARQFENPVIVLEDLSYIREHLDYGKWMNRRLHNWAFARLTGRIEDKARDAGIPVRFVNPAYTSQTCHACGHLGSRSSQAAFRCTNDECWVTEYQADINAAANIAGRLNPWGERCALKPHTDDSPRDGSACDSTAGHRTPSPKLGQTTLAAFQS

SEQ ID NO: 34130 - protein, 424 aa, Burkholderiales sp.
MQRRKVTLKLDPNAAQAARLEAWTRLHCELYNAALEERIDAWRKAGKSISFYDQQNVLPQVKADRPEFVELGSHALQQTLRRLDLAFQAFFRRVKAGQTPGFPRFKSAKRFSGFAYPDPAGWKLMQHGGRGATLRIGSGEAALSIRARGRHRFGVEAKPNDITLTRRNGQWFVSVTLRVPDTACARERTADLLRGVDFGIKDWATFDDGQTIPNPRWVREELPHLAALQRERARKRQGSLRHRRLGESIARLHDRIGNLRRDFVHKETTRMVQQCAVLATEQLAPKNMSRSAKGTVEAPGRRVRQKAGLNREMLSAGFGMAHQMLAYKAEEAGTRLHLSDTRQIKPSQRCAACWEIVPKTLAQRVHVCPHCGHTAPRDQNSALVVLIDANTPGTGVAARPKPLPRQRGKSKSVTRETPTTTPCV

SEQ ID NO: 34131 - protein, 416 aa, unknown
  TnpB Polypeptide
MKRTNIIELKLTKQQARILKEILIRSSAIWNIGNYEKRQAFFKKNKIPSNFKLAETLKTHPLYKNLGSAYAQQILNKLQEAWNSFFGSIKSKKVKNKVGLPRYFKNRKTDQTTPSLLICRNDCYRIDERYIYISCPKDLKQKYGVKGLLRIKYNGVLKWSGTQKRMEIKYIPYIKKFYAHQVVENKIQTTCIKKRSKHVSSGDIGIKRYLVNYIKNTKDFVVLYPSEHVFKEYMKLSKKIYDLQSIAKRENGRYSTRRIRRLFLKRKRKLANYMNNIIADLFRKLSNNQVSRYIVGDLSHIRNAQLPIYFKNKKKLNTMIQNFWSFELLINKLKNKCEEFGIEFEQINERDTSSTCPICRKKVKPNDRTFKCKKCGYKQDRDVVGSIQILNKYSQDNNMNLRVENHPIVSSVLIEH

SEQ ID NO: 34132 - protein, 360 aa, unknown
  TnpB Polypeptide
MQAWFAYNWGLAIKQERYKATGKSPSAIDLHRELNALKKTELAWMYQVSKCAPQEALRNLGRAFAHFFRRWKLKQGGQYTGKLGFPKPKSKKQGLGSFRLTGSIAIFPEAIQLPRLGRLRLKERGYLPVAGVKVLSATVSEQAGHWDVSVQVEQDQAVPTNTGPVVGVDLGVQALATCSGGTVIANPRHLKRRLNKLKRLHRMVSRRTKGSKNRKKAAKRLGTLYRKIANQRRNTLHQVTTMLAKTKRVIVIEDLHVSGMLNNHHLAQAIADVSFSEFKRQLLYKARWYGSQVILASRWEPSSKTCSGCGWRDANLTLAERTFHCQACGLVLDRDLNAAINLGKLAGSLSDSLVRRFGGW

SEQ ID NO: 34133 - protein, 432 aa, unknown
  TnpB Polypeptide
VVFPLDRTNVFRLKPTKQQEQMLIKLCRLSVALWNSINYKRRQSLIKGSFTWDVSDVIGRFSDVLGKSITWRIVKKNNSTWKAYFALRKKNKGSKVGLPRYWKSRDKNASWDTILRTEIGRNDYEIVWGTNHRKSYLIINWPPGEQLKIRINGNPRWSGYFGRIEIVYDGVTKRWYCYQFVASDHVPELKKNSTKKCYVDLGVVNIITSWIEDSSKIIAYSGRPLLGDWWYWTRRIARYQSALNKRGIKTSRKLRLLYRKREKRFKQTINTIVHRFVKYCHENGVSEIIVGDIHNIREDIKTRSKKINALLFNFWEYNYIINRLKVTAENFGIDIRFIDEKGTSSYCIRCGSRNIIRKGRLVKCNSCGLEAHRDVVGVLNIAMRYSNKRPRKLIAHPFVISILPRPFLPKKREDDNIIKLDIQPTDFMRNIK

SEQ ID NO: 34134 - protein, 440 aa, unknown
  TnpB Polypeptide
MQVQKTIKFKVGELGKRKQGRLDFVLNNGLSATKEFLRLALENKTTSNIKLHRLGYFEIVKKYNLPACIVHQARNKAREVYKSWKTNKFRLREEIKLPKLKSLRVRFDNVIFQLIETDNKKYPYFVSFLCERGRSGKQDNRIYVPIIANSEWQKEYIFGLISKKYKKGSADLVKKGEDYFVHIVIGKEIYIPQLNSSFNPIGIDCGINNLAVVNVSGKPKFFSGGEVLWKKQNYGRIKSILQNKKATKKLRQICKKEKNFVDNINHQISSWVIREAKKVINPVIVLEDLKYIRETTKVRKKQRYAHNSWAFKQLQNTIRYKAYWEEIPVIFIDSRYTSQICPKCLSVNKRQKHNYKCSYCGYQANSDFIASINIQKRFLEAISFPENSTHKSAERDDLLMFNNSPKICELNLRVSPPKPKAEAEDYNSVKVLGIQNTNIL

SEQ ID NO: 34135 - protein, 371 aa, unknown
  TnpB Polypeptide
MLKKTYKYRLYPTKKQTKALQLSLDACRWVYNKTLEIRKTTWVEKQESLSLYDTSNLIVQWKTENPNLVNAYSQCLQNAQLRVDLAFKAFFRRVKAKENPGYPRFRGYDRYDSFTFPQSGFELIADRLKLSKIGSVKVRKHRQIEGVIKILSIRRTNGKWYACFSCEIVNPEPLPKIEAVVGIDVGLESFATFSTGEKIPNPRFFRTDEVNLAKAQRRLSKQEKGATKRKKAKKTIIRIHEKIANRRSDFAHQLSHRLIKENQVIVFEKLDIKEMMNNHTNVFGHKLNKSISDVAWNQFMNFTTYKAECAGRTVVFVNPRNTSKMCSRCGQLVEKTLADRVHRCSCGLVLDRDHNASINILALGMKSLASA

SEQ ID NO: 34136 - protein, 455 aa, Geobacter sp.
MELVNRKITYRMYPNSEQEILLQDTLGLHCRVYNTFLEEHKRCYEQGLGSLTFGRMCRELTQWRATVPALDCLNAQSLQVTAKRVDRAFDGFFRRLKTGDTPGYPRFKQPHRYPGWGYKTHGDGWRLFETPAPEGSKKKPRSHSLRLSGIGTIRLRGRGRFTGIPKTCEIVRKRDTWYISVTFDVMPKDIARNPGTETAAFDWGVTNLLTIAKADGTIETIDNPKWLRKRLNALATLQRVVSKEERKVKASIGLDPDQPIPKGTRLPLTLKLKRLYKQVSALHGKIANQRHDLHHKLSAFLVSRFGCFASEVLDVESMVKKPAPKADPETGGFAPNGARRKAGLNRNILDSAPATLLAMISTKAEEAATKFILADTKTVKPTQRCHKCGTEVPKELDERWHTCPVCYCHCDRDENAARTILRWLLEGCFWKALPWAGTVQPCTSGMEETPTIAPA

SEQ ID NO: 34137 - protein, 319 aa, unknown
  TnpB Polypeptide
MFQGRKSGREVGYPRFKSKNRCRPAFAYTTGSFGAIEDDPYGLKFPKIGRIHTFENVHHRLKGAKVIRMTITEEGGRWYASLTAEADFFKLAKETGQKVGVDLGIRQLAVLSDGTVYENPKHLARSERKLKREQKSLSRKQRGSNRYDRQRRKVNRLHARIRHQREDRIHKMTTDMTEKYDEIVIEDLYVKGMVRNHRLAKAISDAGFGKIRQQLEYKCAQRGKKLTVIKRFEPTSKKCSHCGHVKTKLALSERTYICEACGMVMDRDLNAAINILAAGSASEAENGRGEDVRPSLSADLCEASTRQSLELSLATGHEN

SEQ ID NO: 34138 - protein, 400 aa, unknown
  TnpB Polypeptide
MAEEPGAMRRAFKFRAYPTRPQEGRAVRLLVDHCDLYNAALEERSEAWRMRQVSVTYGMQSAQLKDIRRADPAGQGRHSFTAQQQTLRRLNTVFAAFCARARRGKAGYPRFKLYSRFSQVGFVAGDGAKWSSADARGWARAAFQAVGSVKVGQHRPVLGTVKFLQLKREHRRWYVIVITDTEPTPLPASGRDVGVDVGVARFLTTSDGHITANPKFLAASAGVIADLQRRKERARRASGNRKRLRRALAKEWRKVGNRRRDFHHKTARALVNTCDVIALEKLNTAGMTRRPAPRPDPDQAGAVLPNRATAKAGLNKSILDAGWAQFTNILTAKAESAGRRVVFVNPASTSIECHRCGRGCARPRQDTVICPRHGKMDADLNGARNIAARAGLGSGQALTA

SEQ ID NO: 34139 - protein, 454 aa, Lachnospiraceae sp.
MPVLTTETRLTEKEAHDIMGYIQKYRVDYGIIQRYVWLVIVRQKGVINKSELNTEIQRKFSVTKRTANSVIYDMKGRYKALQELKKTEKGQLKNKILCLEQQAEKTAAVVNILKKDAAANRLDGKQLVKYRNLKKTLYYKHQRIQKFRDRLAQLEKDMRSGRYSLGFGGKKTFDKQHRLEENGYRSHEGWYNDYRKRRDCNVFYLGSRDETAGNQMFQLSPDAEGYDIKIRKDGKYDSDGRYVYGKCRFKYLDDELRESLRNRDRPVSYRIKIRGTKIYLQAIVTLDMAKRPVMTTMVNGAIGLDFNDGHIDMAETDGKGNLVSKARYRLKHHGTGGKAANEMRQVIAEIGKYALSKGKSIVKENLSFVKKKSQTEKGSGRRYNKMLHTLDYSRYEDDIRNMAVRNGIDLIEVNPANTSRIAKKKYCQIRKIPVHNGAAYVIARRGQGYKDKAV

SEQ ID NO: 34140 - protein, 383 aa, Bacillus sp.
MIARNVSDEHDVENQKNKGMKRMSQTLTVTVKVKLIPTKGQICLLEQSSQEYIKVINTLVSEMVEAKKSTKKSTKDIEANIPSAVKNQAIKDAKSLFATKVKKSHYKIIPILKRPVCVWNNQNYSFEPTYISIPFKVNGKSTRVKIRALLSDKNNRNLNLLKHKLGTLRITKKSNKWIAQISVTLPINKRTGTKILGVDLGLKVPAVAITDDDKVRFFGSGRHNKYKKRKFRSVRKKLGKDKKVKAIRRMDDKEQRWMQDKDHKISREIINFAIANHISVIRLEQLTNIRQTARTSRKNEKNLHTWSFYRLSQFISYKAMIAGIQIEYVNPAYTSQSCPKCAKKNKAQDRKYKCPCGFKTHRDIVGAMNIRCATVIDGNSQSA

SEQ ID NO: 34141 - protein, 358 aa, unknown
  TnpB Polypeptide
MAKAVIRTAKNQLKLLRESARYQFNGLYKRRKTLYKKVQKYKSMLSMSSTSLKQRKLTKLRLFWTQMRLNKVNQLITNGLKPHLTFGTKHLLKTNKQKFFAKRDNQVVYIGDKNETCGNQQFQVQFNSKYNRFDYKLRLDNQWVSDSEKYIFGSFALKNKEARNDILKTLSDKKSNPLTYRIIKREGTLYLQIMYRREVVDITRTNHGVLGVDFNKGFISVSEIYSDGNLKSLTRYNYLHTGKSTKTRTSMLELVAKLVTQATNIGKDIIIEDLVSLDSNKKQEKTTSKDYNRMINSLKFGLFKRCLLSKAAKEGVAVHSVNPYYTSKIARKSYTNRMKLNVHDAASYVIARRFYQYD

SEQ ID NO: 34142 - protein, 543 aa, unknown
  TnpB Polypeptide
MKEKIYTVPVNDAFALDSECPICSMFEKLENDAVEYAMGPSYMEDDIREKTDKMGFCSRHIKKIYEQNNRLGYALVMKTHMDYVIKQIESYSYDKGAGKTLLKKGKEAQVCSYIDELEGKCFVCDKVEDTIERYIDTVFYMYKHDKDFVEKLKNCKGFCTSHYGLLMKRASGKLSGAQYTEFTELITKLYIDNTKYISDDLDSDMFTNTEVNYKAAWNMFRKVHTAGKPKFKRKSRPVQSYSTSNHYSSATVKKHGGTPSLYNGSIKFLDHNHIQLPKLGSIKVKLHRSLPTNRLVRIATVTIKHYATGQWTVSLLLKSDEPFHQALPNTNQAVGIDLNTENFLTTSDQKQVANPHYYRALKKHLAKHQRILSRRARRAKKEHRPLWASKNYQQEKLVVAKIHQRIRNRRLNFLHETSTALIKSHDLVVAENLKSKNMLKNHALAMSISDVGWRTFLGMLEYKAPAYGRTFVEVNPAYTTQTCYDCGFVMGSKGTKRLTLHDREWTCPNCHVHHIRDHNAALNILAKGQRLLTRPDQNLEAIY

SEQ ID NO: 34143 - protein, 407 aa, unknown
  TnpB Polypeptide
VFAIDQWYHSEVIRRQGYRFRLKPTQTEDALLRRFVGCSRFVWNEVLALNELRHERGEKHLGFKAMCEYLVYLKHEYPFLREVHSQPLQQTLKDLATAYQRAFDPKLTARFPRFKKRGRPQGIRFPQGFAIDGSGVSLPKVGWIGFRKSREIEGAPKNVTVSCDGDRWYVTIQTQREVDESVHSSDSAIGIDLGVARFAALSDGGFVEGTNAFKKHEKRLAFYQRRMARKVKFSANWRKAKATVSRLQRRIGNVRNDMLHKASTRISKNHAVVVMENLQITNMTASAKGTVDNPGTNLRAKSGLNRRILDQGWGEFRRQLGYKLEWNGGALLLVDPRNTSRTCAQCGHVSRENRQTQSAFRCVACGHAANADTNAAINILRRAGSARIACGDSPLGESAKQETQRVA

SEQ ID NO: 34144 - protein, 201 aa, unknown
  TnpB Polypeptide
LSILVDGDLTHKGVHDTNNCIGIDLGIKDFVITSEGEVFNNLHFKKNETNKLKKLQKQLSRKQKGSNNRNKARLKLAKVYKKINDKKQYYLHYVSNTLINENQVICMENLNVKGMMKNHKLAESISEMNFGEFRQMLEYKARWYNRKIVFVDRFYPSSKTCSHCGFKYKDLKLSDRFWTCPECNTLHDRDINAAVNILRYL

SEQ ID NO: 34145 - protein, 371 aa, Bacillus sp.
MPTITAKIQIYVSDNQAESLKITTKAYRKACNWLSKHVFETKNLNQVNLNNLYYSDLRNQFGLKSQMAQSVMKTVIARYKSAKSNGHKWSLIAFKLPEYDLVWNRDYSLTQNQFSVNTLDGRLKLNYERKAMKKYFNDTWKFGTAKLVYKYKKWFLHIPMTKEYQELEFANVNNVVGVDLGINFLATTYDSQGKTTFYNGNIVKHKRAAFKATRKQLQIRQTPSARKKLKQIGSRENRYVTDVNHQITKALVDKHPRGTMFVLEDLTGIRPTTEKVRGKDRYVSVSWAFYQFRQMLEYKAELNGQKVIIVDPKYTSQTCPKCGHIEKTNRNKKLHIFKCKNCQYQSNDDRIGAMNLHRKGIEHIGVVTTEV

SEQ ID NO: 34146 - protein, 371 aa, unknown
  TnpB Polypeptide
MLKAYKYRIYPTKEQKILIEKHFGCCRLVFNLALEIKQYAYKTQHKYLSSFDLCYQLPDLKKEFTWINEIDSQALQSSIKKLDIAFKNFLKHGAGFPKYKSKDNKQSFQCPNNTRRINWKENTLDLPKIKGIPIVLSRTFKGKIKTITISRTPTYKYFASILVDTNIVIPEKPQITENKTLGIDLGLKDFAILSNGEKFANPKFLKNNIERLKVLQRRASKKMKGSQNKKKANLRVAIKHENIKNKRDDFLHKLSSRLICESQADTFVFENLSSQNMMANHNLAQAISDVSWAKLVEMMKYKGEWYGKNILFIDRFAPSSKTCSNCNFVNDKLTLSDRDWQCIVCGVTHDRDINAAKNIKFMGLKKVKIWD

SEQ ID NO: 34147 - protein, 372 aa, unknown
  TnpB Polypeptide
MQLSIKIKLIPNQEQRDILLKTIEAYNNACNFVSQIAFENKTASVVKIHRLCYYEIRKRFNLSSQMAVRVVGKVADAYKIARNKKLNLKQPHKFAKYGAVIYDQRILSWKGLEKVSILTLNGRQVIPIVLGEYQQAKLVYPRRGQVDLLYQNGNFYLRPIVDVPETPEKVNKDFLGIDMGVINLAVDSQGETYSGKEVDNKRVKIDKLKSALQKKGTKSAKRHLKRLSGEESRFRKDINHCLSKKIVEKCQRHSLSLAIEDLAGIRQRATVRKAQRRQHSSWAFNQLRRFLGYKAKLAGVILKVVDPHYTSQRCSNCGYVFKHNRKNQSNFTCRSCGFSANADLNGAINIAQLATANLRIVTPQGSYKPLSL

SEQ ID NO: 34148 - protein, 207 aa, unknown
  TnpB Polypeptide
VLYKKAQAKVSKLVARVANQRQNWVHQVAVEIISSNSFIATEKLEVKNMTSIAKKGKRKKQKAGLNKSILDVGFGMLRSTIKYKVEQIGGVFVEVPTRQVKPSQTCPKCGNQHKKTLDKREHECGVCGYVQDRDIAAAEVMLYWAKGTLPGLGTNLADADLSGSTSRTRRKAGSMRQLGEKKRQKSQSNSANIKLEDAETSSSSEAN

SEQ ID NO: 34149 - protein, 222 aa, unknown
  TnpB Polypeptide
LYNAAVNNRFTQYQKFNHKVDYFEQQNCLPAFKEVWIEYKELPSHALQATLKRVDFAFERWFKGLGKRPRFKSIRHYSGWTYPDPAGFKVESNGENGYLNLSKIGKIQMRGQAKYWGKPTTCTIVFRNGKWYASITVNVLDQGLKPETLPIGALGIDLGCKSALSITDGENHQQIDAPKFLRNAEYKIKKASKEKRRKRAPNKNKKIKASRRYSTSRCYEVQ

SEQ ID NO: 34150 - protein, 382 aa, Actinomadura sp.
VQLRYQFRLYPTLGQQQSLARAFGCARTVFNDALRARQEAHGAGLPYIKDTDLQKQVITAAKRTAERSWLAEVSSVVLVQALSDLHTAYRNFFASVSGKRKGRKVAPPRFRSRKDRRQAIRFTRNGFRLRPNGRLNLAKVGDVRVRWSRDLPSEPSSVTVIKDAAGRYFASFVVETTDGPLPEAAAEVGIDLGLTHFAVTSDGRKITSPKFLRRAERRLRKAQQALSRKQKGSANRHKAVARVARMHARVADARRDHHHKLSTQLVRDNQAVYVEDLAVNGLARTKLAKSVHDAGWSQFVSMLEYKAARYDRTFSRVDRWFPSSKLCGACGTVAESMALDVREWACLCGAVHDRDVNAANNILAAGRADRLNACGGTVSPPA

SEQ ID NO: 34151 - protein, 204 aa, Massilia sp.
MFRGHRIRLDPNNVQATYLARAAGTARFSYNWALTEWQRQYEACKTDPDLPKPNERALRRQLNAIKRVQYPWMLAVTKNAPQMAIMELDRAFTNFFKGRARYPTCRRKGRDDRFTLTNDQFRIKEKRIWIPRLGWVRMWESLRFAGRCVSASISRVADHWYASITVDTSEPLLPSAENQGVVGVDLGVTTLATFIVDPESETVV

SEQ ID NO: 34152 - protein, 429 aa, Halophilic sp.
MKYSPRYRAFPTTEQREAMDWTRNTVRQIYNHALREFNQIPEDAGTLRQRVWSVRDTLPAMKNWWPDLKQVYSTVLQKAIERIRDNINNLGKLKAKGYNVGSLNWKKPREYRSFTYRQSGFELDKKSGPNGRGLLILKKLKGKTREIPIRLHRDLPDHEQIKEVTLKKEPTGTWYVSFCIKTDEPEKPASGDIDSDDTVGIDLGVLNFVHDSDGRSVGRLDLTADRECLEREQRSLSRKQEGSNNWEKQRRRVAKVHARMSNKKRDYKHKLAHFYTTEYDAVFVENLNVKEMLEAPENARNKAEVGWGDFITILEHHGKKNGCHVVDVEPRGTTKECASCGVSTWKPIWIREHSCPACGFKLDRDWNAALNVLSRGLKKLGVVHSEGTPVETATAVSTDGGDSSSIIVDASCVIEAGSSALKEATPVAE

SEQ ID NO: 34153 - protein, 415 aa, Halophilic sp.
MDIEDQNLTKTLPLQLQFHEEGDDAKVFESTQESRSVYNDTIRLAKQGEDWDNIRRQMEKDANLVKNNTQLVVKKALEAMENYYEYDDYNMPSHTKTGSYPLRMNHKEGYTLSLTDNGDVEFRISPKPYHPVRGTVVGDPVHLDVLKTALSSDEWKIGTAEALFTDVRAELHVNITHQTQTVRDKTDSKTVIGMDVNEDNLALTAMDETGVLDTLVIDFPEIKSQRHRYFTMKKRMQNAGKLSYKNVVCDREYRFVHDRLHKLSRAVVEFAKRFPDPCIALEDLKDMRESIDYGTRMNRRLHAMPFRATQVFIAYKAAFEGIPIASVEAEYTSQGCALTACEHAEEANRQRKRFKCKSCGHQDHADRNASVNVAKRGLEKCLLDVPALKSLPQVRKVRRWASGRVNRPTASLVTV

SEQ ID NO: 34154 - protein, 425 aa, unknown
  TnpB Polypeptide
MLLSHKTDIQLNTTESNIVGHMCYAASKLWNVCNYERRNFKELGMAHYPDWYDQKARLKGNMWFKSLPSQTAQEVCKLVDKSWKSFYALIKSKGIQNPKPPRFKQSGMTITYMQNAIVHVSGSKRVRLSLPKQLKEYLKHTYDIGDNYLYLENKIFQNTDVIKQIKIYPPDRKNVCQVIVIYDVKDVEKMQDNGHYLSIDLGLHNLITCYDSAGTSFILGRKYLEISQKYDKEIARLGHQWNSCQSAGGIKYPKPSKHMLKVYKKKRNCIHDYLHKVTRAVVNYCKANDIHTVIIGDITNIRRNKNLGKVTNQKLHALPYAKIYGMLEYKLAMHGITLAKQTEEYSSQCSPHAPQVTKEYAKKCNRTNRGLYKVFYLKQSPKFLEISNALCYIEYKERHLLEQMPFSSDSIHSKSGCSQVCILLL

SEQ ID NO: 34155 - protein, 454 aa, Treponema sp.
MMNKLVVNAEKQHRALKLRIYPTKEQEILINKTFGCCRQIYNNRLFERNEFYQNVIKNESDKNKQKELWKKAHFSTEKEMKAKFPYMTEVSAQALCSATMFAEVAYKNFFSSIKGNRAGAKVGKPKFKSKKSNDFSYRECNPSEKALNWNERKIKVPKLGLVKFRHSGNKKGKLDFFLRGEVELKSITIRKKPANEYYAVLLFEREYCHKKKIYEGDENQAIGLDFSPADFYINSDGSSGKDFGYVAQKQANLKKLTKLQRRLMRKQVGSNNREKARVKVARMEHYIAECRNDWIEKETKRLVSTYQVIGIEDLNLKGMMKFSRNAKNYGDASWGNFTNKLLWKASLNENNCQIVKADRFFASSQICHCCGFKNPITKNLNIRSWICPECGAEHIRDVNAAINLKMNAIKTVGQGVSEFRSVEGVEDLATLALQIGASDEAENLTGDGQNVLTL

SEQ ID NO: 34156 - protein, 387 aa, Lachnospiraceae sp.
MRKLLRSFKTEINPTPEQKEKINRTIGTCRYIYNFYLAHNRELHEMGERFLTGKDFSVWLNNEFLPGHPECGWIKEVSSKAVKKAMEDGCTAFTRFFKHQSGFPKFKKKDTSDAKMYFVRNNPRDCACERHRVSIPTLGWVRLKEKGYLPTSKDGWRIRSGTVSRRAGRYYVAVLVDVPDAKAANSGNDGIGIDVGLKDLAVVSDGRVFRNINKSARMRRLEKQLRRAQRRLSRKYENSRKGGATRKNLQKQRQKVQRLHQRIANIRTDYINKTVTEMVRTKPSYVAVEDLNVSGMMKNRHLAKAVASQKFYEFRTKLKAKCGENGIEFRLVDKWYPSSKRCHCCGRIRKDLRLSDRVYKCECGYVEDRDLNASLNLRDAKAYEVVV

SEQ ID NO: 34157 - protein, 396 aa, unknown
  TnpB Polypeptide
MKVIKYTYKFRLKPTKEQEILLNKHFGSVRYVYNYFLNQRKEEYLNNKKSITYNKQAGFLTQLKKNEETEWLKETNSQTLQYSLKCLEMSYQNFFNKRTQFPRFKSRKSRNSFTVPQHVKNEGNKIYFPKFNGGMKMIMEREIEGKIKKATLSKTPTGKYFISILTEKQHKPSVKTNKSVGIDLGIKDFLVLSNGTKIKNHRFLKHYERELKLNQKHLSRKLKGSSRYEKQRIKVAKIHEKITNSRMDLIHKTTLNIVKEFDTIYLEDLNVKGMMKNHKLSKAIGDVSWGKFIETLTYKAEWDDKEIIHIDRFFPSSKTCSKCGWINQSLTLKDRTWTCKECGEVLDRDFNAAINILNEGYRKNISGGTSDYKRRAKIRLSSESISDEALKEKELV

SEQ ID NO: 34158 - protein, 307 aa, unknown
  TnpB Polypeptide
VKGKKQWRLLPKYKVDIHSKEYKKKLRESLLQGWPYAAHWVDSAIKTAYSILKSWRKNYVKGERKRRRPTARRLFVRAKQTLIKLEGEKLRLTVKPGEHVYLDLSKRYFPLPQEVSSSALGEPVITPEKVHLPVHYEDGNQGKPSVAWNFNLLSFDGYSPETGWVRIDTKKLASVHISFFEKRRSVQRKASKSKKAGRVLSKYSNRERNRARKHQLEIARVVQSMCGSVGLEELKKQGMYTRSRVWNRRISRSDWRSITRILEERLGEAKVKELDPYGSSSFCSRCGWENKDLNGAVFVCGEGAVSE

SEQ ID NO: 34159 - protein, 320 aa, unknown
  TnpB Polypeptide
MRVRACRLRAYSSKTTARVLETQLEVACKLYNTLLHAEQEEYERNRRSMNKTELRQLALDLRKKNPEFQVLHSQVTQQVADRFYQARKRFLDGLANKPKKKKPHRYLSLVYPQSGWKLSDTREVGLGKNKKKKAWLYLSKIGFFTLIVHRVLPESQVSSVRQTQPFRSNPRFLVEEPESQEQHSSEEGEPVKAVGVGPGDHKACNTLRWRFLENPKPLERSLDRVRLLQRTLSRKRFLSKNWIKTKIRLAKEHEHLKEFQARLVLQARCLARKGVRPLGIRRLKHQGFDSKWNQKKKASALRLLVLRTQSCAGVAVCKAR

SEQ ID NO: 34160 - protein, 385 aa, Bacillus sp.
  misc_feature (383)..(383): Xaa can be any naturally occurring amino acid
MYIETMNENQLHAYQKRVQKQKEEPLEKRKEIKCSLFTFPTKEKSFLSYNFLDCLFKTMKQQDYINLPSQVNQAVMKKLYQNWKSFFASIKAYKKYPSTFTVRPRIPKYIKSSTKEIVFTNQVCKLQEKYIRFPKTSIKLNIGKLFGHIENLKEVRVSSAYGKFKVEIVTEKSESAHDHVENHRYMSIDLGINNIATITTNTGATPVLVKGNVIKSISQYYNKQKAHLLWILCHGKEPKEGPHTSKRLERLHEKRLLKIKDLFHKMSYHIVNFAVQQEISIIVIGKNTSWKKNSEMGKRQNQSFCHIPHNLFIEMITYKAKRKGIPVQVVEESYTSKASFLDNDVISTYGEEDIPAFSGKRITRGLYRTKKNLLLNADVNGSXSC

SEQ ID NO: 34161 - protein, 406 aa, Moorea sp.
MRAAYQYRLRLTKQQTIELERWLEMLRCQYNYLLADRFSWYEQNRCAINACPLVCHLPELRDNPDYYYQKRTLPQLKKNRPWYGEIHAHVLQDCVKRVDLVFKRYLKGDCNGKRSGRPRFKGKGRYRSLTFPSLGKNPVDGNSLKLPKFGWVKMVYHRPIPDGFKVKTAIITRKPDGFYVTLSIQDDTVPEVIPVDKVSNPIGIDMGLKSFLIKSDGTEVEIPKYYRKAQKRLKKIQKAVSRSQKGSNNRKKAVIKLGKAHKKVADTRKDFHFKTAKGLLDNHDLVAHEKLSIKGLAKTRMAKSVLDAGWGQFLLILSTKAEKAGLLTVAVNPRNTSQNCSNCGKKVPKKLKDRIHSCPYCGYVEDRDVNAAKNILNLAVGHPVSSKACRATKPLGGVGKKPALSR

SEQ ID NO: 34162 - protein, 350 aa, Polaromonas sp.
MQLTYKFRLRDTCDSELTRQARAVNFVWNYCNETQQKAVNRKRKWLTWHDLQKLTAGSSKELDIHAHTIQQVCQVYDRSRTAKKKAWLRWRVSNPKSPKCSLGWVPFNKGHVALRNGAFVFRGKAYRAWVSRELKEGQTFGAGSFSQDSRGHWYINLPVEVPSLASAGSDPIGIDLGLKDLATISTGEKIAHPRWYRKMASRIAAAQRAKKKNQVRQLHAKVKAQRNDHLHKVSTRLVQSHGAIFVGNVNASGLAKTSMAKSVLDAGWSAFRNQLEYKAIRHRVVFREVNEAYSTQTCSQCASIEGPKGVAGLGIRQWWCSCGVEHDRDTNAAKNIARRGLASLEVGASA

SEQ ID NO: 34163 - protein, 365 aa, Thermoprotei sp.
VIKEAIINHVTVRAFSRISNRDDVAKLLFTARMYRLGVTIALEYLEKNIPMKDCMFKIKRFVPNQKYAHACYERAREMYKSAKRKGKKVKQLRQWLMFESIGDRLDRGNRNIRLSSPNEVEVVVFTKNYSIERVRVPIKPLKTHTEIIEELYELGSSKLLGYNARCIIRDYSRDKALVEFQFIVPLELYLKYRRLYDKPRGLNIGGIDWNSDRANLAVVSPKGELLDHKTWWFPETTSHGYPRTARRTKQSQILSEIMDYCYHHGCSVVVFEDPDTIKTRRYTKNATANRKITRWTKREASQMFILKALRYGLKPFFANPAYTSKLAEVIAKELGLDRHTTSAYILALEYLGLKPKEIYQNLQRP

SEQ ID NO: 34164 - protein, 246 aa, Sphingobacterium sp.
LSKTPTGKYFVSILSEEQYQVKEKTGAFCGIDLGLKDFAITSDGVKFKNNKYTKQYEKELAKAQKHLSRKTKGSNSFERQRRKTARLHEKITNSRMDNLHKVSHQLVSNYDIIALEDLNVKGMVKNHKLSKHISDASWGTFVRLLEYKADWNDKQIVKINRFYPSSKTCCECGWINQDLNLSIREWTCKNGHVLDRDLNAAKNILKEGLKIISSGTGDYTGGDSNKTLATKHKSVKPEAHLSLANG

SEQ ID NO: 34165 - protein, 375 aa, Moraxellaceae sp.
MLKAHKIRIYPNKQQALAFDKHFGCSRFVFNWALALQKRYYSMFGKSLSRTQIQSQLVKKKKKAKFAWLNEVNSQSLLNALLNVYTAFTNFFKGRANYPRFKSKKLSHRSYQNPQKCTVDFEKGIINIPKIKGIKTVFSREFVGNIKTVTISKTATGKYYASVLVENTDILPTPTTVEPNLTVGIDLGISHLLNLSDGSKFDNPKHLAKASKRLAVQQKIFARKQKQSKNYQKQKLAVARIHEKVRCQRLDLHHKITHSLICENQATSYALEDLAVKNMVKNRKLAKAINDVGWGQFVTLLTYKASWYGKNILKVNRFFASSKICSHCHHKLNNLPLSVRSWTCPSCQAEHDRDINAAKNIRSQALADVAGLATV

SEQ ID NO: 34166 - protein, 539 aa, Thiocystis sp.
MAAARRRSARNGWSSNARRTAMRTAKVQRTDQTRIADPEGTAGAVLDAYADLYGRAERALFAAMRRGVAPGALKSEFMARFGLTARQFNALAINLKGKIASIKERRDGLIDEAKARIKKARQVVAKLDKALAKPIEAAARKRLLNKRHQKQRRLATQHARFVQLEADRDAGTVRICFGRRKLFRAQFDLEANGYTSLDEWRADWQRARSSQFFVIGSKDETGGCQGCVGEYLGGQRFALRLRLPPALCASGEKYQRLEIDLPYGTDQLVAALTLEQAVSYRFRRDAKGWRVFVTTQALPFTLASDRRLGVIGVDLNADHLAVCETDHFGNPIAALTIPLVTYGLDRDQTQAAIGNAIKSLMEFARDKGKPLAIEKLAFAQKKAALEDEGPRHARMLSALAYARIGATLRARAHDAGLEVIARNPAYTSVIGREKFAGRYGLSPHHAAALVIARRALHLSERPNRRARTARPLPARNRGRHVWSFWRQVAQQQRRMYRAGSRSQDRSRSPPALRGAARAETLLPAAGATPARESSAALFG

SEQ ID NO: 34167 - protein, 401 aa, Domibacillus sp.
MRKTKTDETKKLHFKAFRFKIHPSDEQKQLINQTIGCCRFVYNYILNENIKSFEKTKKRYTETAAKKLLPGLKETFKWLSGSDSIALQASIEYQYEGFKKYKEQPKKELKKRAAKKCAEGYTPTAYDFKGHPTFKSKKKPVQSYTTKMTNHNIKMIDNRIQLPKLGWIRFSKSRNIEGDIKRVTVRRSSTGRYSISVICEMPYSPYKPSTSDAIGINLGLKEFAVLSNGESIANPKYYQKYEKRLAFLQRAFARKKEGSKSREKNKAQIAKLHEKIKHTREDFLHKLTTRLVHENQVIAVENLSVKNLVQNNKLSKGIHDASWSRFNEMLAYKAKWYGRTVIKVDPFFPSSQLCSRCGHQHKDVKNLAVRVWECPSCGVRHDRDLNASLNIKREALRLLSG

SEQ ID NO: 34168 - protein, 229 aa, Salmonella sp.
MKRAYKYRFYPTTEQAELLAQTFGCVRFVYNSILRWRTDAYYERKEKIGYLQANARLTALKKEPEYIWLNDVSCVPIQQSLRHQQTAFANFFAGRAAYPAFKSKRHKQAAEFTASAFKYRDGNLYMAKSKSPLDVRWSRELPSAPSTVTISKDAAGRYFVSCLCEFEPASLPITTKTIGIDVGLKDLFVTDTGLKTGNPRHTAKYAKRLALQQRSLWQIACGKAAGVWI

SEQ ID NO: 34169 - protein, 379 aa, Gammaproteobacteria sp.
MLKATKVRIYPTPEQAEFLNAQFGAVRFAFNRGLAIQSHFYKIKGISLNPLKDIKPLLAEAKQSRKYQWLKQYDSIALQQGIIQLDKAFKNFFNPKLKSRYPRFKSKHGKQSSYHCTSVSVGDDWIKIPKCKPITAKIHREISGTVKSITLSKTTNGKYYASILVEDGIEQPKPLQTIKSVIGIDLGLTDFLTASNGDVVANPRHLRNAEKNLKRKQRQLSRKKKGSANRAKARRMLANAHEKLRNIRNDFQHKLSRTLVDENQAIIVETLKPSNMMKNKHLAKAIGDASWSSFISKLEYKAKAKGHHLLKLSQWFAGSKTCSNCGHKMDELPLQIREWSCPSCSTRHQRDKNAAINHLKQGMIELKAAGLSFSLAESV

SEQ ID NO: 34170 - protein, 156 aa, unknown
  TnpB Polypeptide
MQDILRKTARYIVNFCIDHQIGTLVCGYNRDFKRGLKLGKVTNQHFTQISLSYLRSNLKHLCERYGITYLEQEESYTSQASCLDLDAIPVYQPDTPYAGTFSGKRIRRGLYRFANGRTANADINGAANILRKSKQNFDFEGLCKGLLDSPLRIRLS

SEQ ID NO: 34171 - protein, 367 aa, unknown
  TnpB Polypeptide
VQTLCLKYRLFPTKEQTRKLEDTLETCRLVYNSLVNDRAFQYETAKVSVGRYEQQKMFPQWSKDFPEVKAVHSQVLQNVAVRVDLAFRAFFRRVKAGETPGFPRLKGKGQYDSITYPQSGFKIGDSTISVSMFGKPVQIKAKLHRPIVGTVKTCTVRRYGNKWFVCFSVEQEDSPLPPCTDAVGLDAGLNFFLALSNGGFVDNPRFFRRDEKALAKAGRRQAKTKKRSHERKKANKVLARIHERIRNRRHDFVHQTARRLVNRYGVIAVEKLNVKNMLGNQKISHCLAKSIADASWSMFRTVLTQKAESAAREVIAVNPAYTSQDCHSCGYQAKKKLSERWHHCPMCGASLDRDTNAAINILALATS

SEQ ID NO: 34172 - protein, 301 aa, unknown
  TnpB Polypeptide
MADPVRIGTVEIIRTGDHWEAVFSCTLTVPTPKDAYPTLPATGIDVGLEHYASLADGEQVPNPRFLRKSMGEVKRLQRKLDRARKDRAAEKRAAKKRETAVVTARVAGKPIPPTPPVEVWVSTRGKKRPKRTAERRARLLSRAVARRHEKIGNQRAFFQWHLARSLISRFGLIAVEMLKRRNMARRPKKKLDEAKTKDAGQPVYAPNGAAAKSGLNKSIYDAAGGLFVQRLSSKAEEAGCLIVGVRAAGTSQECPRCARKTPKTLDERWHTCPCGCSLPRDVAAAQVIRARGLTSVAVSAA

SEQ ID NO: 34173 - protein, 446 aa, unknown
  TnpB Polypeptide
MSLSQDSISKDLTPYWNESCRVMSLKLLSQTKTACVGSDLNLLNPLQGSSISWFSMKVSCHHKENLSKTSYQSYTHFLANYADLENTVVRSKKVRIYPKDPQQARKYLGLSRWWYNRTIHFLKQPTTKASLYEVRKVLQKGVDIPEWAMDCPQRIREHAMSDACLAVKNAKLKYKKTQQYQEVAFRAKRDLVQSFGFDAKSLGQDFVFGSQKFKLGFKATEVFQTDLEGTRVVREGSRYFVIVPQRVSYQQPENQRIDTVSLDPGVRTFMTFYSEVLHGKIGEGDFQRIYRLCLHLDRLMSSISKAGCKRRRRLKKAAERMHWRVYDLIEDLHKKLANYLVRTFNRILIPVFETSQMVTQLVSRVSRSMLTFGHYRFKEYLKARGQQAGCEVLEVNEAYTSKTCSYCGVIHRIGSQRRMKCGCGVDVDRDLNGARGIYLRALAASP

SEQ ID NO: 34174 - protein, 215 aa, Kluyvera sp.
MKRAYKFRFYPTPDQVELLAQTFGCVRFVYNSILRWRTDAYYERQEKIGYPQADKRLTALKAMPEYAFLRDVSAVPLQQAIRHQQDAFKNFFAGRAAYPAFKSKRHKQAATFMNTAFKYCDGKLYMAKSAAPLDVRWSRELPSSPSSINITLDAAGRYFVSCLCEFEPVSLPITASTVGIDVGLKDLFVTDTGFKSGNPAIPLNTLHAWRYSSAD

SEQ ID NO: 34175 - protein, 417 aa, unknown
  TnpB Polypeptide
MLGYSFLRNKRIEYTERMKRKQAFKFELQPNGEQERDMRNFSGSCRYVYNKALAIQKENHEAGCKFISYVEMAKKLTQWRNSIETPWLKDSPCHPLQHSLKNLDRAYQNFFAKRAGFPSFKKKFSGSSFRFPDPKQFKLDQVNSRVFLPKLGWIRYRKSRETIGELRNVTVIHHGNKWFVSIQTEQEVVRPQRVATTAVGIDVGIARFATLSDGSYIAPVNSFKKNQERLRRYQRRMAKKVKFSNNWKKAKVKVQKVHIDIGNTRKDFLHKTTTTISKNHALVCVEDLQVKNMSKTASGTKEQPGKNVRQKSNLNRCILDQGWGMFRTQLEYKLEWTGGILVAVPPENTSRRCPKCEYISEHNRKTQSHFECNCCGYKNNADVVGAINILERGHRFLACGDMAQCLSKKQEPAEAIG

SEQ ID NO: 34176 - protein, 386 aa, Nocardiopsis sp.
MLVGRRCVAYLTPEQEVQAQGFGDACRWVWNAALEQRREANRWWKRLGKAWTHPYPGFTARARQLSGVRAEADWLAAAPSHVLQQTLKDLDTACRVHGANAVRWRSKGRWHPSFRFPDPKQITVEKVNRRWGRVKLPKLGWVRFRRPRGLGGQVRNVTVSHRSGAWHVTFCVEDGRGQAQPNGRPDVGVDRGVVVAAATSDGRLHDRAFTTLKEEERLVRLQRARARRVKGSANWRRAKAAIARIHARRANRRADFNAKLAHHLTRRHGMVVLEELRVAGMTRSARGTVERPGTNVAQKRGLNRAILAKSWGDLARRCEYKAKVNGSSLVRVNPAFTSQGCNRCGEVDAKSRESRAVFTCTSCGHTEHADVHAATNVLDRGRTTGP

SEQ ID NO: 34177 - protein, 238 aa, Bacillus sp.
MLAERIDTFERLKDDKEKLKKIKYPTPAKYKKEFEWLKEVDSLALANAQLNLDKAYKAFFKGNAKFPKFKSRRHKQSYTTNVVNGNIQLLDGHIKLPKLKQVKIKQHRQIPSESTIKSCTLSMSASGKYYVSILTVYEKDIAGKEIKKVEGLDFAMDGLFVDSEGKKANYPKFYRQMLDKLATEQRKLSRKKKGSSNWKKQRVKVAKLHEKVANQRKNFLHQKSKELVSTLTQSRLKT

SEQ ID NO: 34178 - protein, 282 aa, unknown
  TnpB Polypeptide
MMVVKKMIKTIRVMLIPNNKQNTKLFRYANTARFAYNWALGREKENYKNGGKFLSDSDLRKEFTQLKKTEEYSWLNEVSNNVTKQAIKDLAICSDGNKYKNINKTKKVKKLEKQKRRLQRSISRSYENNKQGKEYCKTKNVIKKEKLLLILNHRLTNIRHDHLHHITSEIVKREPSFICIEDLNVKGMMKNRHLSKAVQQQGFYEFRRQMEYKSKWNNIQAIIADQFFPSSKLCSCCGKIKKDLKLSERIYKCECGNVIDRDLQAALNLKKYGEDVLKRSVA

SEQ ID NO: 34179 - protein, 379 aa, unknown
  TnpB Polypeptide
MIVKKGFKYRIDVKPSQVELINKTIGCCRFVWNYFLEIQKTKFENKEKLLTYNQMSSMLTELKKEKTFLNEVDSISLQQELKDLSTAIKRYFEEQRKGNKEFGFPKFKSKKNPVQSYRTVLFRRSNGTQNINIKGRYIQLPKLGWVKFYKSREVEGKILNVTVSKTCSGKFNISICTEVEILPKKSNNNIIGIDLGIKDFLIDSEGNKINNPKTLQKYEQKLIKLQRKLSRQKLGSNNWRKTKLKLAKLHERIANIRLDFLHKLSTEIINENQVIISENLQVKNMIKNHKLAKSISDCSWSEFCRQLEYKAQWYGRTYYQIDTFFPSSKTCSECNYIKEDLELSDREWICPECGVIHDRDINAARNIKIQGMKELGLIA

SEQ ID NO: 34180 - protein, 394 aa, Staphylococcus sp.
  misc_feature (180)..(236): Xaa can be any naturally occurring amino acid
MERLKAYKFRLYPTEEQEIFFAKTFGCVRKVYNLMLHDRIKAYQEKANNPSEKMRFPTPAKYKKAFPFLKEVDSLALANAQLHLDKAYKNFFRDKSIGFPRFKSKKNPVQSYTTNNQNGTVALIDDKFIKVPKLKSLIRIKLHRQPKGIIKSATISRHASGKYYISLLCKEEINELPKSXXXXXXXXXXXXXXXXXXXXXXXXXXXXXXXXXXXXXXXXXXXXXXXXXXXXXXXXXKRALLAKKKGVHLFEAKNYQKQKRKVARLHEIVMNQRTDFLNKLSTEIIKNHDIICIEDLNTKGMLRNHKLAKSISDVSWSRFVTQLQYKADWYGRKIIKVDKWFPSSQICSKCGHKDGKKSLEIREWTCPICHTHHDRDINASRNILTEGLRIMAFA

SEQ ID NO: 34181 - protein, 246 aa, unknown
  TnpB Polypeptide
LVKRKRINPNKNNVISIIHKKLYNILKSFNLPSKTAQDCYRNAISIYKGWYNNPNKGRFPIIYKPTVWLTPKFSYTVDFERMIVKISKLGEFKILGYPRNIKEYLSWKMKEARQVIRNGKVFLKITFEKFFQKIEPKDSIAVDINMQNITVGKDENNFVKINTSINEIHRYKSLAERLQIKYPKIWKSNRNIEKRILSFHSKAKRIAEDFARKVSKRVINEAIRMNANVIKLENLRNLIKNVKKTS

SEQ ID NO: 34182 - protein, 418 aa, unknown
  TnpB Polypeptide
MLLSQKTSVKLSQGYANIIGHMCYAASKLWNVCNYERYHYKEMGLSEYPDWYYQKKARKSDLWYRQLPSQTAQETCKLLDKAWKSFYALKKSGGIREPNPPRFKKQNMRITYMQMGIVHETGTDRIRLSLPKELKIYMEKEYGIHEKFLYLENKIFRNMGHIKQLHIYPPENGRCTVIAVYEIADRGYLPENGHYLSIDLGLHNLMTCYDSGNGRSFILGRKYLSLERYFHKEIARVQAEWYGQQAARGVRYPGSSRHIQRLYEKKQNTVKDYLHKVTRYLADYCRKEGISCVVIGDIRNIRENKDMGYRTNQKFHGLPYNKLYIMLEYKLKMYGIRLEKQKESYSSQCSPLSPEVSKKYAEPANRKKRGLYVAGKEKYNADAVGAFNILRKYLSVSGKEKQMSVTGLKQPQIIKVAA

SEQ ID NO: 34183 - protein, 393 aa, unknown
  TnpB Polypeptide
MSAGGEGELTLTVRMRVSPEPEQEEVLLDLMRRYRDALNYSVRAVIANKALSLGKAHKLLYNDLRERYGLPSRIAQDCYREAIAIAKSWLRNSRRGNKPTARGLSMWLTHEQGYRVKGGYVELAGGYRLRIIGWDRRYDDFPNREARLVFRDGRFDLYVTKRVPRPAKYAPKGVLAVDINEGRVVVGNSRVEIRVETPVERALRYRRLAERLQGKYSSTRYNAWLRRSGIRRRVRSFHRKARNIIEDWARRTSHMIISLARQGQLAVAREDLTGLIESLRKLPKDHRTALLALGYRRLAFWVDWQAEKGGVPLLVVDPAGTSTTCPRCGTKLVEVGYRRLRCPRCGLEADRDTIAVLNIERRALSKMGGTLASPTAPQVTDVSPNRWGEPSAL

SEQ ID NO: 34184 - protein, 343 aa, unknown
  TnpB Polypeptide
MKTFGCCRFVYNYLLDSFYKNGYTTKYTNNNFCNKELKQKYPWLKEVDKFAITNAIYNLDTAIKRYKNKLGEKPKYRKKNRNDTYKTTYTKNNIEVLDKYIKLPKLGKIVAKVHRKIEGTIVNATIKKCNDDKYQVMILVRKEIKKLETNSYIIGIDMGVHNFVHDSSNNIYKAPYKLISNGEKLSKFQKKLSLKKKGSNNYKKLENKINKLYDKSHNVRNDFLQKLSTNIINENQVIVVETLNIKEMFQNNNIAKILSDISISKFINMLEYKAKWYGRKLIKVDRYYPSSQLCSNCGYQNKKVKDCSIRVWQCPNCKRIHDRDYNAASNILWNGIEKLIIDQ

SEQ ID NO: 34185 - protein, 377 aa, unknown
  TnpB Polypeptide
MQSKNLYNYANYIIRQEFIINNKWIRYNELFQLVKDSEPYKDIGSNTGQGTLRILDKNWKSFFVAIKDWNKHPEKYLGRPKLPKYKAKDGKFVLSLDSNKVKLIDGWIHFSWKPFKKFNYQFRTNAKERIIQCRFIPKGSYYVMEIVYEIGVPKCGEQSEHIAAIDTGVDNFITMVNNIGEQPIVVKGGIIKSINQYYNKQKAKLQSELKTINKKDWSKRLQKLTDKRYEMIKYQMHCISKYVVDWCVLYNIDTLIVGHNDDWKQNNKGMQNFTYIPYEIFIQMLAYKCENNGIKFIEHEESYTSGTSFVDNEDSIKENYNKSRRVYRGLFIGNNGIQINADVNGAYQIMKKVIPNVFANGIEGASLHPLTIKKLVA

SEQ ID NO: 34186 - protein, 441 aa, unknown
  TnpB Polypeptide
MPHLHGFTKTFRFNLLMSAEVNIQASCTITLYRQVVSYYLQIFQDHRNIIGHSQWLKLAENLTHRTEDNPNPVYPFDNEFPNFPSGFRRNAIAEAHGKALAWETSYQKWQEKKRKHEERNQKRIAIGKKPIEFTDHPPQYPVEDNCWLSYYGTEYKWLDINHILLKMFTGKAYVYRKIVLLQPFIVPSGYTTGSPTLVQKPTGWELHVPIVLQTKLNLKKIKTLVKDPLLKICCIDLGINRHAVITIQDTKGRVYATKFISGAKDNHLRKQYLEKIVSLQKQTRTIPAGEQFAKDLWNKISNLNNDIAHQVSRQITNFAKHYGAKVIVFEHLNNLKPSKGTKSHWLNQKFIFWVKGRIFRYTQYKALHIGIITCRVTPKETSSRCPYCGFLTIVRYNKDKNEKEIKGVDLAKCTNCKTHDVNSDFIGSLGIGRNFRLKHCS

SEQ ID NO: 34187 - protein, 421 aa, Natronomonas sp.
MCFGSVEAGVTATATKTLEATLAPPTAHKEQRLQRTVATYRRALSESFESGADTQTAVNDVVTGYNLTSYAKDALKNYVPQLRDTYNASELDDDHPVRFTNRGWNIDHSEERTHEFCWRVPQAGRGNAFWIPLRIDPTQRELWDDLLDGDVTVGEFRLQEHRTNWVLHVTVKYELAEPEKPDDPTPVGFDIGESKLLTGCALTENDTPTQPFIFDGGRARHLRKEMHTTLQRLQERDASEWRVDERFDHYQNALTDIVEKASRQAVEYARQFENPVIVLEDLSYIREHLDYGKWMNRRLHNWAFARLTGRIEDKALEAGIPVRFVNPAYTSQTCHECGHLGSRSSQAAFRCTNDGCWVTEYQADINAAANIAGRLNPWGESLSLKPTGDDSPRDRSACDSTTGHRTPSPKPGQTTLAAFQS

SEQ ID NO: 34188 - protein, 352 aa, Streptomyces sp.
VFNDAVRAREDARKAAQPFPTAGQLSRKLITEAKRTAERPWLGEVSAVVLQQSLRDAEKAYRNFFASLKGARKGPKVGPPRFKSRKDTRQSIRFTANARWSITCSGRLNLPKIGAVKVKWSRTLPATPTSVTVVKDAAGRYFASFVIDTDPAADLARMPETDRTIGIDLGLTHFAVLSDGTKIDSPRFLRRAEKKLKKAQKELSRKQKGSKNRAKARLKVARAHAKVADARREFHHQLSTKLIRENQAIAVEDLSVAGLARTKLAKSGRFTPTSQTCSTCGAVDGPKPLNVREWTCTVCGAVHDRDTNAAINIKTAAGLAVSACGAPVRPGAIPAQREETGSHGFPTGNRAA

SEQ ID NO: 34189 - protein, 448 aa, unknown
  TnpB Polypeptide
MSKRTKKEKKDKYVRASKHTLKFTNPGKLERYDVFIDEYRRVAEIFLDRIWNKKLIWKDGKKVSHILDIQSAKYDISNHMDYKIVKKHKSWFSARMLSSLSNQVLSAIKSSIDAQSRRLYMLKKLSDNKEEIPFHLLENILKGEPRKPNAKSMNPELSSKNMDFKEVHGEFDMFVRLKCLGEDLDGIKIPEINIPIKMHRQANKWKNCSKRLGSVLFTKQHVELRWEFDKPKKDTGITVGGDQGIRTILTLSDGQTTPECDPHGHTLSSVLKKLSGRKKGGKNFNKTQKHRDNLLNFSLNKLDLSKIKQFNLEEIIGLNSGKHTSAFMKGWTYAFQDQKVESICDEAGVQLHYKASTCKSQRCSCCGWVHEKNRNKKLFACQRCGASLDADLNGSRNNQIDLPDVKDFIMATKLNKKSGFYWKPDGLFGIDGKELGVPNAQKILNNVK

SEQ ID NO: 34190 - protein, 209 aa, unknown
  TnpB Polypeptide
VITIEPRQLYLEFDLSKAWFKKRVDDCDLGELILKEDELIITFRKQVNEPKPERKIAWDLNLLSMDGFCDRGWIRVDLKRLYTLHTTYENLRRKIQSLRKTKPKTARRLMQKYSQRYRNRVKDYLHKLTAKLAKELKDYEHGFENLEKQGMFGKRRTHNRVVSKQNWMQIIALMGYKANVKLLDPHNSTKTCPRCGGRMERRKGQVLEM

SEQ ID NO: 34191 - protein, 523 aa, Verrucomicrobia sp.
MPRKAKPTFITELPLVASRAHDAVMVSRFEAARRLNNAVLGDGLKALALMRQSKAWTTAKSMPKGEPKSAVRDARNAAFKACNLHFGFTQYALQAVATEHKNAAGFDNRLGAHETQKIASRIFASLQEYAFGKRGRPRFKGKHRPLHSMEGKSNAAGPRWHADTATVSWGKGFVMPVAIPAKTKDPYLHACLAAKTKYCRIVWRMEGSKRRWFVQLVQDGVAPAKYEFLSSGQVVGLDIGPSTVAIVGDDAVGLERFAPSVEQPWKQMRVLQRAQDRSQRAMNPGKYAEDGTIKRGPKRWAKSSHYARRQNKLADLERCLAAARKRDHGELANKILGLGNLVQIEKVSYKGFQKNFGRSAKVRASGMFVSLLTRKAESAGAKVVELNTWALKMSQYDHKTGVCTKKPLSQRWHTLGKSNTLVQRDCYSAFLAKNVIENQHKPSQLQVDWAAAEPLLRRAGLCLEQSGSGKRLPTVEFKPLPSDRIARRKRFLRGHAQDAVTGAARSLREPAYPSQSAFRTPGL

SEQ ID NO: 34192 - protein, 318 aa, unknown
  TnpB Polypeptide
MLKSYRYRLFPTKSQVSVLERQLELCRQVYNDTLAYRKNAWEKEQRHVNRFETQNRLPQLKVDHPEYKEVHSLTLQNVVLRVELAFKAFFRRIKSDENPGYPRFKSRGRYDSITYPQSGFGLDSGKLHLSKIGDIKINLHRPIEGKIKTCTIRRMPTGKWFACFSVDMGEVPLPPWKDGSVVGIDVGLESFATFSNGEKIANPRFFREEEKELARVQRKLSKAPKGTLERKKAIKVVELVHERISDRRNDFANQVSRKLVDRFGVIVFEDLDIRNMLQNHCLAKSISDVAWNMLVKSTESKAAYAGSKVVLVDPRNTL

SEQ ID NO: 34193 - protein, 404 aa, unknown
  TnpB Polypeptide
MGKIIMRRVNIIKLKPNKKQERILKRCMLLSSCVYNSANYLVRQQFFNKERVSDFRDLQIKLQSTPDYKLLGRSYALPRLQMYAETNSARFNLIKSKKQRWVGLPKYFKNRKTNTTLPSYLVIDNSQYSIGKDKVTIPLSREMRKEYGLTNFRVAYNGVLRYIGKQQRGQIRFKNRKFYLYQYIEVNTPLVKLTKYIAGVDIGIKKSLAILVNNNQEKIIGSKRFYRQWQYYTSLIAQEQNKLSKMNRKSSHRLQKLYERRSKYQDNLFNNIVAKMFRFLKRNFVSRFFIGDLTYILEDNDKGKKLNQMTHNYWSFDKLMHKIQNLAEKYGIELIKTTEEYTSQTCPICYDTSASNKKDRIFVCDFCGYIDHRDIVGARNIMIKGMHDLNRSVHWCEIAPCEDI

SEQ ID NO: 34194 - protein, 371 aa, unknown
  TnpB Polypeptide
MKCSATIKIKISPCKELNELSDSFKQACQYASDYAIEHNIKHKFALHKLIYYDLRSKFNLKAQFAVNAIAKGFEAYKSCNKRVAFKSCPIRFDRRTFCFSEHKVRLTLSKDRRDFPVNIPLYYRKYLDWKYQTADLIKDRKNRYFLHITFSRDININGCRTQVVGVDVGVNNLAVTSDGKVFSGHKTKIMQFQYLRKKLQAKGTKSAKRLLKQSSGRQKRYMAWVNHNISKEIVADADSIVLEDLNGIRKSRNKHMGKRLNRWLNSWSFYQLQSFIKYKSERAGKVIQFVSPYMTSQTCSNCGKLGSRYFDSFVCNHCGFSSQSDFNASCNLRRLYVTQPNISTNDAKGLADVRDNQLFSKAKSPHTLVVG

SEQ ID NO: 34195 - protein, 407 aa, Streptosporangium sp.
LIGMSRYRLQPSLAQEQALAEHCGHARFVWNLAVEQHAHWKPGRKSAPGFAEQCRQLTEQCRQLTEARAEFEWFRGGSIIVQQQALKDFHQAMANFFGKTHRRPTWRKRGQGEGFRIVAVKPGDVRRVSCNVSEVKIPKVGWVRFRWSRPVPEGVKSYRVTRDRAGRWHVAFAAIPEQVPAPGTGEVVGVDRGVAVSAALSTGELLNAPTLRETERKRLLRLQRKLARAKRGSNRRSKVKAAIAKLKARETDRRKDWVEKTSTDLARRFDVIAVEDLKISSMTRSARGTIEAPGKKVRQKAGLNRGILAAGWGQLVTRLEHKAPGRVQKINPRYTSQTCNACKHIARESRESQALFLCVACGHQAHADVNAAKNIRDTAAGHAVAARGGQPMGGPANREPQPVLLSA

SEQ ID NO: 34196 - protein, 522 aa, Bacillus sp.
MTIPRSPSFVLTLELDSHHRLFSVADKELEILRVLYNTVLGNYLKLENQMKRLKEYKRWIRQLKGIKRKLARDEANPFLQNELKCVREKLNDLRNQYQLTEYASHAWIKSIRKHFGDRVNAAVSQKTASRAWLAFRKKLYGQAKKVMFLRKGEMASFEGKTNTTGWRYVNQHLIYKDMSTPLKRKGNDSFVSEILTHIEKKTPFTYTIKKKGETQTITDFYHVKYVRIVRKVIRGNVRFFADLVISGFPMSKGRELGKGRVGLDIGTATLAVSSLKKVALFNLAEEMKELAKVIRLTQRRMDRSKRAMNPGNYHENGTVKKGRKEWQLSNRYRKQRARVRDLNRRQAAIRKLSHLRLANTLLPLGDAYFIETMHFKALQKRARETKVSEKTGKVARKKRFGKTIGHRAPAMFVSILEQKVKSLGGSFKKVNTQTFKASQYCHVRNSFTKKPLSERWHVIDDETKVQRDLYSAFLLMNANSLGAKAKRDTCLETFPLFKSLHDQEINTIKKEKRRIFNSGIKL

SEQ ID NO: 34197 - protein, 431 aa, Clostridioides sp.
  misc_feature (317)..(427): Xaa can be any naturally occurring amino acid
MYPNKKQQELINKTFGCCRFVYNKYLAKRIEVYKNNKETFTYKQCSSDLTNLKKELKWLKEPDKFSLQNALKDLDNAYKKFFKEKAGFPKFKSKKINRFSYKTNFTNGNIMYCGQYIKLPKLGMVKVRDKQVPQGRILNATISKEPSGRYYVSLCCTNVDIEVFENTNNQIGLDLGIKEFCISSCGDFIENPKYLKKSLNKLAKLQRELSRKTIGSLNRNKARLKVARLQEHIANQRNDFLQKLSTKLIKENDIICIEDLQVKNMIRNRKLSRLISDVSWSEFVRQLKYKANWHGRQIVKVGKFFASSQICNKCGYXXXXXXXXXXXXXXXXXXXXXXXXXXXXXXXXXXXXXXXXXXXXXXXXXXXXXXXXXXXXXXXXXXXXXXXXXXXXXXXXXXXXXXXXXXXXXXXXXXXXXXXXXXXXXXXTKHR

SEQ ID NO: 34198 - protein, 413 aa, Acetivibrio sp.
MERKPGYHTITYRFRLYCDHREWLEYTKEIYNQVLEFYYQVLEKEPELAKQTSRQKLLRQLELLTIGARGQKKESIEYPFPYGKVPLYFRRAAVSDAIRLYRSRTARLEATAKPGGHRAAPIFYKGMYKEFTSTSVLLKLWNGEKWIWESCGLDSCGRKWPDTGAMMSPVLKLEGKRAMLHVPIREEIADVRPVRERLPETEAICAAAFPGNDCMAVLVILGKDGGLRESHFIRGGSQFAHEKKKLLNRIRKNQESMGGRKRQVSEKENSYLKRKIRNLSEHYAHQVSRQIVEFCEEQKVTILVVPGYRQPINLNEMGYLLATSYDWIGRRIIQYLRYKAFGKGIIVTSVSTKNIAKNCHICGEPVKRFNKENKPACNYYGGKNYICPNGHKGNAYFNTAMNVGLRFLQEIET

SEQ ID NO: 34199 - protein, 256 aa, unknown
  TnpB Polypeptide
LKIPFVCHNPNYLPYIKGEADLVYKKGKFYLFQTVEVPEEDVKDVESFIGCDFGLVDICTLSNGKSFNSKPLQDNREKRQKVRSSIQRKGTRSSKRLLKRLSGRERTFGTITNHTISKQIVQLAKSEGKGIAIEDLKGIRFSANKKGKKFRTRVGKWSFNQLRQFLTYKAFLNGVKLVSVPPNYTSKTCSNCFHIGSRQGKKFTCNNCNSVFDADHNGANNIALLGASVIMPEGESLMYCKMPHLIFKAPPSLVVG

SEQ ID NO: 34200 - protein, 406 aa, unknown
  TnpB Polypeptide
MIRKKAFKVRLYPNKKQEQQINQTIGNCRFWYNKCLEHVISWKKEHGSYEGFKQLNPKDFKKELEWLALGSSRGLQQAQNDLTEAFKNMKKMGSGFPKFKKKGMKDSYREPQTETFCKVLETKIKLLKLGFVSFKASGSYLDILQTIKICNVTISKNKVGHYFASILCDVEIPTLPVQSKSIGIDLGLKEFAVMSDKTIIENPHFGRNSENKTKTLQRRLSRKVKGSNRYEKQRVKLAKVHLHVSNQRNHFLNELSSKIANESQVICLEDLHIKGIVRNHKLAKAIHDVSWSSFVTKLKYKSGWYGRTIHQVDRFFPSSKTCSSCGWKKVDLTLKDRTFKCEKCGLEIDRDYNASINILNQGMAELAKTDPKGSTFVDKSASVDVNLLTSVSNLDEAKNQFMGRFL

SEQ ID NO: 34201 - protein, 398 aa, unknown
  TnpB Polypeptide
MRLRYSYRLDPAPAQRQALARAFGCARVVFNDALAARQAAYEAGEPYITDKEISAWLTAVKGTPERAWLGEVSSVVLQEALADLNAAYRNFFNSVTGRRKGPKIGLPRFRSRKDRRQAVRFTKNSRFRVLVNGRLRLPKIGDVAVRWSRDLPAGPSSVTVIRDAAGRYFASFVVEVSPRPLPRTDAECGIDLGLGHFVVLDDGTKVTAPRFLRRAERKLKRAQRDLSRKQNGSSNREQARVRVARAHARAAGARRDFHHKLSTAIIRENQAVTVEDLAVKGLARTRLAKSVHDAGWSAFVAMLEYKAELYGREFRRIGRFEPTSQVCSACGVQDGPKPLHIREWTCAACGAVHDRDVNAAKNIAALGRRDAQNARGGQVRPAATLAQAGEAGSLRGAA

SEQ ID NO: 34202 - protein, 389 aa, Lentzea sp.
VNTLVKRSFKYRFYPTEAQAAELSRTFGCVRKVYNMALQARTEAWTLRGERLDYNATSAMLTTWKRTEELSFLNEVSSVPLQQSLRHLQKACFRFWAKRAKYPRFKSCKRSRASAEYTRSAFRFRDGALTLAKMREPLDIRWSRPLPEGAMPSTVTVSRDPAERWFVSLRYEDSSARQLPLTDTAVGIDVGLNHLLTLSTGEKIANPRHQRRDHLHKITTRLVRENQTLVIEDLTVRNMVKNRTLAHAISDASWAEIRSMLKYKAAWYGRSVIAVDRWLPSSKLCSVCGALAAAMPLRVRTWTCSCDATHDRDVNAARNILAAGLAATVCGADVRPQRNTPGGQSAAKQKASQREPWDSPCSQGRGSQGVSLQPPVGWKQLLCRPGVSR

SEQ ID NO: 34203 - protein, 556 aa, Acidimicrobiaceae sp.
LNARWGFSPGRRGSSAPPARPLCPPGPPWPPWPPRPVAYRGLAFSMTRFHSAFGGVLSWFRPKRGILGLFTSPVPDGSPTHSSAGVGEEVAPYRSQLLAHPRCRPTVMEVTTPGTSTITKSYRYAIDPTPGQQRALLSHIGGSRFAFNYLLSLTLANWDENQARKDAGEEVTKDDYVDTGHFGLLRLWSATRDDVAPWWGENGASAYNDAAQRLSRAMTNFYKKRAKVPRYKRRGLGESVRFTNQAVHLTDSHHVKVSRIGEVKTYESTRKLYRHLERGTGRIVAATISRRSGTWFISFSASITALIPTTRAPERIIGIDVGLSTLYTGATTDGEHVLSVANPRNYQRRERQLAHAQRQASRKQGPRRGVAPSSRWKRANARVQKVHASIAASRSNLIHATTTRLAKNFDRIVVEDLNISGMVKNHSLAKHISDAAWGEFVRQLEYKTQWYGSVLVKADRFYASSKTCSSCGHAKAKLALDERQYTCEVCDLTIDRDLNAAINLARWPSSRTEGKPTSAGTHSVAGRGGEVRPSQQQLAGQAHPDEASTEAPPQLV

SEQ ID NO: 34204 - protein, 427 aa, Cyanobacteria sp.
MLKVVKVRLYPTPQQQQLLEQSFGNCRWLWNYSLNLINQTYQQTGKGLSGYDVKKLIPQLKKEHEWLTRTYSQCLQQVCLNLGVAFKNFFEKRASYPRFKSKHGKPSIQYPQNVKVADSHLTIPKIGDCRATIHRKIEGKIKTVTISKNGSSQYFAAILFDDGKDWPHSSTDGKAIGIDLGLNHFAVTSDGSKFDNPRILSKHERNLKLKQQQLSRKQKGSNNRNKARKRVARVHRKITNCRGDFLHKLSRRIVNENQVIVVENLNIKGMMQNPCLAKSIHQVGWGMFCTMLKYKAEAEGKVYQEVDRFFPSSKTCHVCRQQVSSLPLDVRSWTCEHCQTHHDRDINAAINLRDQGLRILTRQLPQVEPLPCGGFPHCGKWRGKPAHGAGSSGTGDKACCPDVSRSNRGRKKSDITLSVGQEAYTDP

SEQ ID NO: 34205 - protein, 367 aa, Moorea sp.
MAPNHSYTTKLKLNNRQKTLMAKHAGFSRWVYNWGLAMWRDAYNQGLKPNTKTLKRLFTNHVKPEYPWMRELSSKVYQYAFINLGEAFKRFFKGMGKYPRFKCKGRNDRFTIDNSGRPIRLGGLIHNLPFLKRVRTFEALPDCLTKKVTIYKKAGEWYISFSIEKTFEPTVKERERVGVDFGIKTLAVLSSGVEFKGLNPYRNAQKKLARLQRQLAKKVKGSQNWEKAKVKVQKLHRRIANLRKDYLHKMTTYIAKNHGEVVIEDLKVSGMMANHKLAKAIGDLGLYEARRQLQYKCERYGAKLVVADRFFPSSQLCSSCGNKQPMPLSERVYDCGCCGNKIDRDWNASLNLERYNEYGSTRKPVEG

SEQ ID NO: 34206 - protein, 374 aa, Gloeocapsopsis sp.
MKTLKFKLYSHKRNRYLKQSINAAGVIYNHCIALYNRYYRMWGKHLNCAKLQAHIAKLRKRNLFWQLVGSQAVQDICQRIENAYQLFFKHHKKGVRPPGFKKVKKYKSFTLKQAEYKFLSGNRVRIGNQIYQFWKSREIEGTVKTLTIKRTPLGELFVVVVVDKCSDLEVKFTTGKIAGFDFGLKTFLVCSDGTKIESPQFLKQSLNAIQKASRQHSKKLKGSSNREQARKNLVRRHEDIFNARRDWFWKLAHELTNKFDVLYFETLNLKGMQRLWGRKVSDLALGEFLQILEWVAKKKGKQVVYIDRWYPSSKTCNTCGHILKDLDLEIRQWRCPSCQSVNGRDENAAKNIQAVGASTVGLGNVRRLRAAIAV

SEQ ID NO: 34207 - protein, 354 aa, Acinetobacter sp.
MKTFKLRIKDKHCKVLDQLASEVNFVWNYVNDLCFKHLKKTGQFFSAYDVAKYTKGTSKECGLHSQTVQAVTEELITRRKQFKKAKLNWRVSNKKSARRSLGWIPFKKVAVKYADGYVQYGKHQFKLWDSYGLSKYKVKTGAFVEDSRGRWYVCLVVEAPKIEKTTSTTAIGIDLGLKDLATCSDGVKLKAPKIYRQYEQKLGIAQRANNKKRVKAIHAKIKNIRQNMLHQFTHKLVNSHAMIIVGNVNAKALAQTKLAKSVLDVSWTTFRAMLKYKCENAGVWFEEVNEAYTTQTCSCCSSRLSSPKGRTGLGIREWQCMECGTLHDRDINSALNILALGHERLAGGIPVLRS

SEQ ID NO: 34208 - protein, 406 aa, Acetobacter sp.
MIQRKANIYRLYPDAEQRLALARIAGACRAVYNLALEQRRDWWQRYKDRTGKSISFAGQCRELTDLRRDVDWLREAPIHPLQQALRDLDRAYQSFFSGRSGYPSPRRKGQHDSFRFPDPASLRVERAGKKTGRIKLPKLGWVAFRGWYALPGMIRNITLSRRAGQWFASVQWEREVEGPVPSGLPAVGIDMGVAVFAAMSNGETVAPGYFGKKAMRALRKAQRAVSRKKKGSANRRKAVRRVQTLHARVANARKDFLHKLSTTIAKNHGTVVVEALQVRNMSVSAKGTAEQPGRNVRQKAGLNRSILDQGWRMFRTLLEYKLEERGGRLIEVPAAYTSQTCSGCGRVDPDSRASQARFVCTACGHTENADINAAKNILRRADCPLKPVEGHRIRRPVEAGSIRRAA

SEQ ID NO: 34209 - protein, 392 aa, unknown
  TnpB Polypeptide
MANYTYRFRLYPTKEQIGFLNQETGNCRFVYNTLLSIAIKEYQDKKTPFNYYKIKKLLPLLKEQHPFLKLSNSQSLQESVKSLDKAFKNLFQKRSSFPRFKKRKSTNAVSIPQFFKIEEDKLYIPKLKTPIKIRLHRKIEGKIRSITIVKKPSGRFYINVLVEKEIQRLPKQDKAIAIDMGIEHFATLSTGEKIDNKRYLVKAEKRLKRLSRQLSKKEKRSNNFHKLSIRISKLYERVVNKRDNFLHKLSKGIIDDVIILEDLNIKGMHKSKYLSKSISDVSWGRFINFLEYKSKWYGREIVKINRYFPSSKTCSRCGYINKELTLSERGWVCPICHTIHDRDINAAINLLRVGLEQSEFTPVEYALVDDRSESYLKSHRMMKQEALHLNEG

SEQ ID NO: 34210 - protein, 344 aa, unknown
  TnpB Polypeptide
MQLTDRHIIKKTHPNWAECDQLAFCSKNLFNYANYQIRQSFIWQGKFIPYATLASEIKESEPYRSLPSKVAQQTLKRLDESWRSFFAALTEWKEHPSKFFGRPKLPKYKDKEKGRSVVTYTTQAISRKWLKKGWINPSQTNIFVKVIHPDIACVRIVPKCDHYVIEVVYHQEEKDYELDRNRIASIDLGLNNLCTITYNQPDLNPVLINGKPLKSINHRFNKKKANLQSQLPKSEKNSCQIRELTNKRNRRVDHYLHHCSRWIIDDLVSKNIGTLVIGQNKGWKNGINIGDQNNQNFVGIPHSRLVEQLKYKAQLVGIKVVLQEESYTSKASFDDGDLIPHLPP

SEQ ID NO: 34211 - protein, 374 aa, unknown
  TnpB Polypeptide
MIRVYRYRLYPTAAQVGALVRLLGLLRFLYNACLQERRDAWKKQRISVTKRAQGHQLRAIRDADPDYVAIHYHLLQDMVTRCDRAFQAFFRRCKIGEKPGFPRFKGRHFFKSFTFKDAVHRNGAALCAGGKRLHIHGIGNVKLKLHREHEGTLKQIRVIRLGDGHWYADFICADVPAKPLPRIDREVGIDLGITTFAALSDGSTIANPRCYEAGQAGLAVAQQKVARRKKRSGRRRKARRLVAKHHLKVARQRLDFQHKTALQLVQQNQVIYVEDLNVKGLAAGMLAKPVHDVAWGQFTSILVSKAESAGREVVKVDPRGTSQRCNACGATVQKDLSVRIHRCPCGYVDDRDVNAAKNVIRLGQSLREARRDAA

SEQ ID NO: 34212 - protein, 244 aa, unknown
  TnpB Polypeptide
VSIQTEREVEQPIPQGGAVGIDMGIARFATLSDGTFHAPLNSFKQHETALRKAQQALSRKVKFGHNWKKAKAKVQKIHSRIGNARRDYLHKTSTAISQNHAMVCIEDLQVRNLSRSTTGTIEQPGQNVRAKSGLNQSILDQGWFEFRRQLDYKLAWNGGHLIAVPPRNTSRTCPCCGHVSAENRQTQARFECVACGFEQNADVVGAINVLRAGHARFACEVNGAVMPSAAGAHRSDLGVAQCRA

SEQ ID NO: 34213 - protein, 285 aa, Sulfobacillus sp.
LQARPAEGTYPQGVKIHWENGVIYLPKAGWIRAVFSRRFQGQVKTVTVNRAPSGQFFASVLVEDENQVPEPVLETIDRAVGVDLGLHDFAVLSTGEKVPHPQWLERELYRLKILQRRLAKTTKGSKNRAKARQKIARLHERMVNRRQDALHKLSTDLVRRFDTVCIEDLNVAGMARNHALARRIAQSGWAEFRRQLEYKATWSGKHVRVIGRLAPSSRLCPCGYYNHDLTLADRQWDCPICQRHHDRDVLAANNIKRFAFAEHETGRDTPGVPGERPPVDDRRRP

SEQ ID NO: 34214 - protein, 377 aa, Marininema sp.
MHKAFKFRLYPTEEQAILINKSIGCSRFVFNQFLARWNEAYDSTGKGLTYSACSSQLTHLKKEMEWLQEVDSTSLQNTLKHLTDSFSRFFKKQNNRPRFKSKRNRDQSYTSQCNHPKKGRPTIEVVANRIKLPKLGWVKVAKSREVEGRILSATVRRNPVGKYFVSVLCEIHQCPYVPVDKEKAVGVDLGLKNFAILTDGTKIKPSRYFRQYEKKVAKAQRIMSRRTQGGSNWHKARIKVARLHEKIVNARHDFLHKLSSKLIRENQTICIEDLCVKNTVKNHKLANKSITNASWSEFVAMLSYKATWHGRNVVKIGKQFPSSQLCSSCGYRNQDVKNLNLRAWTCPRCGSHHDRDINASKNILQEGLRVFAVGQTV

SEQ ID NO: 34215 - protein, 356 aa, unknown
  TnpB Polypeptide
MERFNEAATFAARCGFDARVYSQPSIHKLAYREIRDRFGLSAQMAVRAIGKAVEAFKTMKSRGIKVCLTFKPRGAVTYDDRIMGFKGVDRVSLWTMAGREVISITFGEYQGERFDRIKGQCDLIYRDGQFHLFATVDLPEEPTGDVQDFVGVDLGIVQLATDSDGNAYGGEPVEKVRRRRHKARRSFQKTGTKSAMRRLKKLSGKEANFRRNHNHVISKAIVVLAKDTARGIGLEDLTHIRDRTTVRRKDRAKHSGWAFAQLQGFIAYKGKLAGIPVLTVDARNTSRQCNECGHIDKANRKSQAEFLCLHCGHSQNADLNAARNIRDRSTLRWIELAATVDPGLKSQSRLAASPRL

SEQ ID NO: 34216 - protein, 359 aa, unknown
  TnpB Polypeptide
MFNGKRFIWNYFLALNKEKLKNNERILTFYQTSLLLTQLKKEQEWLKQCEKSILQNTLKDLYNAFQEYFKKTRGFPKFKSYKNNYQSVKINFTNNNIENLEKESQYTSTGKYKKQNCKIKLPKIKKVKIAYSRQYEGRILSATISQVPSGKYFVSLCCTDIKSNKFQQTNNKIGIDLGIKEFAIFNTGEKIDNPKYYRKYEEKLKNKQRKLTSKQKGSNNRNKQRIEVAKIHEKIYNTRLDFLHKLSTRLVKENDIICIEDLKTKNMLQNHKLAKSISDASFYEFRRQLEYKSLWNDKIVSIIDQYFPSSKLCSDCGFKYDDLTLDIREWKCKNCGSIHDRDINAAINILNEGLRLLVS

SEQ ID NO: 34217 - protein, 482 aa, unknown
  TnpB Polypeptide
MQSSSKISEADSTSSAKGLFPFWDKFCQEISEKLWSATKTDSQGLVLTSYDGYVSNKIAYSWFSVAQLSLQTEKWLKISLPSSMFSVADSTDSVNTNLLSKKIRVYPETLLAKKWRAWIAASRWCYNQAIAILKTEKVGKYDLRKRLMDSAPEWVSQQPYNPRQNAVFQAYEAHKAACKSRGAAKFRSRFDPSQTIRFQADNWKSNTFYPRATKGLSFKAAEPILEVMQHEPTLSLINGQWFICYAINTVLPPTIQADLAIALDPGVRTFMTGFDGQNVIELGKGDIGRIYRLARHLDKLMSRIGLNKGSQFKRLRYRLRKSTAKIRIQIKDLVSELHKKVANYLVSKYKLIFLPTFETQQMLKKGQRRLATKTARAMVTLSHYRFKQTLKHQAIKYGCVVVDVTEEYTSKTCSKCGHVHRKLGGSKTFKCPECEHTLSRDLNGAFNILLKALRDTSRTGELAAFSILPYTVDLGQVLDLPG

SEQ ID NO: 34218 - protein, 306 aa, Okeania sp.
IYKSIRTKLKLNNQQKTLLAQHAGYSRWVYNWGLSLWNAAYQDGYKPNISCGMLRKRKLREVFTNHTKPLYPWMKNLSSKVYQYALLNLGEAFKRFFKGLGKYPKFKKKGRSDSFTIDNSGKPIELNGWNHKLPFIGIVKTYEPIEATTQKITISKQAGDWYLSFAYEFTQYLTPKTTEVVGLDLGIKTLATLSDGKVFESVKSYRQFEAKLSQLQYLNRNKEIGSANWRKIQLKIAKLHRKIANIRKDALHKLTTYLAKNHGRVVIEDLNVSGMLANHKLAKSIADQGFYEFRRQLACSVSMVWF

SEQ ID NO: 34219 - protein, 419 aa, Okeania sp.
MRTAYQYKLRPNKEQTAVIEMWLELLRRQYNYRLGERFSWWSENRCPVNACPLVMPIPQLRDNPDYYSQKKDLVNTKDKFPEYKLIHSQVLQDCIKRVKLAFDRWFKTDKNGHKLGKPRFKGKGRYRSFTYPQIKQNCIEENKINLPKIGNIKFIQHRPLPDGFQIKTVTISRKADGYYITLSLEDKSVPALTTKVEPTLKNTLGIDMGLKEFLVTSEGESVPIPQYYRKSQQRLKTLQKRLSRKKKGSKRWLKAVKTVAKQHKKIADKRKDFHFKTANELLSKADVIAYKNLNIKGLAKTRLSKSINDAGWGKFLTILTVKAGNAGQKIIAVNPKNTSQDCSNCGKKVKKELNIRTHCCPHCGIVIDRDLNAAINIKNRAVGHSVFKARGARRDTGATKREAHTIASASVWEMSLYFY

SEQ ID NO: 34220 - protein, 386 aa, unknown
  TnpB Polypeptide
LEGKVKEQTGLSAGFVQCCGDIALWMWWSYEEQRKIWLRKLKVAERRGDEKWLEKLLKREPNKPFAEGINGKVPIWFDYRIGMLEMAENIKITSHVIRVATLKKGEWITVPLNPAKYHLNLLEKSTIKSIQIVKKDSKFYVHVKVEYEVPDKPVSGVLSVDLGVKRSAATVLLKPDERLSPKSFLALREGKKNHRLNQLNKLVSKLQHAKKCEALKRLRRKRKRVAEHFDRLFAKRLAALSEGCLLAVGYPKGIKYESFKGNGKRRLRKLLTQWSYGRIIKYIVEERAERGLQTKVVEERWSSRTCWKCNSRNTERVNQSTLWCWDCCKHFNADYNATLNIGLPFLAKAADRGATAELAQTGDEQAREIVACKPGSQHPSGVGSSR

SEQ ID NO: 34221 - protein, 522 aa, unknown
  TnpB Polypeptide
MVLMQVRWNYKLLPSQQQSDLMDESVITLRKHRNYSLRERESGWNNNNRDAEQPIMYAYGSYCELETKLEDGACCPLTCPVVKHGVICDVPLTKTTKQKLDKKTGEVVKPSQVEWDSASGIQSKRTTQLRQENKYFSRIDSDVLQRNLAKLDAAYSGFWQHKRGFPAYRTAANFNSFEYKPGRVLFDVSPGKDSKHHCSRVYLPGIGWMRYFNSRPFPETAQIRTVTVKKKADGWYISVLLNLSEELPPVMPVEQIKGINALDVGINKLTASADGSFGENPRFATNAKTRRLMRIRTRRVSRKLKGSENRAKAGQRVTSLHKQIADKREAYQWQLANREVKKADAVAHEALNIPGMKKRCRPIRSATGRFLPNGQSAKRGLNRAISDAAWGRIFQMIAWVAAKAGKPVFKYNPRHTSQECSQCHHVSIDNRDGEKFLCSQCGHIDHADTQAARNGLQRVGLKFVSTRRKHLPADCGEVTPVRDDSAIHGKRNQGRNPKSKAMPETGIIEQLSIFDLIALETG

SEQ ID NO: 34222 - protein, 427 aa, Escherichia sp.
MHQENTMLPRRISVSLFIDQSIIWSVKRLQAFKFQLRPGGQQEREMRRFAGACRFVFNRALALQNENHEAGNKYIPYGKMASWLVEWKNATETQWLKDSPSQPLQQSLKGLERAYKNFFQKRAAFPRFKKRGQNDAFRYPQGVKLDQENSRIFLPKLGWMRYRNSRQVTGVVKNVTVSQSCGKWYISIQTESEVSTPVHPSASMVGLDAGVAKLATLSDGTVFEPVNSFQKNQKTPARLQRQLSRKVKFSNNWQKQKRKIQRLHSCIANIRRDYLHKVTTTVSKNHAMIVIEDLKVSNMSKSAAGTVSQPGRNVRAKSGLNRSILDQGWYEMRRQLEYKQLWRGGQVLAVPPAYTSQRCAYCGHTAKENRLSQSKFRCQVCGYTANADVNGARNILAAGHAVLACGEMVQSGRSLKQEPTEMIQATA

SEQ ID NO: 34223 - protein, 403 aa, unknown
  TnpB Polypeptide
VKQLRAFKFKLRETSLQQTKLAQFAGCRRFVYNKALAIQQGLKEEEQQVVGYAGLCKLLTEWRHAEETAFLAEAPTHPLQQGLKDLGRAFSNFFAGRAKFPRFKKRGRNDSFRYPDPKQIKLDEKNSRIFLPKLGWVRYRKSRVIAGEVKQVTVSRAGDAWYVSIQTEQEVVSRAPGTCSVVGIDLGVAKFATLSDGTTYAPNVEYRKYGKLIAREQRRLSRKEKLSANWRKQVKKIQRLHRRLFNIRLDFQHQASTAICKNHAVVVVEKLNVKSMSASASGTVEKPGTNVKAKSGLNRSILSQGWAEFRRQLQYKLESAGGTLVAVPPKHTSGKCSSCGFICKESRKTQSKFVCVQCGHCENADLNAARNILAAGLAVLACRETPMGISLKQEPTVLVSVLT

SEQ ID NO: 34224 - protein, 337 aa, unknown
  TnpB Polypeptide
MILTYKIKHGRDFGRELGLAKKVAEFAIIERKISSKDVKHIGLKSMIANQILRKYARNRNAKQVKSVKLAVPSQGIKFINNEIIMPCLNLVLPIHFDSSFDKINQIELDEIYAYVACSYKELPKYTPEQIIGVDRNTTAHVLVASNIDTGKVLKLGKKCNHIHQKYKHIRKFLQKKGKYSLVKRIKNRESRIVRNINHQISKRLVIEAKNNKAVIVLEGLKYIRRIVKTKRKQRYSLNSWSFYQLQNMIEYKSKKYGVPVAYVEPQYTSQRCSRCGHIESNNRKAKEFHCVKCGVVENADVNAGFNIAYLHRQGMSRFNKESDLLKGSTDTPRGEML

SEQ ID NO: 34225 - protein, 403 aa, unknown
  TnpB Polypeptide
MKWNEVKDEAAPWWAENSKECYSAGIADLVQGLANWKAYKAGKRKGRKVGFPKFKSRHRDRARVRFTTGAMRLEPDRRTITLPVIGALRSRENTRRVERHLTKGNAHLFSMTLSERWGRLFVSVNYAVRTKVISPSGKAPSKPDVRAGTDLGMRNLDSVADTEGDVTIFPNPAPLRASLTERRAAGRELSRRIPGSRGHRAAKAKLARLDRRCVHLRLESHHQLTRWLVDTYGENVIEDLDLGAMKRSMGRRAFRRSVSDAALGQVRPMAVYKAERFGSRLTVADRWFPSSQIHHDCGCKLIAEHKLDKMLTCAMTGEAVDRDTNAALNLRDWPEHASCGSVGATVPYVSSSVGSNGDGGSDAQTTAHLGSGRQTGTPVPAVRGEARTEPSDGRGTPQGVHPR

SEQ ID NO: 34226 - protein, 416 aa, Microbispora sp.
VGVRRSFKFLLRPTSNQAASLAACLEDHRVLYNAALEHRRTAYRKAGVTVRYGDQSAELKHIRADDAEGQGRWSFSSQQATLRRLDKAFAAFFTRVREGRTPGFPRLKGRGWFDTVEWPKDGDGCRWDSQPEHPSTAYVRLQGIGHVRVHRHRPVRGRVKTISVKREGNRWYVILSCDDVPAERLPQTGAAVGLDMGVASLATTSDGDPLDNPRHLAASAGRLAAAQRALARKKRGSRRRRKAVAWVAALHAKVRRQRLDYAHKQALALVAAYDVIVYEDLRIANMTRSAAGTIVQPGRNVAAKSGLNRSILDAGWGVFLRVLAHKAESAGRELIPICHRATQAAADTVDMTRRVSIFLVALAVLMIFEWINLGFNLADGHETSFYVVHGVLIAVNILLALALGAVGVRGWMKGRA

SEQ ID NO: 34227 - protein, 425 aa, unknown
  TnpB Polypeptide
MQKAFKVTLIPSYNQEVLINKTIGCARFVYNRFLALRQELYTTEQKTLNYNACSQQLTLLKKEIEWLKQVDKFALQNSLKNLEIAYKNFFADLKKSKNKKGVGFPKFKKKHGCKQSYKTNLTNGNIQVIENRLKLPKLGWVKFHKSQDIAGHVVNVTITRTSSGKYIASILCETELEKYPQVTRNIGLDLGIKSYLVTSDGEVVDNPKYYRTQKRKLRKANKKLSRSVKGSNNRVKAKIKLAQIYERITNLRDDFLHKLSTRLIKENSIICIEYLRVANMVKNHKLALSITDASWSKFTTMLEYKAIWHDRIVQKIGTFYPSSQTCNSCGFINPLVKDLKLREWTCLSCSNYNLRDKNAALNILSEGLRILTAKSGGINTAGVSPATPRLFKTAAVGAPDAITACGELVSPEVIQTQKIVEAGIA

SEQ ID NO: 34228 - protein, 336 aa, Calothrix sp.
MPGLEIIRFPIYQSAFQALGEAVTRWRKGLADFPVLATKRKGDSFTVYKANAVYPKKGEPALPFTNRVVIEPGKKIDLPGVGTVRSKEKVDYYYSSQTFTVSRTADKWFVSSNIDAERVPPIIHKVEKVGIDLGIKTFATLSDNSFLTAPESIKKAKTKLSKVQWQNKNKQFGNRKQGVRASNNAKKFFDTQSQKHAHIANIRRDFLQKTTTEISKKYYKIRVEDLNVSGMVANHKLADALSSLGLYEFRRMLDYKQSHYGTKLEVVDRWYPSSKTCSKCGHVQDMKLSDRVFNCGACNFSINRDLNAAINLEKADSYLAKPKIKKSIKKSKKKSC

SEQ ID NO: 34229 - protein, 438 aa, unknown
  TnpB Polypeptide
VEPDGGAAGAHREGVARARCEGRGAVKVRRGFKYRLYPTPEQVARIEAWENALRFLWNLAHGQRVAMGRRCRVDRKRITAFGQINELTELRAMLPWLADVPRNVCAQMLVELDEAWQRYFNGSSGTPLFKAKGHDRAAMAEPHPQSFRAESGAIIFPKLGRIPAVIHRPIVGKPKQCAIVRDGDQWFACVTVEQEIADPAPSTLPPVALDMGITRLITDSNGGVVENPRHAAKMQPRLTRAQRTVARRKKGSKNHAKAKLKAARLQRKVRRQREHALHVASHHYAKSHGTVIVEALNITGMSKSARGTVDAPGVNVAAKRGLNREIQRAGWGRFVTMLKYKAIPLGGRVVEVPPHHSSQTCSACGCVDSESRRSQASFVCTACGHADNADVNAARVLLVRGLSKIAVETTVTVCGGFATGRPAKQKLRVVRRGPVARS

SEQ ID NO: 34230 - protein, 401 aa, Paenibacillus sp.
MFGIIEIRIFLNSVLISLIPANRGVFFLMEKAKVTVTVKIKLTPTPEQSERMLQTLHAYRQACNFVSQHVYETKKRSVICLHKLLYRDLREAFSLRSQMAQSVLKTVAARYQSIVSNGHPWTQIHFKKPEYDLVWNRDYSLSKQIFSINTLEGRIKVPFVMQGMEIYFDGTWIFGTAKLVNRRGKWYLHIPVTKEVDRVTLPSIHQVVGIDLGINFVATTYDIAGKTVFYPGRPIKDKRSQYKHLRKTLQQVGTPSARRKLKRIGERENRWMTDVNHRISKALVSQYDPFTLFVVEDLTGIRTATERVRVQDRYENVSWSFLQLRKMIEYKAALRGARVVAVDPRYTSQTCPKCDRKNKANRDKKKHHFCCMACGYQSNDDRIAAMNLQGIGIKYIAEVAK

SEQ ID NO: 34231 - protein, 509 aa, unknown
  TnpB Polypeptide
VRFYDTVTRHRFTAENGVDAEQVERNLAQMVAWVAEAEREVLASTEFHDLAVKVLRGDRPTGSLNSWGRKRLSRYDFKFQRHNMNEMLVSNVVGALELYAMSVGLFQVMSTHPKETKPERIASHYRGTYPDAPQPTNGMVRAHLRRYHVKGERKASLSGVSAKMNLAVCDTHFAPKAFRGEKDPLNVIVQVKTPSYGTTKISLRLPDNIERFGRGKVCRPTIRLNNKGQVVFDVAIEHEVQQRDTAKVVGVDLGKVEPFVATIIDPENKYRSAPYHTRYKVRLGSLVRAEKKRRKLASHLHEKASLCERYNRTDHADVLRAEAKRVSAKATRIKHEISQCIASQVVSVANQNDAHVAVENLSWLEAKGGRWPHAEIQSRIENTSKRYGLKVTKVSAKDTSRTCSRCGSKASNNTVTRVGTCATCGFELNRDVSASREISLRAVSNVRNRERMRSLLRQRTLERSSAVTRQSKPVNALGGIQGHTGTSNNGLEATLMMVRETLDSRGSPS

SEQ ID NO: 34232 - protein, 396 aa, unknown
  TnpB Polypeptide
VDSRNPTALVVGEMRGVGCNSQSLEYATSMKLTAQVKLAINSSQRETLLHTMETANSACNEISDTAWKTGAFRQYDLHRECYKTIRDKFPLSAQVVVRCIGKVSDSYKKDKKTKRNFKKRGAVTYDERILRWYDNSVSIWTMNGRQKIPFGVGDHHKKLLQFQRGETNLVYMDGNFYLFTTCEIEEPEQLKTTGWLGVDLGIKNIATDSDGNKYSGGHVNGLRKRHAKLRRRLQNKGTKSAKRLLKTRKRKEARMAKDINHCIAKRLVRLAQDTLRGISLENLTGIRERITVRRSQRRAHHSWAFYDLAQKILYKAALVGVPILFVDPRDTSRTCQRCGHCEKGNRKDQSTFKCLSCGFSANADDNAARNISDKASRASVNKPYVATFGLATSLSL

SEQ ID NO: 34233 - protein, 382 aa, Escherichia sp.
MRRFAGACRFVFNRALALQNENHEAGNKYIPYGKMASWLVEWKNATGTQWLKDSPSQPLQQSLKDLERAYKNFFQKRAAFPRFKKRGQNDAFRYPQGVKLDQENSRIFLPKLGWMRYRNSRQVTGVVKNVTVSQSCGKWYISIQTESEVSTPVHPSASMVGLDAGVAKLATLSDGTVFEPVNSFQKNQKTLARLQRQLSRKVEFSNNWQKQKRKIQRLHSRIANIRRDYLHKVTTTVSKNHAMIVIEDLKVSNMSKSAAGTVSQPGRNVRAKSGLNRSVLDQGWYEMRRQLEYKQLWRGGQVLAVPPAYTSQRCACCGHTAKENRLSQSKFRFQVCGYTANADVNGARNILAAGHAVLACGGMVQSGRPLKQEPTEMIQATA

SEQ ID NO: 34234 - protein, 367 aa, unknown
  TnpB Polypeptide
MLKVYKYRLYPNKKQEEQIQKTFGCCRFVYNQTLSYRKEIYETQNKSMNKISCNNYCNQVLKKEYDWLKEVDKFALTNAIYNMDTAYQRFFKGHSNYPKFKSKRDNKKSYSTNFTNNNIKISFESNKIKLPKLKWVKAKIHREFVGKIKSVTISQVPSDKYYVSILVEQEIKELPKNEFAIGIDLGLTDFAITSDGVKYSNPKWLRKQENKIKKLQRDLSRKKKGSKNRNKTRIKLAKSHEKIANQRKDFLHKLSSELINENQVICLEDLQVKNMLQNHKLAKAINEVSWYEFRRQLEYKANWYGRTVVIIDKYYPSSQICSNCGNNTGKKELSIREFDCPYCGKHHDRDINASINILHEGLRILNE

SEQ ID NO: 34235 - protein, 297 aa, Halorussus sp.
MGQLKSGEFIKGFNLKQHRSDFILVEYETRPDVAVKNIQQVRAVWNGDRWELHLVCKVDIPVEDAPGDNTAGIDLGISNYLAIAYDDGDAELYPGNVLKQDKHYLTRDEYKTEGENGPSKRALRSRQKLSRRKDHFLHALAKHIVEQCIAHKVGRIAIGDLSKIREDENGESRNWGGRGNKKLHGWEFDRFTTLLEYKAEEHGILVNRTSERDTSKTCSCCGRKRDANRVERGLYVCESCGATMNADVNGAVNIRRKITQNPPTGDISNGRLARPVAYLFNQTSGRFAPGEQAGCKP

SEQ ID NO: 34236 - protein, 367 aa, unknown
  TnpB Polypeptide
MNRAHVIQLKPNNTQTTYMRKACGIQRLAYNWGLAEWKRQYAAGAKPSGRGLKKDFTAIKRTQFPFITEVTKCCCDTAFDNLNTAFIHFFRRVKQGGKPGYPKFKKKGIKDSFTIDNSKFAVAAKKIRIPKLGWVRMVEELRFSGKLMSATVKERAGKWFVSISVEFTTPSRNNQGTGAVGIDLGVKTLATLSDGTIFENPKTHYKYDRQLRRAHKSLSRKKKGSNNRQKAKAKLSKLHYRISCVTDDYIHKMTRYIADNYHTIVLEDLDVAGMLKNKYVSKSVSRANFHKIKQFLSYKCADVKVVDRYFPSSKLCSSCGTIKDMPLSVRTYECTCGLSLCRDLNAAINILRAGCPEIKPVETTALA

SEQ ID NO: 34237 - protein, 231 aa, unknown
  TnpB Polypeptide
MNKAYKFRIYPDKEQEILFAKTFGCVRLVYNYYLDKRIQQYQMDQSTLNYTWCANDMAKLKKTEEYSFLKEVDSIALQQSLRHLDAAFQNFFKHSKSGFPKFKSKKNSRKSYSTNCINGNITIKNGCIKLPKVGLVKINQHRSIPSDYKLKSVTIRQSPSGKYYASVLVEYDKQVQEQTPQSFIGLDYSMHELYKDSNGNEPKYPGYYRQAEKKLKREQRKLSHMVKGSNN

SEQ ID NO: 34238 - protein, 280 aa, unknown
  TnpB Polypeptide
MDQGSVFKSRKKVYRRWMYCFYKIFKHQSDFPKFKKKGKSDVKMYFVRNNPKDCQCERHRLKIPTLGWIRIKEKGYIPTTKDGYMIRSGTVSVKAGRFYVSVLVEIPDVNIDNSSNEGIGIDLGLKDFAIISNGKTYRNINKSAGLKKLEKQLIREQRSLSRKYENLKKGESTQRANIQKQKLKVQKLHHKMDNIRTNYINKTIAEIVKTKPSYITIEDLNVKGMMKNRCLSKAVASQKFYEFRTRLKAKCDENGIELRVQIDFIHLQRPVTIVVLSGKI

SEQ ID NO: 34239 - protein, 376 aa, unknown
  TnpB Polypeptide
VHKVTLKAFRFRIYPTEEQKIYFAKTFGCVRFIYNTMLFDKIEHYKANSEMLRNTPAQYKKEYSFLKEVDSLALSNAQLNLEKAYKNFFREIKKGNKDQGFPKFKKKSYNQSFITNNQKETVALLDDKYLKIPKLKSNIRIKLHRQLPKDAKIKSTTISRSSSGKFYASILVETDTVKPLPKRNEVVGIDIGIKTFAVTSNGLEIRAPKALLKHEKRLAFLQRALSLKVKGSNNYYKNKRQIALLHEKITNSRKDFLHKLSTQLINENQVIKVENLKVKDMVKNPMLAKYISDASWSKFVEMLSYKADWYGRELNKVDTFFASSQLCSVCGYKNKEVKDLSVRAWICPSCGANHDRDVNASQNILNYETVGTTGLA

SEQ ID NO: 34240 - protein, 425 aa, Natronoarchaeum sp.
MTDAQALVKTLDFQLNIQSDNESLLYDATLEARRVYNETIRLAKEGVDWNAIPDRVADDAHLVKNTTQRIVAKALGAMENYYEYDDFGLPSHTKDGAYPLRANYKEGYNLSLTDDGDVAFRISAKPYNHVKGVLEGSDVHLDILKSALESDGWKIGTAEALFHNDNAELHVNVTNTEQTVRGKLDSRTVVGVDVNEDNVALTALSEDGVEDTLVIGFPEIKFERHRYFTMRKRVQNAGKDSTHDTLEGHKERFVRDRLHKVSRHIVEWSQQFEKPCIVFEDLKEMRDSIDYGTRMNRRLHHLPFRALQFCTSYKASFEGIPTGWINPEYTSQRCPICGHTERANRNKKRFKCKDCSHQGHSDRGASVNIAVKSIKKHQKWNVPALNSLPQVQKVRRRASGAVDAPTVTHPTARGYQADGRMGVSD

SEQ ID NO: 34241 - protein, 415 aa, unknown
  TnpB Polypeptide
LKDNNFKLSTKQLTEMQKSMNNVFIDSHFLNSAQYDAKQLKGKTKVIFGGTYNYIQRCKGKISKQEYYSNRLQPLLSIGEACKLGNRKFEIKSESVILFKPDRHTHITLQLPKLRKNYRRDIQKLITLQNSCSIPITYKLDVKYIYITFNELTEVNQSYKVDRVFAIDLNPNYIGWSVVDWASSTQQTVVDAGVISNKEINVADNALHSSSYATERMYLNNKRTYENIDSAKFLVEIAKHYKCELFAIEKLEIISNDTGRGRKYNRLVNNQWNRNIFYSLIEKYCDRFGIRLYEVVANYSSFEGNLIYRNTGLPDMCLSSIELGRRAYEFHHQYSKKDKPITKNIMFDISAEARTKIIQSLEELNYSGAFDDIKSLYIQIKNLGLKYRVQLEDSILKAVYSKKNIKSMVLLYSIN

SEQ ID NO: 34242 - protein, 301 aa, unknown
  TnpB Polypeptide
MASYVARIATLKKGEWMTLLLNPARYHLSLLERGVIKSFQIVKKSHKFHVHVKVEYDAPERPVSGVLGVDLGMKRSAATVLLKPDERLSPKSFLTLREGEKNHRLNQLNRLVSELQRAERYEALKRLRHKRKHVAEYFDRFFAKRLAGLSEGCLLAVGHPKGIKYESFKGNGKRRLRKLLTGWSYGRIIKYVVEERAERGVPTEAVNERWSSRTCWKCHSRNTERINQSTIWCWNCCKYFNADYNAAINIGLPFLAKAAGRGAEVEPAQTGDEQAREIAACKPGSQHPSGVGSSRRNGSIF

SEQ ID NO: 34243 - protein, 317 aa, Streptomyces sp.
LQNAFVAFRGKRSRFPRFKSKRRSRASAEYTRSAFRYADGRLVLAKMTEPLDIVWSRPLPADVVPSTVTVSRDSAGRWFVSLLCEDTPAPMPVTTKAVGIDAGLMALVALSTGERVTNPRHERRDRERLVRAQRSLARKEKGSKNRAKARVRVARIHARIADRRRDHLHKLTTRLVRENQTLVIEDLTVRNMLKNHKLARAINDVAWRELRTMMEYKTAWYGRELITVDRWFPSTRLCSACGALAETMPLNVREWTGGNCGTTHDRDENAALNLLAAGLAVTAWGTDARPQRESSSRSGRSVLKQEAPPATVGIPSP

SEQ ID NO: 34244 - protein, 365 aa, Okeania sp.
MKSVRTKLKLNNQQKTLFAQHAGYVRWCYNWGLSLWNAAYRDGYKPNAHKLRKVFTNHTKPLYPWMKNLSSRVYQYAFLNLGEAFKRFFQGLGKYPKFKKKGRHDSFTIDNGGRPIELNGWSHKLPFIGIVKTYEPIEATTQKITISRQAGDWYLSCSFELTPETTPKTTEPKTTEVVGVDLGIKTLATLSSGVVFESLKSYRCFEAKLSRLQYLNRNKVIGSANWQKAQLKIARLYRRVANIRKDKLHKLTTYLAKNHGTVVIEDLNVSGMLANHKLAKSIADQGFYEFRRQLKYKCEWYGCNLVVVDRFFPSSKTCSNCGHIQDMPLNLRTYDCMKCGLSIDRDLNASINLRNAVGSTVNACG

SEQ ID NO: 34245 - protein, 347 aa, unknown
  TnpB Polypeptide
MVKVFRYRVKSLNGLLNRQRRAVNFVWNFCNDTQKFALKWHKRWPSGFDLNTLTTGTSKELGLHAGTINAVCEQYAKSRAQKKRPFLRYRGRKSLGWVPFKGRDLKREGNAFRFHGHTFRVFYSRPLPEGKIKDGSSFSQDARGHWFLNIVIEVADVPARVPVHGVGIDLGLKDFATLSTGAKVENRRHYRALEHHLGIAQRAHKRRQVTALHAKIVNQRTDFLHKEALKLVKTFDYIAVGNINAAALAKTRLAKSVLDAGWSSFRNLLRYKAIEHGAWFEEVDERMSTQVCSTCGCTSGPKGVADLGIRDWVCSACGSRHDRDQNSALNILLRSGHRTPVVGIPVL

SEQ ID NO: 34246 - protein, 382 aa, unknown
  TnpB Polypeptide
MKRANTFMVEGCPALWELADNCARLYNEVNFERRQAYIHYKRFEWYPKHLYEKYAPLIGSATAQQIINKNNEAWRSFLALKRLEAERRFPEHITKVSMPRYWKRNGKRELRIIVRNDCYKIDDEYIYLPKGLKLKYKGKLKWKGKQGRLGIVYDDVDEVWRGFMAVEVEKPPLKGGNKPLYIDLGIVNLATLWFEGLRQPIAFSGKSVLSDWWYWTRKIAREQSRLARVNRVKTSRKLRRLYRIRQRRFRHAVNAMIKAIVRCADQLGISKVVLGRLKGVRSKSRNGKANAMINNFWGFNYIVRRFKEKAEEYGIEVEERSEYKTSSKCPLCRSEDIATRGRLFKCLSCGLEANRDAVGVLNIGYLHGGGVNGVVAHPLLLR

SEQ ID NO: 34247 - protein, 329 aa, unknown
  TnpB Polypeptide
MAREVNTVWNYCNQASRDHWRRNRCNLSGFDLNRLCAGSSTAFDLIGDSTIQEVGQAYATRRRACRKNRLRWRVSNRKHRRYSLGWVPFKARAARFRNGAVRFAGHDFRVWDSYGLGDYAFQAGCFTEDACGHWYFCVTVKVQPEPDTNGQPVGIDMGLKEAAVASNGMRCASGWYRRLEQQIAIAQRARHKKRVKRLHARVRDCRKDAQHKFSTAVVQAASAVCVGNVPVKLLTAGKQAKSGYDAGIHSLRTMLRYKCEYAGIDYQEVSEAYSTQVCSACGAPPPTSPKGRAGLGVRHWTCCECGALHDRDFNAACNIAHAGAGHRPQ

SEQ ID NO: 34248 - protein, 379 aa, unknown
  TnpB Polypeptide
MLSRYVNIVYKTLMVKLLPDRDQTDALIETFVKFNEACNFVSRLAFDRKMYNKVLLQKIVYKDIRENYGLAAQLAIRVIAKVVETYKVDKTVLHEFREYGSIVYDQRVMSFKSLDTVSLNTVRGRIRIPMTIGKYRELPLDRVRGQCDLVRRNRIFYLMVVVEVPEGEAIETEDVIGVDLGIENIAVDSSGHYYSGDRIAEARTRHSNLRSRLQACGTRSAKRHLKKLSGKERRFARDVNHVISKEIVERAKGTSSAIALEELRGIRKRATVRKDRRYRHNSWSFRQLRDFIEYMALESGIPVVAVDPRNSSRECPACHTIDKRNRPERSSFKCVSCDFEGEADFVASLNIRNRAAVNQPIVAGAIFDQYLIPSYKPHP

SEQ ID NO: 34249 - protein, 221 aa, unknown
  TnpB Polypeptide
MRKDAREQERRSISYHESKRQIPIWKKEHPELSTVYSQVLQDVSKRVDLAFEAFFRRVKAGENPGYPRSGFHLNDAGTHLSASKIGDIPIVLHRPIEGPIKTLTIRRTATGKWYACSSVEYEPTPAREKGTVVGVDVGLESFATLSNGEKTENPRFFRTDEKALAKAQRKLSKTEKGTPERKKARKVVARIHERIANRRLDFAHQTSRQLVDRFARSCLRT

SEQ ID NO: 34250 - protein, 414 aa, Anabaena sp.
VFIYEYKVKPKTQQITAINEAIRTSQFVRNKVLRYWMDNRGVGKTEMFRYNTSLRKEFKFVEDLNSHACQTAVERVLKAVNRFYDNCKKQIPGKKGYPKFKKNTRSVEYKVSGWKLSENRKHITFTDKKGIGTLKLIGTRDLNFYQLEQIKRVRIVRRADGYYVQFSIQLDPTNTVKPLTPSQKAVGIDVGIKYFLADSQGNIEPNPQFYRQGEKQLNRLNRKKSKKYHATGYNFGNQSNAVAQKGQPQSRNYHKAREIYARKHLRVSRQREEFVKRVALRLIKSNDLVAYEDLNVKGMVKNPQLAKSISDAGWSKFRQWLDYFGYKYGKITIAVAPHNTSQNCSNCGEKVQKSLSTRTHICSHCGYVEDRDINAAINILQKGLSTVGHTGSDKLGEFDPLAPLEQSCGEKIGL

SEQ ID NO: 34251 - protein, 404 aa, Streptomyces sp.
MIRAYKFLMRPTARQSVALGEMLRDHCSLYNGALEERRDAYRHPSKTSIRYGQQSAQLKDIRAFDPERQGRWSFSSQQATLRRLDKAFAAFFRRVAAGLAPGYPRFRGVNWFDTVEFPKDGDGIRWDSTPHDRVTRVRFQGIGHVKVNQHRPVAGKVKTVSVKREGRKWFVVLTAEQDQPEPLPATGSMVGIDLGIANFLADSGGGFVPNPRHARKAAAKLQAAQQALSRFPRRKAKDRTRNHQRAVEKVVSLHGKVRRQRLDHAHKTALHLVREHDFIAHEDLKIRNMSKTPAPKPDPEKPSSFLPNGAAAKAGLNRSITDAGWGVFLAILNAKAESAGREVMAVDPRNTSRRCPECAHTAKENRPTQEKFHCTACGHTAHADTVGALNVLRAGLVRRNADTA

SEQ ID NO: 34252 - protein, 260 aa, unknown
  TnpB Polypeptide
MQMSVGDRRNNNKHGGTSRMTKKSAVSSAAPYLGRPVCKPVSLDPGVRKFLTAYDPTDCTVTFYGNRWNQVIYDLAPKYDALQSKLANLRNPRDPDGNKIEVKDSINKYRGAICKVERQMLAIRKRIANLKKEMKYQIANTLTKKHDCILLPKLKSGDLVCKNNSRRLTTKVVRQLLSAGHCSFFDHLKMKCQERGVVFLHVTEHYTSRTCPCCGHQTNCKSREVYECVNCGFKHDRDCVGAVNIMLRAIRADSRRKVVV

SEQ ID NO: 34253 - protein, 507 aa, unknown
  TnpB Polypeptide
MTGLQKGEKKMYKDAGNRPRECLFPVMKEKSARSPIMKQKRKKRPKPGEPQHITKAVTQIRLLEANAGKLAALDELAPVYLLLCQQYVMLFCMEEAPDKLRAPLYPTPLSERWHRVAIMQAAGIARSWRTNRAQAYQQYQEDLERYQQHQADGTSRAKATEPVWHEWNVATLREPCIQANVNVVKLEESRDSTYDYWLTISTLSKGQPMQVPVKLAAYHKEQLMDPKTHLARKLNTSVQLNQREGLWWLTLSYDEEVTVQTPPDAPVVGIDVGIANFVTTSTGKHYGSFHKNLRARHKRDRAKRRRKAKLRACLKKKGVQKLPSTSSRTGQRLIRHVKQEINYAVNQCYKDPDHQGVQFAYEQLSVASMRFKARAQNAYLRASHLGHIPQQILWNSQKRGVVATPVSSAYSSQECSVCHYTDRTNRPDQRTFRCQVCGFEAHADHNAAINLSRRVGDTQLRACRDRTAIKTVLMQRHEAWKQRQGVEHTRPVTRRKRGKSSASLTSL

SEQ ID NO: 34254 - protein, 473 aa, Methanosaeta sp.
  misc_feature (266)..(365): Xaa can be any naturally occurring amino acid
VDQFVLCRHCWNRDSRDHQEVYRGAEIQMKTAYKFRMYPNRLQEAQLDLTLETCRHLYNTALADRKNAYETEGISRSYEDQAAMLTVERENGNFLGIYAHCLQDVLRRLDKSFKAFFRRVKAGENPGYPRFKGRGWYKSFTYPDSETGYKMEGSKLTLSKIGTIRIFKHREVEGKIKTCTIKKDLLGHWYAVLVAEIEDAPAVEPTTTAGVDVGLKSLITTSAGESIQYPRNYIQLEEKLAAAQRSLSRKKRGSANRLKAKAKVAXXXXXXXXXXXXXXXXXXXXXXXXXXXXXXXXXXXXXXXXXXXXXXXXXXXXXXXXXXXXXXXXXXXXXXXXXXXXXXXXXXXXXXXXXXXXXXXXXXXXMLKNHHLAKHIQDHAWGKLIQFTQGKAAKAGKVVELVDARCTSQKCSQCGIMVPKTLADRVHLCPKCGLEMDRDLNASINIRTLGLRGRAYRDAANNQPVSDVGSPGI

SEQ ID NO: 34255 - protein, 170 aa, unknown
  TnpB Polypeptide
MPEVPLPPANPERVVGIDLGLKDFAVLSDGTRIAPPKFYRKGLSKLRRAQRALSRKQKGSKNRDKARQRLNKVHARTRNQRRDWLHKLTTDLVTRYDGLCIEDLNLKGMGRTKLSTSVLDAALGEFRRQLEYKAVWHRKHLAVIDRYFPSSRLCRGCGTIHTALTLSERV

SEQ ID NO: 34256 - protein, 383 aa, Chloroflexi sp.
MIQVRRTFKYRLYHNRRNKRLQRCLDVAGLIWNHMVALQRRTYRLSGCYIKRYEMQKHLAKLRRGSPRFAHWRLLGSQAVQELAERHDRGYQQFFAYKRGAGRRHGRPGYKKVKQYSSFTLKQAGWKYEGGNRIAIQGTTYKFSLSRPVEGEIKTVTIKRDSLGQLWICFSTVMDAPNVRVSTGNSGGFDLGLRAFLTDHEGKEYHSPQFLRAELNTIARRNRELARKQRGSNNRRKARWRLAKAHARIANKRRDAHWKLAHELCGRFDTICLETLSIDGMKRMWGRKVSDLGMAEFVEIVQQVAEKTGTQIVRVDRWLPTSKECARCGAVQEMPLSERHYDCPACGWSCSRDQNAALNVLAAGASAAGLGDVRRPLLAAVSA

SEQ ID NO: 34257 - protein, 484 aa, unknown
  TnpB Polypeptide
LTIIRTESHALATSPAVRADVTRTIDAYRRVVRALCGVLMVHWPEISRAKSKCQAVESLFHATKLRPVVRYPVLDRIVGKMPSYLRRAAIEHAVGAVSSFQSNWSNWLDGQIGGRDRKVGDRAPRLGLANVFPSLYGGNMVLYGQGLRSVQVKLLGADGQWRFSEPLALKGRFKRVNPKASTLDLCPSLIQRGARVMLSCPVEVRPPKFISNKSFMDASRGDARVCSVDVGINTAATAAIVDSTGTVIARKFLTCGRHNDRRDALASVIATKQSLSGAIQRGERHCVSLHRRIAGLSLDAARSMAAELAAFAAQHGAKAFVIEDLKGWRPKGPSRAQRKRFHRFQHRALVQALMHQAQELGMRMLEVFPRGTSRWAYDGSGKVTRSKANAQLATFASGKQYNADLNGALNIAARGLALLLGIQPNNKQASTGKSSGDEERAPLVLADIWKWARPRDQVVSGASNQQAMPVGVSNDAPTTAPCGA

SEQ ID NO: 34258 - protein, 361 aa, unknown
  TnpB Polypeptide
MTTTETTKIVQDINLARITNNCEELDDFKELNSIYKEIISLSEKGLDRSTILGMVEAYCFTPKVTQETTEIPAPVIELKDSSVERATVVQEGSSGQHNVTRIEHLGTVSIAQSVTVKAPVPQLVLVPENCDDNLEKEAKEIDACVCTPTKVLDDVSSEEIDFAGIDLGFSFTDENLISIAFSDFSTPVKMTNAPLQKKLKQLRTVSKLLNSGNITKLENDELSNLKSSIGNITKSTIKLLKIKRVKKVYLGDVSGNSKTVMSLVSESLTSRLKKENIDYELVEEYQTSLISSLDNESFDKLDGDFLGKRTNHYFKTATNTVDADINAAYNIIRRGSGLSFKVDKNFAPACYNFKYCNGCNL

SEQ ID NO: 34259 - protein, 204 aa, Actinobacteria sp.
VLSDGRKIASPRFLRRAEKKLRRAQRSLSRKETGSRNRDKARVKVARAHARVADARREFHHQLSTALIRDNQAVAVEDLAVRGLARTRLAKSVHDAGWSAFVHMLEYKARLYSREFHRIGRFVPTSQTCSACGVKDGPKPLHVRIWQCPSCGTWLDRDINAAVNVAKAAGLALTACGAQVRPGPRVLAQRSEAGTHPKSCREAA

SEQ ID NO: 34260 - protein, 391 aa, Thaumarchaeota sp.
LRVPLETVKLTASFKLDGSFPESLFSTYREILGQLLDHAWAKGVTSFERLKAEKYHELRARYPSLPSHYIYTACQMACSIYKSSRKLKRRGVAKAEKPLFKKQVMMLDDHLFSLDLEGWEASIAVGGGKVRVKLLHGTYHEKFKGMRVGQAWLVKRGSDLYLKVVFSKVVEVVETNEKAVAVDVNENNVAFGTMERVVNVETKERIIRTAYFLKRRRLQSKPRLDEKPLLAKYRGRERRRVEAIYHRIANQIIDEANEAKASTIVLEDLTNVRKRIKRSRELNGRLNRWSFRKFQRVVEYKAKLAGLNVVYVDAKGTSSLCPVCGGRLSPNGHRRLKCRCGFEEDRDVVAVKNLLRRYQMDVGASPVHPEGPPMTTERDEKCEEGRDESLF

SEQ ID NO: 34261 - protein, 320 aa, Thaumarchaeota sp.
LEGQGSKERKLILVVRQDRYIVDERNHRLVLRDFGLEINFAGRLRWHGKQGRLEIRHDEAREAWYASMPVEVGVETTRNGNRSKHVVRGERKSIRMAGPRGDVAAGVDLGINMLASAVTSDGTWLLYRGSRAKEDFFHLTRRIAEVQSEADEARKGGDEAKFQRLNRRRRRLFRKLVGRMAHLYWNLANHMVRGLWELGVSRIYLGYPHDIARERGNKLTVNMWRYRELMDAIELKAQEYGIRVYEVVEYSTSNHCAVHGTKVARGPRGVVTCPLGHRLHSDLNGALNILRRGAGAIPATLGRPLSFLVDHCGVAPVKGA

SEQ ID NO: 34262 - protein, 203 aa, unknown
  TnpB Polypeptide
LRKSNKAVGIDVGLENFATFSTKEKIANPRFFKTDEKALAKAQRKLSKQSKGIPERQKVKKVVALIHERISNKRHNFIHQEARKIVNRFGVICIEKLSIRGMMRNHFLAKSIVDAAWNQFAQALASKAEEAGRKFIAIDPRDTSQICSQCGTVVKKKLSTRWHRCPVCGIRLHRDINASRNILALGLQSLGLVPRSSFRQGGE

SEQ ID NO: 34263 - protein, 284 aa, Bacillus sp.
  misc_feature (232)..(262): Xaa can be any naturally occurring amino acid
MGVKRMMINKAYKFRIYPNKAQATLINKTIGCSRFVFNHFLSLWDNAYKETGKGLTYGTCSAKLPVMKKEFVWLKEVDSIAIQSSVRNLADAYTRFFKKQNSAPRFKSKKNNVQSYTTKQTNENIAVVGNKMKLPKLGLVRFAKSREVIGRILNATVRRNPSGRYFVSLLIETEVQELPKTNSYIGMDVGLKDFAILSDGTTYKNPKFFRSLEEKLAKAQRVLSRRIKGSSXXXXXXXXXXXXXXXXXXXXXXXXXXXXXXXNHQKPRCYRYRGFASIEYVKES

SEQ ID NO: 34264 - protein, 448 aa, Halorubrum sp.
VADDHVRRTAITRLSVDDEQRELLEETISEWKRGCQLATDMAWGKCNAKSDVQPLAYDDVREETNLGSQHAILATHQAAQAITGCLERRSNGKQASKPTFTAPTVTYDTRTMTLFNDDTVSLSTTESRVRCELALPEAEDGYQRQYLDADHWSVTESTLTARDGDYFLHIGFRRPKTDTEQDIAEDGTVLGVDLGIENLAVTSTARFINGRELSHNLREFEKVRTGLQQTGTRSAHRTLEQSSGRERRYVRDVVHQASNAGTRSAHRTLEQSSGRERRYVRDVVHQASNAIVDEALRYECDVIAFEDLTDIRERTGASWGHKWAFRTLYEQVKYKAEAVGISVKQVGSAYTSQRCAECGFTADENRRTRTEFRCVKCESEANADYNAAKNIGMRYVRRGQQSSRRTGDSQLALKSGTVTPSGGFTAHPDGFEAEFTDKPLPQRANPSG

SEQ ID NO: 34265 - protein, 419 aa, Natronolimnobius sp.
MTHGSVPVVVTTTATKTLEATLAPPTTGKEQRLERTVATYCRALSDAFESGADTQNAVNDVVTPYTLTSYAKDALKNYVPQLRDTYNASELDDDHPVRFTNRGFRIDHSDEREHEFCWRVPQAGRGNAFWIPLRINPEQESLWFDLLDESITVGEFRLQQHRTSWVLHVTVEYEVTEPETPDNPTRIGFDIGESKLLTGCAYQNNTPTQPYIYDGGRARALRKEMHTTLKRLQERNAEQWRVDERFDHYQNALTDIVEKASREAVEYAESFEDPVIVLEDLSYIRENLDYGKYMNRRLHSWAFARLTDRIEDKALEAGIPVEFVNPRYTSQTCHACGHIGSRGSQSEFKCTNVECWVSEYQADINAAANIANRFDPWGESVPWKLERDDSPRDGSTLDSATAHRESSARPAQTTLTEWG

SEQ ID NO: 34266 - protein, 469 aa, Natronolimnobius sp.
MSVVVKRTNTFAVRPLTDDDEQVLRDLLDASAALWNEINYQRLMRYNDEDGFDGDVWEADTGALEGKYKGVLGASTAQTVRRANTEAWRSFFRLKKKFHDESNNSVTEHPELPGFRGNEDDGRVLKGVVRKDAYTVEWGDRSRLEMVVGKELRDKHSSPKSRLRLEVVGDPNWPDYEDQGRLELWYDETDCTFRASQPVTVSEETRDAPLADHKAALDIGANNLVACTTTTGEQYLYEGRELFQRFRETTREISRLQSKLREGRYSSERIRRLYRKRTRRRDHAQEALCRDLLERLHAEGVDTVYIGGLTDVLKTHWSVETNAKTHNFWAFKQFTERLVCTAEEYGISVEVRSEAWTSQECPQCGGTDQTIRHQDTLTCPCGFEGHADLTASETFLRRHQNSESSDWRTRHDVSRQRQTEKAVRPMARPVRFEWDSHEWLESPRSHRPKGQRTDPSTVHCDRNVASGKS

SEQ ID NO: 34267 - protein, 439 aa, Natronolimnobius sp.
MLEVHRTHRAKILNLGQVEDSLDRHGWSASKLWNVTNYHSRQEWEETGEIPDHGDLKNELKTHPKYKGLHSQSSQKVLEELSEAFNSWYETRRSDDRANPPGYRKKNYYDNQGRRVHEEHPRSTVTWKQNGIKHDAKNNRVRLSKGANHKEHPKAWEYILVEYETRPGVTVENLQQVRAVYDKAKGRWELHLVCKDEIETPNAPGTETAGIDLGINNFATVAYSTEEAELYPGNRLKQDGYYFPKEIAKCDDSGGGKATRLHAKWSERRTHFFHSLAKHIVERCVEKGVGRINVGDLEGVREDEAGKSKNWGRHGNLDLHGWAFDRFTSILTYKAKVKGIAVGEVSERNTSKTCCVCGRKDDSQRVERGLYVCEDCDAAFNADVNGAENIRLELNQSNSESSASLGEDRSTGWLAQPGVYLYDLSSGFQPQAQVVDCKP

SEQ ID NO: 34268 - protein, 337 aa, unknown
  TnpB Polypeptide
MRKLIKRARKCIRFPQLNRIKTLKLDEKVAVLEVSKKASHFDYFLKLSTLQKRKPIYLPLKRNPYLDECLKKGERLPFVQVRLTDKTCTISAIVGYDKAPLRSSTESIGLDFGMVAMFTTSDGERHGLSSFTKLKIWDEELLTLTKELQKQSIKLSTNARYVQLQQRIKSYFKNEICRILNKLAKKNVGIFVVEKLDFRAAGLSKQMNRLIGRTYRSVVKAKLSRLTEQYGIQIIAVNPAYTSQECSRCHYVSKDNRKTQKNFVCQHCHYSCNADVNAGRVINQRRSLMLEFPVYKKSSTSYTVRCQVQEASEVCHRRYCHDNGIMTYEEALAKGSL

SEQ ID NO: 34269 - protein, 412 aa, unknown
  TnpB Polypeptide
MTNDTMLLVEKQIVRPSNPLYKELDHLCFLSKNLYNSTLYTVRQHYFNTSEYLTAFTVIKDFTKENQVDFRALPAVVARYTVQLVDQNMRAFFALIKKKKAGKYTEPVRLPKYLDKTNGRQVVHYHKLALSLKKDGFVKLAKSNIEFKTKVPKNEIQYLKLVPCGNHIKVLIAYSKTKKKTDITPKRIASIDIGQNNLMTITSNVFHPIIYNGKPVKSVNQFYNKIKAKEQSRLKKQNNVNWNKKLGRLSLWRENQIRNYFHKITHHFVNYCIANNIDTVIIGRNQYWKDGINLGKKTNQNFTSIPFGQLYDLLKYKLELKGITYIETEESHTSKCSFVDREEICHHDSYVGRRVKRGLFISKEGYKYNADINGSLNILRKYLTNENAYSNELHKELVAHMTNPRKLKVTNK

SEQ ID NO: 34270 - protein, 539 aa, unknown
  TnpB Polypeptide
MVKSSKWIATIPTPSLANIGKIDIANKLLAPYHDLMVHFLADIDLRFVRDNEYLSFTDAKPYQTKEDYLQLLESCKKRYAKQLEKGQTPKQSLEEQLKTIETRAIQTPLSARYVQTCYKQTLEIHSSWLTKLEDKVRSSLGHSSIIDEFFLATCYRINKLHLWHHLSVELNWHQTEEGQLLVPSKKYKANITLPVSSDILFLMRKLIKRARKWIRFPQLKRVKTLKLDEKVAVLEVSKNASHFDYFLKLSTLQKRKPIYLPLKRNPYLDECLKKGERLPFVQVRLTDKTCTISAIVGYDKVPLRSPTESIGLDFGMVSMFTTSDGERHGLSSFTKLKIWDEELLALTKELQRQSIKLSTNARYVHLQRRIKSYFKNEISRILNKLAKKNVGIFVVEKLDFRAAGLSKRMNRLIGRTYRSVVKAKLARLEEQYGIQIIAVNPAYTSQECSRCHHVSKNNRKTQKDFVCQHCHYSCNADVNAGRVINQRRSLMLEFPVYKKSSTSYTVRCQVQEASEACHRRYCHDNGLMTYQETLAKSSL

SEQ ID NO: 34271 - protein, 449 aa, unknown
  TnpB Polypeptide
MQKHKFTVVTQLHEKNNQDIVAYIESSRHTYAKAVRETFYAIKRNELDKTKYNTYLQHKYNIVKRTAGSIISDAQGRFNSLKELKQYEAKQLEHKISYLETQLIPKLVEKRNNNSAMLRDGLSISFVKQRNLRLKIVAKKNKLNRLKQKLVNLNYQLESGRLKLCFGTKRLLKQNYNKFVEQRDSQMGFIGAKEETCCNHNFQLRYNRKDNQFLIKLRRDFGGYKSVNIKDKFTYGKVYFNHHKNRIISILKNKNSPLSYKIIKKNDRYYLCCTFEIQADTDNFKTCSDYGTIGLDFNKGFVTLSETNQYGHLIRTEFLPYRFKSGNKTKADLQKIANHVTALASQTGKNVCIENLDFKTKRSKIETTETRQGKQYNDMIHSLAYRQFIDIIESATYRNKVTLTKVNPAWTSWLAKKLFCPTMKLNVHIGASYVIARRGQGYKDTVKSL

SEQ ID NO: 34272 - protein, 203 aa, Lactobacillus sp.
ITSDGQKEDILKVDDGLNKQLRIWERKKSRRYENAKKAMAFDEHDKVLFPRTDLKQFPRYQQAVRTVAKLKKHIAERRRDNLHKLTTRLVKDYDTIVVENLSVKNMMKNHHLSASIANASWGTLISQLKYKCAWYGKKLIIIDPKNTSRICHECKQKNHEFDSLSQSEWLATREWDCPNCHAHLDRDVNAAKNILAKGLETLA

SEQ ID NO: 34273 - protein, 363 aa, unknown
  TnpB Polypeptide
MRKAYRYRLYPTNSQATLLEQTLEICRWVYNDTLALRKDAWEQDQRSIPLYETNKILTQWKRERPDLKQVYSQVLQNAQMRVDLAFKAFFRRVKSGENPGYPRFKGKGRYDSFTYPQYGFNLDGDCLHLAKIGDLRVVLHRPIEGSMKTLTIRRSATRKWYACFSVEYDPSPAPRKETTVGVDVGLESFATLSNGEKIENPRFFRTDEKALARAQRRLSTAEKGTPERKKARTIVAHVHERIANRRLNFAHQISRQLVDRFGTIVFEDLNITNMRKNHGLAKSIADAAWNQFVTITASKAEDAGSRMILVNPRNTSQMCSRCGMIVAKTLSDRIHSCPHCGLVMDRDQNAAINIMRLGLQSLG

SEQ ID NO: 34274 - protein, 362 aa, unknown
  TnpB Polypeptide
MNKAYKFRIYPNRDQRLLFEKTFGCVRFIYNKMLADKIEYYKETKQRLNNTPAQYKKEFEWLKEVDSLALANAQMNLQSAYNNFFRDPKVGFPKFKSKKKSKNTYTTNNQKGTISLLHSKIKLPKVGYVTIKQHRQIPDDYKIKSATISKTASGKYYVSILTEYYYEVPERILSKDNALGLDYASHSFYVDSQGREANYPKFYRQSQDKLAKEQRKLSNMKYGSNNYQKQKVKVATIHEHIANQRKDWLHKLSHILSQEYDYICVEDINMKNMSQSLRLGKSTLDNGFGMFRTFLQYKLEERGKRLIKIDKWFPSSKMCRFCGTVNSSLTLADRIWTCDCGKTLNRDENAAINILNVGLSTV

SEQ ID NO: 34275 - protein, 377 aa, unknown
  TnpB Polypeptide
MTTLKAFKYRIYPTKQQAVLLNKTFGCVRVVWNHNVEVFNKFDKNLTEQEQSLTSTQLKQKFVWMSEVSAAALQQKEMDFKTFKKNYFSTSRKKKIGRPAFKNRDSNQSYRLPNQKFTLRENTIQLEKIGKVKLVLDRAVPVGCKFMSVTVSKNKCGQFLASVLVECEIIAKPKTGKFIGLDIGIKTFLTGNDGFIVENPQFFRESQAELKQAQRHLSRKKKGSSRRKKAKLKVARIHNKIANRRKHFIQEKTTEIINLYDFIGIEDLNVAGMVQNHKLAKSISDAAFTEFYSTLIYKAAWYGKEVVKVDRWFASSKTCSCCGWKNENLTLSDRVFECLACGLKKDRDLNASENILKEALRVSSAIRTQSECQTEIA

SEQ ID NO: 34276 - protein, 383 aa, unknown
  TnpB Polypeptide
MPLSFTRTLRLKVRRESYAWLNAAAVEVNEIFNYCNETSLKAATRTDLKRKWMSGFDLCNLTAGSSQYFDKIGADTIPSICTHYAQKRQAAHRVKLRWRVSRGTRRSLGWVPFKAASLKHKGVCLRFAGKCFRVFERERLEGVKWQGGCFAQDAIGDWWLCLPVKVAAEETVAPEQAVGIDLGLKDIAATSDGGRLRAGHWTQEYAQKLAAAQRCGHKRQAKRIHRKVARCRTDALHKFTREIVDRYQKIVVGDVSSLKLVRTRMAKSVLDSGWGMLKRFLEYKSQQAARTFEVVNERNTSITCSTCGALSGPRGANGLIVRSWVCRDCGELHDRDVNAARNILIGSRYRTSMRGNESSPWLIPPSNAYCVREAGMESAWAAE

SEQ ID NO: 34277 - protein, 383 aa, unknown; identical to SEQ ID NO: 34276
  TnpB Polypeptide

SEQ ID NO: 34278 - protein, 374 aa, Candidate divison MSBL1 archaeon
MMKVRKTVKCKIVNLTERKKKALEKEYENLQKYLKEEDEDVELYSANEQQADRYYEEINKGKEYPISVRKDLIDIREAENKVAKYWLRVRVASVYGGINVPIKPHIPIPHSGGGVEYCESKILKKDGEFYFHLTVKKTVQAKKSYSGFLAIDVGQKYLAVSVASHRDRPKFQGREIRGIRRHYNWLRKRLGRKKLEREVERLSDKESRKVDQKLHEIAKEIVEEADENDELIVVGSLKGLRENSNDKGKRMNRIISNFPFYKFVKYLEYRANEKGIQVMKMNEHYTSRECSRCGAKGERPNQGTFKCSCCGYEINADFNGAKNIFERTKVALGNIPSVGAVSEPAQNSSDMVSTSGPTSGETEKRSLLLTNEAS

SEQ ID NO: 34279 - protein, 183 aa, Clostridium sp.
MYDYIDVSEREMADFHSSKSGFPKFKSKHRHQDSYTTNNQRGSIRMEEGRIKLPKIGFVKLKQHRPVPKDYAIKSATVSKTPTGKYFISVLFEYEEVIQPVTAENVVGLDFSMKELFVSSDGVTAAYPRYYRQSMEQLQKEQRRLSKCRIGSKNRNKQRIRVARLHEKVSHQRKDFYISCQDR

SEQ ID NO: 34280 - protein, 459 aa, Mycobacterium sp.
MARLKVPEGWCVQAFRFTLNPTQTQAASLARHFGARRKAFNWTVTALKADIKAWRADGTESAKPSLRVLRKRWNTVKDQVCVNAQTGQVWWPECSKEAYADGIAGAVDAYWNWQSCRAGKRAGKTVGVPRFKKKGRDADRVCFTTGAMRVEPDRRHLTLPVIGTIRTYENTRRVERLIAKGRARVLAITVRRNGTRLDASVRVLVQRPQQRRVALPDSRVGVDVGVRRLATVADAEGTVLEQVPNPRPLDAALRGLRRVSRARSRCTKGSRRYCERTTELSRLHRRVNDGRTHHLHVLTTRLAKTHGRIVVEGLDAAGMLRQKGLPGARARRRALSDAALATPRRHLSYKTGWYGSSLVVADRWFPSSKTCHACRHVQDIGWDEKWQCDGCSITHQRDDNAAINLARYEEPPSVVGPVGAAVKRGADRKTGPGPAGGREARKATGHPAGEQPRDGVQVK

SEQ ID NO: 34281 - protein, 409 aa, Burkholderia sp.
MERRKVTFKLYPNAREAERLTGWIRLHCELYNAALEERIDAYRKHCKSISYYDQQNVLPEIKAARPEFVELDSHALQQTLRRLDLAFQAFFRRVKAGQTPGFPRFKASKRFSGFCYPDPAGWKLMQHGGRGATLRIGSGKHATSIRARGQHRFGEGARAHDLTITRKNGGWFASVTLRVSESACARARTGDAHRGVDFGLNDWATFDDGETVANPRFVRNEVPRMADLQRQQARKKRGSIRYRRLGAQVAKLHERIGNLRREFLHKETTRMVKACAVLATEELRTQNMSRSAKGTQQKPGRMVKQKAGLNREILSAGLSMAHQMLAYKVVETGTRLHVANTRQLKPSQRCAACWEIAPKTLAQRTHVCPHCGHTAQRDRNAASVVLIDAHTPGTGVAARPEPLSRQRAR

SEQ ID NO: 34282 - protein, 407 aa, Halosimplex sp.
MNYNYRYRLRPSDSLKDQLAWTVDTCRQVYNHFLHRLNRNDDTSAYSEQKLLPSLKKWWSDLKSVHSKVLQKAVQRLYDNLATLRGRKENGYCVGTLNWKAPGEYRSFTYSQSGFKLKNTSGRTKLWLSKLGEIPLTFHRDLPDDADIKTVTVKQEPTGKWYAILGVETPKDPPAKPENPEKSVGIDVGICKYAHDTDGTAVESPDLLDERERLERAQRNLSRKEHGSANWEKQRRIVAERHADLKRKRRDLLHKLSNYYATEYDLVAVEDLDAKGLVELPGNSRNRAGAAWGTFLQMLEYKCEREGTYFVAVDPSGTTTECASCGVSTDKPLWVRDHSCPACGFEADRDANAAWNIRSRGIKQLGVGRSELTPVETALPVDTDSVSAKRVVEAGSPTLKRESSGER

SEQ ID NO: 34283 - protein, 372 aa, Oscillochloris sp.
MIRAHTIRLNPTPEQENLFRQAAGTARFCYNWGLRAIKDALDQGVAVPMQRSLRDAFKQIRAVAYPWTFQVGKSAIDGAFVNLGRAVKNFFDSRSGRPKGKKVGFPAFKSRRRGYGSFYVANDRLTLNGHTLTVQKVGSLNMTEPLRFVGKILSATIRYQAGWWWISIQVELDHTPPANPGPAIGVDLGIKSLAVTSEGEVFENQKHLKRALRTVKRLQRSVSRKVKGSANRRKAVLKLAKAHVRVACQRKDVLHKLTTALVRQASLVGIEDLNVAGMLKNHRLAQAIADGAWAELRRQLEYKAPAFGSRVVVIGRFVASSKTCNQCGHVNEDLTLAIREWDCANPNCGVHLDRDLNAARNIRDEAVGLAGA

SEQ ID NO: 34284 - protein, 412 aa, Dictyobacter sp.
MQVVERHLIRTDNPCFSALDQAAFASKNLYNQANYQIRQAFIHEGIYLPYAAIFHRLKQHDAYCALPRKVSNSILLQLHKNWLSFFEAMKAYRQDPTPFTGRPKLPGYKDKEKGRFLLIYDKQALGKRAFKKTGKLVPSGLPIAIATRITDWEKIAQVRIVPRLDGYMAEVVYEQQEQQADVDHHLVAALDLGVNILAALTSNKSGFAPRLISGKPLKSVNQYYNKQRAQHQGRLSHENRFSSRQLDRVTTKRNRRVDSYLHTASRRIIDLLVSERIGTLVIGKNPRWKQEANMGRKNNQQFVYIPHARFIDQLTYKARLVGIKIIIQEESYTSKASFLDGDPIPTYQASTSEKPVFSGQRIARSWYRAKDGTILHADINGSWNILRKSSSDPLQVGRGVEGAAVLPRRLAV

SEQ ID NO: 34285 - protein, 498 aa, Lentzea sp.
MNAGRAPVPSGGSELFGGFDHVWSNVFVCGLGYPFAAMGTCVRYGHRVSSVIQAYRFALDPNSGQEQALRSHCGGQRRAFNWGLARIKANLDQRAAEKTYGVAEDEPTTPVSWSAYSLRKDWNQAKDTVAPWWAENSKEAYSSGLANLATALGNWADSKRGERKGHRFGFPRFKGKRSGLSCRFTTGAFGLADDRRHVKLPRIGTIRTHESTRKLARHVERGTARIRSATVSLRAGRWFVSFSVEITRADPAPARLDSVVGIDLGVKSLAVLSTGETVPNPRHLETALRELRRLQRQAARRVAPDRRTRQQPSGRWRKTQARITRLHAAVANARRDGLHKLTTRLARTHGAMVIEDLNVSGMTRNRRLARHVAGAGMAELRRQIEYKARWAGARLHVADRWYPSSKTCSACGVAKAKLRLSERTFRCDACGLVLDRDLNAARNLAALVHRETSSPSCGATQNEPAGNPLKTRTARATGTATGRPAPAGQRRRRKATAV

SEQ ID NO: 34286 - protein, 410 aa, Haloferax sp.
MTTEQALVKTLDFQLNIQSNNESLLYDATLEARSVYNETIRLAKEGVDWNAIPDRVADDADLVKNTTQRVVAKALGAMENYYEYDDFGQPSHTKDGAYPLRANYEEGYNLSITDDGDVAFRISAKPYNHVKGILKGSDAHLDILKTALTGDEWKVSTSETLWCDGEPELHVNIRNTEQTVRDKQDSRTVVGVDVNEDNVALTALSKDGVEDTLVIDFPEIKFERHRYFTMRKRVQNAGKDSIHDTLEGREERFVRDRLHKVSRHIVEWSQQFEKPCIVFEDLKEIRDSIDYGTRMNRRLHHLPFRALQYYTSYKASFEGIPTGWIDPYKTSQRCPLCGHAERANRNKKRFKCRSCSHQDHSDRGASVNIAVKGIEKHQNWNVPALNSLPQVRKVRRSQERSSCAARKVTR

SEQ ID NO: 34287 - protein, 466 aa, Ignisphaera sp.
VGCFLQASLALAAKDEEDALIVTRTVIVRSERIPKKLFRVFVELEGMYRNVVEQLVIHSAREGITSFIKLKALKYRETRNLYPHLPSHYVHTACQDASTRVKSFIKLKKEGSTKKEYPSVRRISIWLDDHLWRLDDLTRISISTHKGLIHVDLIPHKQFYRYINSGWRLASEARIKLDKKERRLIVYLIFRKDVKQYKPNGYVAVDVNENNVAALINRKAYLLETNIERITLGYYYRRKRVQKKYDKICNVKCRAKKKILRRLREEERKEDTRWKVANVIVREALKQGYSIVLEDLGDNPAENMISRIKDEQLRHRIFMAAFKGIQKAIEEKAKEHGVPVIYVNPRNTSKQCPIHRSEIRYNGSRIGVCSLGKERWHRDVVACYNLLLKALGGDGSSAPSRPGHIIDGSHVPFGSTAAHDLTGIPRSLWARLKSLDMTMNKVIGMNIQGQTVTSITDHWIERSSPV

SEQ ID NO: 34288 - protein, 476 aa, Streptomyces sp.
VKVTRIAYSKNLNTCKYDQLAEQAERLGRVRSLVWRRYGSLAGVGVSDRTIRDEWMRDGTADAFGVLANAWKETVRDAVADIKASREAVKVKVRQAVRQRTSDKVEQKRLFTALQRDQWATDPYLSRVMRQHWGRGRNHIANQIIVRSDQYRTYAPDEGGVLWLAVPGLERRSMVKIPLNTKVAPTGTLRLILRDNRVEVHYAVDASTLRSSQRPCGTAKIGVDKGYSEVLTDSEGTHHGTELGDLLKADSDFLTIKNGRRAKIRSIAEKAAKDGDYAKADRITTNNLGTTKRNRRHHTIEARVRSVTFTAVHQVVNAAKSVVAEDLTRSFTSLKKLGKNTNRRLAAWTKGVTAEALNSVSERRGSALTLVNAAYTSQVAPCCRILGTRKGDRLHCTWCGAVWQADHAAAINVLERDGDPDITLYTPHTRVKQIIQERADRRRTRLPVQDSSLAGRRANHPIRAVLLKEQEAENQP

SEQ ID NO: 34289 - protein, 370 aa, unknown
  TnpB Polypeptide
MLKAYKYRLYPNKQQIEQIQKTFGCCRFVYNQCLNFKINKYKNENVSVSKIDLNNYCNRELKKEYEWLKEVDKWSLTNSIYNLDYAYQRFFKEHTGYPKFKSKRDNKKSYKTNFSNNNIEISFKNNKIKLPKLKWVKAKIHREFDGQIKSATISQVSSEKYFVSVLVDTEHIPMCSTGCMVGIDLGIKDLLITSNGKKFDNIRIVKKYEDKLAKEQRKLSHKIKGSKNWEKQRIKVSRIHEKIHNTRVDNLHKISHKLVSENQVIFSEDLSVRNMVKNRNFAKAILDCGWYELTRQISYKSDWNNRQYIKIGRFTKSSQPCNVCGYINTDTKNLFVREWTCPQCGTKHDRDINAAINILNEGLKLLEEKV

SEQ ID NO: 34290 - protein, 346 aa, unknown
  TnpB Polypeptide
MVRTGEEGRATIVGKIEFQNETDKALLLYTMRLFKDAVEFAHNLFRKDLPKNEIVKLLTSRILHNKWYSVSAYIRAKLYENQSYLKLKKPQLYSAGSSDENGNRNIKFVRTDLVKIKIPSADGKHRWIECKVKFGRKHIPIIEELLRGGQTYGAGVSLSDDGKYVLYVNVPRKLYVERMKKKIKTNAKARLFAGFDFNPDRINMVIVDKKGQIREARNEHFHEVTSHGFPREKAKAIRREALARLVKYAKEHGVKYFVVERLEKPKTKTKSKSANRKITKFAVREYLEQMRILVEKVGGKIIEVDPAYTSIDAIPLAKKLGIDRHTASAYLIALRGLMLLKNHKNT

SEQ ID NO: 34291 - protein, 228 aa, Methanobrevibacter sp.
LSENELRVTKLGKITVKHKRHIKGEIKEVTLKYENGRWYVCIVYELDENRQGEFSYGGLYVGIDVGITDFLTFSNGKVIAKPDLKKINGRIQYYQQKIDGKKEGGSNWKKTLKKLHKWIRKKNNVVNDYYHKISYNIVKQCQFIAMETLNIQGMLKSNLSRSIHEIGWGKLIEMIKYKAELYDREFVQIDRWFPSSKKCHICGKINHDLGREEREHWFNGAMLSRFHA

SEQ ID NO: 34292 - protein, 494 aa, unknown
  TnpB Polypeptide
MSVGRRFSARFQDDASRLAYLTWSAGQMFIYNECVREQRYFDSLSRLIAETRRRKQPIRSECRVERPEPDQKYSRFVDKKAMPWLDEVPSAILGIGAYRFFQASQRAKRGLTRRAKVHPIKDSDRKLLLTRQYFTIEPTSRDDRFKLRFGSAKKPGGVIIFHAHRDFRMPAMVSVTLTARSLTVSFAFEEPAEEGKFPETEAEIAARLSQYSKAELEAHAVGLDRGVVRPVQSSHQSEPYGFTDAQLERMKRQARRRKRCQRMAARRQKGSRNLAKARRRIARTYDYQRNVIEDFAHQTSARLVSLKEIWVYVLEALKIKNMTKRPKAKYDEAGKPLRNGASAKAGLNAAVLRSGWGKTGRYLRYKAIKAGKLVLEADPKNTSRCCPLCGTVDAKSRPSQAVFRCVRCGFEGNADVVAARNIRDRGIEMLLAGKFEPKKTMKLLRTKKARPSDAARLGPGRADEMPAEPVRRAGCHPVPIRLARKQEASSFTAR

SEQ ID NO: 34293 - protein, 372 aa, unknown
  TnpB Polypeptide
MPNHKAYRFRIYPNREQEVLIAKTIGSTRFVYNHFLAKWNDRYKETGKGLSYNACSAELPQLKREYEWLKEVDSTALQQGLKHLADGLNRFFKKQNKYPRFKSKKNDVQSFKTVGKMRIGGNRLFLPKLGYVKFAKSRDVEGRILSATIRRTPTGKHFIAILAETEIKSFDQTGSAVGIDLGIDHFAILSDGQKIDNERFTKKMEQKLKREQRKLSRRYEQAKKDGKPLHEAKNYQKQKVEVAKIHEKIANQRTDFLQKLSTTIIKNHDVVCIEDLNAKGMLKNKKLSKAISDVSWSAFKAMLLYKAEWHDRTIIKIDRWFPSSQLCSSCGHHDGKKDLSVRSWTCSSCGTHHNRDINASRNILQEGLRVLS

SEQ ID NO: 34294 - protein, 225 aa, unknown
  TnpB Polypeptide
LVHKYGKWFLHISVSKDIQEANLANINQVVGIDMGVNFTATTYDSNGQTRFFNDKQIKHQRAKYKQMLKELQQKQTPSARRKLKKIGQRENRWMQDINHCISKALVEQYGKDTLFVMEDLTGVRNATEKVRVKDRYQTVSWSFYDLRQKIAYKAQKTGALGIAVDPGYTSQTCPKCGHTEKANRNKKTHTFCCQTCQYTSNDDRIGAMNLQRKGIAYIVEETART

SEQ ID NO: 34295 - protein, 338 aa, unknown
  TnpB Polypeptide
MPNHKAYRFRIYPNREQEILIAKTIGSTRFVYNHFLAKWNDRYKETGKGLSYNSCSAELPQLKREYEWLKEVDSTALQQGLKHLADGFNRFFKKQNKYPRFKSKKNDVQSFKTVGKMRIEGNRLFLPKLGYVKFAKSRDVEGRILSATIRRTPTGKHFIAILAETEIKSFDQTGSAVGIDLGIDHFAILSDGQKIDNERFTKKMEQKLKREQRKLSRRYEQAKKDGKPLHEAKNYQKQKVKVAKIHEKIANQRTDFLQKLSTTIIKNHDVVCIENLNAKGMLKNKKLSKAISDVSWSAFKAMLLYKAECMIARSSKLTDGFHPVSFARPAGIMTARRI

SEQ ID NO: 34296 - protein, 372 aa, unknown
  TnpB Polypeptide
MKLTLTAKTKIVPTVEQEDTLRKTAHAYRDACNAVSEVVFDENTLVQAKLHKRTYRELRSTFGLKSQMAQSALKTVIATYKTNQSNGHERSQVQFKKPQFDLVFNRDYSLTKGLFSVNTLEGRIKVPFYTEGLEPYFDGTWTFGTAKLVHKYGKWFLHIPVSKDVQEANLDNINQVVGIDMGVNFTATTYDSNGQTRFFNGKQIKHKRAKYKQMRKELQQKQTPSARRKLKKIGQRENRWMQNINYCISKALVEQYGKDTLFVMEDLTGVRNATEKVRVKDRYQTVSWSFNDLRQKIAYKAQKTGALGIAVDPGYTSQTCPKCGHTEKANRNKKTHTFCCQTCQYTSNDDRIGAMNLQRKGIAYIVEETART

SEQ ID NO: 34297 - protein, 282 aa, unknown
  TnpB Polypeptide
LIKKRISLPIVFGEKQKQRIEEALKNEWKFATVEMVKRNKEWYAHFTLKKTISFINKPETIVAIDIGEHNLATATKILINNPNKPIKGKFWKGAEIKKIRGLYSHIRRNLMRKRLLKEVKRLGGKERRKINQLLHIIANQIIDYAKQSSNPAIVMEDITHIREKFNKSRKLNKRFHSLPFRKLQKYIKYKALLNGIQVYYLQKNLVKNSSKTCRRWGHVAQVKGREINCPNCGLRYNRDLNACINIAHRLMRFMGWGSCEPPEPANEEIGANPTLNAGSFAL

SEQ ID NO: 34298 - protein, 371 aa, Tolypothrix sp.
MRVLEFKASCKTTQYSAIDEAIRTSQFVRNKCIRYWMDNQGVGQKELYRHNTALRAEFPFVNALNSHACQASVERAYSSIARFYDNCRKSVPGKKGYPRFKKNCRSVEYKTSGWVLSENRKQVTFTDNKGIGKLKLKGTWDLNFYQIDQIKRVRLVKKADGYYVQFLIRTENNVDAKPTGKTIGLDVGLKEFYTDSNGHTEPNPKFYRTGEKAIKFRQKRVSRQKRGSANRKKAINRLGRVHLKISRRREEHAKRVARCVIQSNDLVAYEDLRIRNLVKNHCLAKSINDAGWYQFRKWLEYFGVKFGRVTVAVNPAHTSQDCSNCGKCVKKTLSTRTHVCACGCVLDRDHNAALNILNLALSTTGHVGTWI

SEQ ID NO: 34299 - protein, 369 aa, unknown
  TnpB Polypeptide
MKAHRTLLIKLPRDKCDIDYIKRLIALTNLAYRDFEVLVPDMFKSIQYQLYGSFSNYKNSLVFGTAPKRWLAKTWVPLKTLRIYSDDSMKGSIGAPVALDFRSNVIRLRQVCKNEPRYSIELPMPSWVIDRVKEGGDVKFARIGLKDGEPYLALTVEREVEPYQPSEYKLVVDVNSWRYGIACGLAKNGKLITWRTEKPDTFLINTLYYQAIDRERKTGKLKSLGYGNSAKVDKIKNQAQARRSRIYRITRDKAYFLASKLVKKALKYRASLVIDDMSEESRKELLEERLPPDVVKLLMSNLKRLVHQLETLAQWYGVPYEFRRLYSRKCPRCGHELTQEKGRVMVCENCGFKAPRDLVPIYWAVRLTP

SEQ ID NO: 34300 - protein, 433 aa, Micromonospora sp.
VDRLATKQTEDRPETSCPGWRQPGGMISPTFSGQEPVLPAESGRGRPPRWTNGRSSAGSGGGSGPGRRGSRRRNAATPVTGRRGFRVGGAGWCRCTGITAPSGSTGWRVRIPAGKGRPSLLGAVGAGVAVSGEAGPLDHSAVRGRPSVPRRDRRSPDRHLPAGRGAGSGRVASMDLGIIHPFAVPGLDGEGLLVSGRAIRAEHRTHLADTKARRRAVARRAPRPGVKGSRRWRTFRRRARLVERRHRRRTRQARHEAATALVSWAQQRQVGVLHVGDPRGVLDLPAGRRHNLRLRQWQIGRLLQVLTDKAALAGITVRLVDERGTSSTCPTCHRRVPKPRGRALSCPHCAISGHRDLVAAATIATRTAVVLPEVVTHRRAGRHLLGAGRSRRGPRRPPRTARGSVGPRRPAPTTRRGVAHPNGEDPPHPSATR

SEQ ID NO: 34301 - protein, 312 aa, unknown
  TnpB Polypeptide
MAVVKLNRAIQYRAYPTGAQAVLLAKTFGCVRFTWNHMLMDAQQFLNEAGTFFVPTPAKYKKEFPFLKEVDSGALCNTQLDLKAANKRHLEDKKVGTPQLKSKHKSKMSYTTNIHSYKTKDGSVVHTLVLGHEAIKLPKIGWVKIKKHRQPGTGWVLKGATISCTRSGKYFISLLYEFEKDIQPVTVTKEKSLGLDYSSHDFYVDSNGKVANYPQFYRQSEEKLAKEQRKLSRMKVGSKNYDEQLHKVQLLHEHIANQRKNFCHTVSAAIAKQYDAVFVEDINLRGLAGSLKLGKSRYKGNREPLLPESLPS

SEQ ID NO: 34302 - protein, 396 aa, unknown
  TnpB Polypeptide
MIRTSKHNISNITNQVSLDFLDDTFDVYKKDLITCIDYIIDGVYPLKKRMSSKDLITENIKHSKYKRDIYIKASEIIRSQIKKSENKRYNKYKYIYSYMIKNHPDSSFAKTKFKDLNLKDIINTKYFTKPTISNISINLTNEFFNIETGYHFDNFVKIILPFFNDKGTRGLQIKVPLNYHRYSNKLKSKGFNLRNNIQIKKVNGDYYINLIWEKSVNIINNGTKTLGIDLGYKKLITTSEGNIIGDDMFNLYDNISKKKQGSKNFKQLLTHRDNLINFHVNNMDLTNVKTLIIEDLNNVKHKSKGKVYKKFTNKLQRWSYVKTISKFERICMEKGIELVKVSPAYTSQTCSSCGNIDKSSRKGEEYLCVSCGYEIDADINASVNIHDRGVYSLSNK

SEQ ID NO: 34303 - protein, 365 aa, Microcystis sp.
MLVVEAKLKNGTPEQYHRLDEAIRTSQFVRNSCVRYWIENKGTTRNDLQKLCAVLANNKETPWVDKLNSQARQSAADRAWQSITRFYQNCHAKILGKKGFPRFKKHSRSVEYKLTGYKLSDNRRKIRFTDVFKAGEFDLWCSQKTLVYYSEQQIKRVRVVRRADGYYCQFLIDVERQEYHKPTVQITGIDLGLKEFYTDAQGNTVENPRYLRKSEKRLKKAQRRLSKKFRQGKKQSKNYHKQRIKVAKLHLKVSRQRKDKAIKEALALVQSNDLVVYEALKVRNLVKNRQLAKSISDASWYQFTEWFEFFAKIYRIVCIAVPPHFTSQGCSVCGTRVQKSLSTRTHQCPNCKTVLDRDHNQQFSF

SEQ ID NO: 34304 - protein, 377 aa, unknown
  TnpB Polypeptide
VIKGFRYRLCLNNTQEQQINQMLGNARFVYNWALKTRIEAYQKDKTKVSAFTLMTELTKLKKQPEYEWLNLSVAQSLQQSIVNMEKAFTKFFRDKKGFPKFKSKHKSRQVVGFPQNTKIDFETGKVFVNKIGWIRTRISRTFEGKIKTATIEKTATGKYYISITVELPDIKVKQKPVKTATAVGIDTGIKTFATLSDGVEIENPKHLKSNLKRLRVLSKRVSRKVKGSNNRKKAVKKLAVLHERIANQRLDFLHKTTTAIAKQYDTAIVENLNIAGMLKNRRLSQSIADLGLGRFYSLLEYKMQERGGNYIEIGRFEPSSRLCACGIINKELTLSDRTWTCKICGTTHDRDLLAAKNIKRFGLKDQNLIKFTAGTVG

SEQ ID NO: 34305 - protein, 366 aa, unknown
  TnpB Polypeptide
LQRATKGGQFALHSQTIQMVCHTFLANVETTRQLKATNPKMRYPYKDKRYYPLSWPAQTVSIERGRIVLPMGRGRPALIFRLDTSGLPERVGGCKLVWKDGYELHVSIPVENEVVETTAQEVGSAAEMETVPVRATVDLGKIHQAAVSTNTGKAIVISGRGIRSLKRRQNMALGQIARKCSRCEPGSKRWRELQHARQQQSARIERQVRDLRHKGTRKVITFCQEQHVSTLYIGNPHGVRKRLTGRHHHQRMSQWEYGKGIAYLTEKAKQARIESFTGSERGTSSQCPVCGRKQKPKGREWVCRNPQCGFHGHRDVVGSVNMHPLAYNQKISFPAHITYQRAGPVRVSQRNEEPPRVRRRASASPL

SEQ ID NO: 34306 - protein, 650 aa, unknown
  TnpB Polypeptide
LTPSPTGSWSSRTAKSAPACSRSATKSAGRTPPSTTSRPKTASCRRAAYTPSTKSTTSRTQRRSPTDTAKPKSASASFGNTTRLLSRSLVTARCMRYIWTTRAQSTSTSSAGSGKAAMASGASRSPAASTSRWRSSSRGTRKNPITLRNSGRRPSSMRRTVPPKRRHASPARSSTAWAPNTTSATANSIPTCPSATTCIARRFRGPDSIPARERESGPRQGEAAPPPPRGGDARILCILFHSLVILYKKCIRPQVNGQKSDNNHALKEKMSAYSSEKKSLSFFDLCANICELKRQPEYGWLNDVPAITLNYSLLNLDNAYKRFFKTKGGFPNFKSKKHSRNAVKFDPLSVKYDFENFRVRIPKIGWVKICQNRHFDPAAVKAQATTVFRDACGEYWCCVPVEDGALPVPKAKVREETAAGLDVGVKVMAALSDGTVIENPRFSEAEEARIAKMQRGLARKHKGGKDDPPSKRYLRYRTKLARVHRHIENRRTDFLQKASTDILRRYDTVCLEDLNVKGMMRNHNLAGAIGSVAWSRFNAMLEYKAERYGKNILRAGRFDATSQTCSACGYRNAEVKDLAVREWTCPQCGTHHDRDVNAAINIKAMALKKYFNNQSPAVTGITDADGADSENEAGTRSPARNYASDETSMK

SEQ ID NO: 34307 - protein, 588 aa, unknown
  TnpB Polypeptide
MVFDHMKHKERTVLLQPDQDVSELCFLEAERVESLGVRNEAPGYVTTVREIVAPDAATEEQLEALLKAYGRQVSYFIHRFHSRAWRPYCSGSRYRYLRDRLVEAVAKKEEEGKKPEKKSEEKKKSEKKPEEGKKPEMKPEALFPIFGLQARQWKMALQQASSVVENDWALAQQRAKEKIERTRWYANLDGNERHYVNLLLSTMGDDFFLMMRGRTATFGWHRDREQLKKVKNPGSLCALVRRAIQKVKSKQIRRRACRSVWFDCECYSVQIVTEGKETIQVVSLMSLTPGKRVKIKLRGKKTIKGTVKLVKTSRGWQLHTLSTPKTKENSSEGKLTCAAMDMGFSEVFTMHDGAQFGRKLGEAIGAQAETVDLKIRERNRLTAQAKNTKDPKKRRNILRYNLGSDTFDRNVAKHRSRVHNIVNHSLNEMLKQYPAEVYVVEDLSHRFYLKGFSKQTNRLLSSWVRGIIAQRLSFKAALHGVSLVKVPAAYSSQRCPYCGCVCRESRKGDHFECVHCGAKGHADRVACLNLLCRAHDPRFRSRMSKERVLALELEEHAMECARRGTTPHKYEPGQRKKRSTPNEATKKA

SEQ ID NO: 34308 - protein, 411 aa, unknown
  TnpB Polypeptide
MRSQKIRLKLTKEQERLAWWYSKVSRNFWNLLVDIDKRNNNGDFDEILSKNGNKTYHSNYYGRDIYCLNSSDYLNLVKIVVAKNYDEDCDNWSWYHQPNQFFIYSSLARELVKIRKQNKGRLNFRSVNKSQPNFNVRCDTFPDKTRLSRIYLKDNGKLQIPTLGEVHYGSIRADFDLSGKKQAAQISFDGKYWYLSYTEDVDTQVNLPEYTDGIGIDLGIKTLATVSDGTLVPNIKTFRRVRILEKRLKRLQRKVSRKYHINKCNKHNKTKNIIKLERQIKLIHRSLRNIRINHIRKFVSQLVKKQPQYIAIEDLNVKGMMKNKHLAKDIMNCAFYTIREQLIRKARERHIAVRLVDRFYPSSKTCSHCGSYKKDLKLNERVYHCLNCQTTMDRDCNASLNIARTDQYVLI

SEQ ID NO: 34309 - protein, 538 aa, Tolumonas sp.
LDPQVFTYQTRLNLNAEQSTALNAYADLFCKIERKLFVALYIKKLPLNDTKRQFLKQFQITSRQYNAIKVQLEGRVSSIKERKPDLIEALKIKIQKAEKVIEKLASKPFKQHQKKRRLAILKNKLSVLEHDLSTGRVRICFGSKKLFRQQFNLEKNGFQSHEEWLREWQKSRSEQFFVLGSKDETAGNQSCAAVSGDGGLTLRLRLPDALAHCGKYISIPCVNFAYGQQQILAALASSQRISTVNDEGKVSVKRTGTALSYRFLRDDKGWRVFASLSVVAPELKSSVSLGAIGIDVNAKHLAVAEINRHGNWLKSYRLPLNTYGKSTEQAKALIGDVAKQIAKLAVDSSKPVVVESLNFQRKKAELEKQDGRYSRMLSSFAYGKTLAAIKGACFRAGVEVREVNPAFTSVIGAVKFSQKLGLSVHQGAALAIARRGLGLSEIPPRQSAIVPVANGGHVTLSLPERDRHKHVWSAWGEIRTKLRAAHVAHFRRGINLYPLPLRPVFEKRVLSTGWNLSGHTQANRDQHCSDHVFESLPF

SEQ ID NO: 34310 - protein, 414 aa, unknown
  TnpB Polypeptide
MLVIVKEEMLVKGVVFRLDTNIPSEAKSLLEDFRLAVNNAIRAGLQARVTSRNALARIAYKDFRQEHPRMYAKHLVSAFEVAGGVLKNHRRRIRKGVACRVPYVKRLMMKAENQAYKLDRESGTIDLPIRAGCHVKLNLVVSQYHRKYLDDSTLSLGSLTILPDQVIIAFRKVAPAPYIPASVLSLDTNERSLDGVFVEVRSRAAAPVTAKFPDVAIIQQRHHDRRRRLQKKKAHDRRTSRNLCRREGKREHHRIEYRLHQVADAILSFADGHKSVIVLEDLTGVRIKRGKDLNRRLSMWPRRKLHSIIEYKAQWKGIPVVKVDPRYSSRKCPTCGRIQDSRMGTEFVCGCGWHLDRHINASLNLLQTAISNGMAGGLWFDPGAFQHDVMMILYEPAMAARSEPNGTSCDCEVT

SEQ ID NO: 34311 - protein, 523 aa, Okeania sp.
MITSVGVKVDISMLLKYKYKLKPHKRQAVIIANWLELVRKQYNYRLAERLYWFESTRTPVNTCPLNVSVVPVERIYKNIPEFRTQTRDGRKKDSSGNSITKKGDKHPNIVNGYVLWETVQLADLAQTKQLFPEYKSIHSQVLQDVIQRVQTTMDHFTKPDKNGKTSGRRKFKGNHYYNSFSYPQLSNTNIVKNANGRFCINLPKIGLVPFVFNRPIPKGFKVKTGTVIREADGWYISFTIEDKTVPIEVVEIQPTLDNSKGIDLGLLHYAVTSDGEFIEVPKFFRFSEHRLSKLQVRLAKKSKHSKPWKILKRKIAKLHQLISRQRLDWQFKLAYHLFSDVRVIFLEDLQVASLLRRCKAKLGDNGQFLPNGQSAKSGLNKSLQDAAFGQFIQVLEYVAWKLGKSIVKVDPKGTSQHCWKCLNKVSKSLSERWHSCSNCGQELDRDYNSATPLAPLPGGDGGGLDCYLHRGRTSPLLKLRSEFLWLKNPALSRRGASGVCQYTTLQGVLKIIWGDSDMHAVGR

SEQ ID NO: 34312 - protein, 441 aa, Bacillus sp.
  misc_feature (163)..(196): Xaa can be any naturally occurring amino acid
MILAKKVRLIPTPEQEKVLRNHAGASRFAYNYCKRMSDRYYKLFGKSVSQLNLQKRFTKIKKRKRYEWLNEINAQVPKQASKDFDKARRNSFKKYKNGYHTSYKSKKDLIQGFYANYERLIIGKKVVDIQSIGEVKTSQQLPRNKKPSNPRVTFDGRHWWISXXXXXXXXXXXXXXXXXXXXXXXXXXXXXXXXXXIGEVKTSQQLPRNKKPSNPRVTFDGRHWWISVGFKEEFEPQELTNESIGVDVGLKELFVASNGTKERNINKDAKVKKLLKRKKSAQRDMSRRFKKGVKIQSAGYEKAKTEHLRLSRKITNIRNNHIHQATAKLVKTKPMRIVVEDLPISNLLKNKKLSKAFSFQKLNFFFQCLSYKCEKYGIEYVKADKWFASSKICSCCGVKYDHSVQSEGQWSLKIREWDCVQCNSHHDRDLNASINLSRWVK

SEQ ID NO: 34313 - protein, 372 aa, unknown
  TnpB Polypeptide
MYFRKTYKFKAKLSKTTEQNAVRWLGLCQQLYNLALEQRIVAYKRCGISLSTYSQSNELPDFKKAFPEFQGVNSQTLQDTIERLGKAFQGFFSRLNKIGAKAGFPRFRSYHRYDSFTLKTSGWKLEGRHLKIRGLGTFKLFLSQPIVGKIKTLTVRRDGCGDWWVSFSCAGVPAKAYPHPETEVVGIDVGLSHFCADTDGLHVANPKYYRKAQTELRRKQRQVARRAKGSNRRKKAVKELARVHRKVARMRLDFLYKTANHYISKYQTICVEALQVKHMVKNRHLSKSIADSGWSTFFELLLYKAAEAGRELIQVNPRNTSQNCSGCGAKVPKALATRVHRCPHCNLSLDRDINAARNIAATGSGQLLQALT

SEQ ID NO: 34314 - protein, 392 aa, unknown
  TnpB Polypeptide
MLTLEYKLILGAGQSQRIDEAIRTFQFIRNKALRLWFDDRRNKAFDLNKHCAVLAKEYPFANALNSQARQAAAERAAYAIQRYIRPDVKGKKSAKPKFQKDNRSVDYKVTGWKLSQDRRQITFKDGIGVGTMKMLGTQDLCPYDLALIKRVRILRRADGNYVQFCVDVDRRDSLEPTGRTLGLDMGLAKFYTDSDGEAVDCPRFLRKGEKKIKRAQRRHSRKIKGSSNRKKSKNILGRRHLKVQRQRKDFAVKLARCVVRSSDLVALEDLQVRNMVKNHCLAKSIADASWSLFSHWLSYYGSVFGRPVVKVAPQYTSQDCSFCGRRVQKSLSERTHVCQCGCVLDRDHNAARNILRLGLEQTSYSGAPRNEDGLPSETPVESESLPTAHAGK

SEQ ID NO: 34315 - protein, 391 aa, unknown
  TnpB Polypeptide
MSKQAYTFRLYPTRKQRECLQWTLDRTRELYNAALQERRDAYRMVGKSLTYYDQANQLPDIKTIREEYSDIHSQVLQDVLRKADKAFKAFFARCKRGDTPGFPRYKGRNRFDSFTYPQGGYSLTADNHVCLSKIGSIKIKVHREIKGTIKTCTIKREGECWYVVFACEVEQEPLEANHEAIGIDLGLLHFATLSDGSTIENPRYYRHAEKKLERLQHSLSHKKRGSHRRKKAVKAVAKAHRKVANQRRDFLHKNSHSLVNSYGLIVFEELQPANMSKRPKPKQDEQGNYIPNGAAAKGGLNKSIVDAGWAMFQQFCTYKAANAGRTVLLVNPKYTSQVCSGCGTVKKKELSERWHSCECGTELDRDHNAAITILALGRSVQGNLRSPAIHG

SEQ ID NO: 34316 - protein, 419 aa, Natronorubrum sp.
LDASASLWNETTYARRERFFGDDGNVWDADTGTLEGQYKDVVGSATAQQIIRKNTEAWRSFFKCLEDPDQDARPPGYWGNEDDGRELRTYIRGDQYTLKWGERSRLEIPVGTKLKDEFGLGYRERLRLEVSGEPKWSGEHGRLEIVYDEVDGTFRAFQPVTIDDSRLDTPLASSDEAAALDIGANNLIACTTTTGQQYLYEGRDLFAEFREATEKIAHYQSKLDDQRRTSKRIDRLYRKRTRQRNHAQDALVRDLVEQLADEGISTVYVGDLADVLSTHWSCRVNEKTHNFWAYRRFIGRLESVCEEYGIDVAETSEAWTSQECPDCGSRDKTIRHEDTLTCSCGFEGHADLTASRTFLERQVRREVRPMARPVRLKWTKHEWREHHSSLPNRGTTANEERTNQSTCTGKVASVETQTD

SEQ ID NO: 34317 - protein, 376 aa, Okeania sp.
MCYAHDRENKKAMEQTLTLVVKLNATPEQSSQLEETAQIFTDACAWINENVNHRLTNRNSIQVVCYQDIKEQFGLKANDIVRACARVGANRLAAKAKGKKVKGFKPRSFDCDGRTLSFRDKDWTISVASKGKRLRLSLRASNYQRGKLFAYKPTSAQICQHRDGQWYAHIQLKDTAPQPKKTSNVIGVDFGRREIPRTTTDKGWDGKDIQQKRDKFSRVRASLQKRASQGTRSTRRRCRETLKKLSGRENRYQQWLNHNISKSIIEEAKARNSTVAIEDLRGIRDRSNEKPGNKTHRRRSNSWAFYQLRLFLEYKGIKEGVKVIVIPPAYTSQTCHCCNHIGVRTNKNFKCSNQECSWIGDADLNGALMIQKWVAL

SEQ ID NO: 34318 - protein, 456 aa, Saccharopolyspora sp.
LSTVIQAYRFALDPTPSQESTLRSHCGAQRFAYNWGLARVKAVMNQREAEASYGVPEDERTPALSWSAYSLRKDWNQAKFEVAPWWGENSKEAYSSGLANLATALKNWGDSRSGKRKGRKAGFPVFKGKRGVLSCRFTTGAFGLAADRRHVKLPRIGVVRTCENTRKLARGIEQGTARIRSVTVSMRGGRWFVSFSVEVERNDSAPRNPDSVVGVDLGVTSLAVLSTGEVIANPRHLEVALRELRRLSRQAARRQGPDRRTRRTPSRRWLKTQTRIQRLHTRVADARRDGLHKLSTRLVHEHGAVVIEDLNVTGMTKNRRLARHIAGVGMGELRRQIGYKAAWSGVRVHVADRFYPSSKICSGCGAVKAKLRLSERVYRCEHCGMALDRDLNAARNLAALVQQGPSSASCVVRLNEPDGNPHKTRTTRAAGTATGRPTRSTPHRKVTAHDTFSHVS

SEQ ID NO: 34319 - protein, 459 aa, unknown
  TnpB Polypeptide
LLTGIKLRANPTPNQKLILSQWMGCARVIWNAKVDEELYYRTFARKYYSVGTYAPIDQTTAQFKSKELTPWLSQCPSQILRNSAVNWYKTYQKFMTGACGRPKRKIKSDRGSIYLTREVFRFDRCDDGNLRLFIGTKTNNIGYLSFKTHSKFEIPASLYIRKEHGQYTVSFCYENGLSNEGLSDDKEHLAHLRCATKEYLDDNTIGVDRGVAIPVHAGSMTFDFCDNQKKKMAKVDRYIKRLQRKLARQTKGSNRRNKTKHRITTHHAKKANIRNDFAHKTSRSLVDSQAKVIVFEALKASSMTRKPKAKQDEQGRYVSNKAKQKAGLNKSILNVGWHIIETYTKYKAYQVGKAVFKINPAYTSQECAQCDHTHPDNRRSQELFVCGNCGNTDNADNNASQVIKKRAINLILDTGTVLSDDGVLRTKSDSGRGGNRKTSRVKSSASGSQRSVKKEELAA

SEQ ID NO: 34320 - protein, 226 aa, Leptospirillum sp.
METCSGSISGWLGSRLFRQGRETGSPPRTLLRGSKNVFKDLHRSVSRKIKGSRNRAKAKQKLGRFYEKIKNVRQDFLHKATTAISKNHAVVVVEDLKVQNLTASGKGKRGLNKAILSLGWGEFRRQLEYKLAWNGGRLVVVPPAYTSQTCPVETCRHVSPDNRKSQELFSCVKCGFTANADYVGALNTKRAGHARLACSPSEEGESQSRGSTAEPCGVAGTDLVLA

SEQ ID NO: 34321 - protein, 403 aa, unknown
  TnpB Polypeptide
MPSETIKLTAKFKLKNLPEGLDELFSTCREIVNYLITYAFENKVTSFYRLKKETYKSLRREYPELPSHYVYTACQMATTIFKSYRKRERKGKASGKPVFKKEVIMLDDHLFRLDLEAGMVKLSTPKGRIALEFYPAKYHERFKDWKVGQAWLVKTSKGIFINVVFSKEIELREPKAFIGVDLNENNVTLSLLNGEFVQIITHEKEIRTGYFVKRRKIQKKLKAGKKRKRLLEKYGERERNKLNELYHKLANKIVEMAEKYGGIALEDLSEIRSSIRYSAEMNGRLHRWSFMKLQSIIEYKAKLKGVSVVFVNPAFTSSLCPICGVKLSPNGHRVLKCECGFEADRDVIGSWNIRLRALSWKVSRNEIYTLYKSYGQPERSLQCCIVINSKQHLPRVMSVIQLN

SEQ ID NO: 34322 - protein, 397 aa, Lactobacillus sp.
MRSEKTTLIWVVKMLMIRTQKVMLYPNRHMAKALDRLCDYRRYCWNEGLATWNDMYDLYTIDSSSPRPSFYSVRNELVANKADWQYELSARTLQLAIADLGNAWQNFFDKTQPYWGKPVFKSKKSARQGFKTDRAKIVAGKLHLDKPHGVKNWYDIRISRHVDLSGVLKVVSIYRENGKYWASFPFEVNLDDKPQTGDSSAVDVNVGHLDYTAGVINTLPKRLRKLYQRIKFYQKQLAHKRVVNGNKATKGSRYVAMRNKLQRDYRKVANIQHDIMQKFTTDLVNDYDKIVIEDLSVKAMQMSHVASKGLQRSMFGYFRQTLSYKCEWYGKELILADCQYPSTQRCSKCGHIKSGNDKITLQGNTTHRTKHSEYVCYNCGAVLDRDENAVANLLDLI

SEQ ID NO: 34323 - protein, 392 aa, Lysinibacillus sp.
MYKTYKVMLVPNNKQITRFFRMAGAARYIYNWVLAEQRDNYKNGKKFIRPFEMMKRLTKLKELQEYSWLNEFSRDLLNQAITDACNAFIRFFERINHYPKFKSKRKSKPSFANKYNKIKISATHVTLEKISLSARQNKKIKNRIRLAEKGRIPTGEKIEYYNPRIYFDGLNWWLSVSVKVETNKMDLTEEGIGIDLGVVDLAVTSENKRYANINRTDIVIRLEKKLKRLQRQLSKKFEMNKVEGRMVITKNINKLKLQILKLHKRLRNIRLNHIRKVINEIINRKPRFIAMEDLNVKLMMKNKHRAKQIQRQCFFEFRNLMEFKCKLFGIKFILVNRYFPSSKKCSQCKVIKKDLKGWMRTFKCICGNTINRDYHAAINLKEWAINKFNSTY

SEQ ID NO: 34324 - protein, 410 aa, Gammaproteobacteria sp.
MRRITRSYRIRSYPNGAQRRLRDRWFGAYRWLWNTALEIRTEAYRQCGLTLTGNDISRWLTQWKRTAGHEWLKVVPATCFTQCLRDQDAAFRNFFAGRAQYPRFKRKESAGSLRFQDAGTGWKRGILSLPKLGVLKLAESLPSVDRPDLVTLTLDAAGRYFVSFCADVEKAPPSLSCRAPAVGVDLGLKHLATLSTGEKIDNPRHSQARLRYLRQQQRCLARRQKDSRRRERQKLRVARAHAKVQQARQYALHDLTTRLTQDYDLIFIEDLNVKALSRGRNARSINDAAFGEIRRQLTYKSEWHDKILIAVDRWYASSKTCSKCRHVLDELRLDARYWTCRKCRVTHDRDINAARNLLMEGLRQLAARDERDLRVDAGDACPEEILVQVLAEEARSGQFNRACLEQARLH

SEQ ID NO: 34325 - protein, 387 aa, Microbispora sp.
LLRPTAKQAAALAACLKDHRQLYNAALEHRRTAYRKAGVTVRYGDQSADLKHIRADDAEGQGPWSFSSQQATLRRLDKAFRAFFARVHEGRVPGFPRFKGRGWFDTVEWPKDGDGCRWDSQPEHPTATFVRLQGIGHVRVHQHRPVKGRVKTISVKREGARWYVILSCDDVPAEPLRQTGAAVGLDMGVASLATTSDGDHLDNPRHLAGSAGRFVAAQQALARKTRGSVRRRKAVAQVAALHAKVRRQRLDYAHKQALTLVRGYDVIVHEDLRIANMTRSASGTVEQPGRNVAQKSGLNRSILDAGWGVFLQVLAHRAESAGRELIAVNPVNTSRTCARCGHVAKENRVTQAAFRCMVCGHTAHADVNAAKNILRAGLALRDAAEAA

SEQ ID NO: 34326 - protein, 472 aa, Actinoplanes sp.
MKVTRVAYSHRLNTGKYTALAEQCRHLGRVRSEVWQRYGSVGGAALSDRQVRDRWLADGTHVQFGVLANAWKETVRDAMAGIAASRAAAQLAVKRAVYRRTTDPAEHKRLFTALKSGRWADDPFLARLMRKYLARGHNRTRNQIVVRADQHNTRADESGRLWLAVPGLVQRKMIRIPLNTTVAPAGTLRLILRNNRVEIHYQIDAADMPSSQRPCGARAIGVDKGYTEALTDSDGNHHGRRLGKLLTAESDYRKAKGRARARLRSIANNAAARGDHGKADRIHRNNLGTMKRERRAARWEAQVRTETFTAVHQVVDKASTVVAEDLTKTFAGRKNFGRNTNRRLAAWTKGVIAEALTNVSQRRGSALVHVNAAYTSQACHRCGTLGNRSGDRFHCTWCRVVWQADVNAAINVLQRAADRDIGLHTPHRVVKQILRARTDRHRTRLPVQDSSRHPAAESEISELLSNEQEAER

SEQ ID NO: 34327 - protein, 195 aa, unknown
  TnpB Polypeptide
LRAVLQRKASKGTRSSRRRCRQLLQRLSGRERRFQAWVNHCISKAIVSRAQATHRFIALEDLTGIRERTNQQPRSKVERRRSNTWAFYQLRQFVHYKAARAGIQVVVVPPAYSSQTCHRCLWLGQREGKRFRCVNPTCGWEGDADFNGANVIALLGAAVNQPGGPWLACQLQGYRSRQRRVALKPAPYRLAVGVG

SEQ ID NO: 34328 - protein, 257 aa, Leptolyngbyaceae sp.
MLNLTYSYRIYPSLDQEAQMLNWLEQCRRVYNYALAERKDWINSRKCAVNACSIKQEYIILADAPYPDYYKQQNALTKAKEAIPELKAVHSQVLQDALKRLDKSFKLRQERGFGFPRFKKFGQYRSVVFPQFKSNPLSGFDLKVPKVGAVTINLHRPIPNGFEVKQVRVVFKASGWYAQLILQSDVSVPDVMPHGEPVGIDLGLEKFLAVSTGKLVERPRFFVDLQSKLKWLQRKLRNKKKRFRQLPKSASQDSRPA

SEQ ID NO: 34329 - protein, 392 aa, unknown
  TnpB Polypeptide
MKTRWTFRCYPTPEQELHLNRTFGCVRFVWNWALRARTDAFRNGERMGYPATDKALTALKATPEHVWLNEVSSVCLQQALRDLQVSFSNFFDKRTAYPSFKRKEARQSANYTERGFSFDTERRVLKLAKIGAIKVKWSRKVIPHPSSIRLIRTASGKYFVSLVVETQAVALPETGQAVGIDFGVSRLATLSTGERIANPKHGEQWKRRLAFYQKRLDRCQKGSKRRMAVKRHVARVHEKIANSRSDTLHKLSTDLVTRFDVICVEDLHLRGMVKNHSLARSLHDASIGTAIRMIGEKAERYGKAMVKIDRWFPSSKTCSACGHIVEQLPLSVREWTCQECGTHHDRDANAAANILAVGHTVSAHGGTVRRSRASASERKSLRSANQQGVNCA

SEQ ID NO: 34330 - protein, 380 aa, unknown
  TnpB Polypeptide
LIVCKKIRIEIDQEDKDALEFMQRKCRGLYNWWIGRLKNGEKWHLYEAKLSLQESRKHDPELNNVYGKLLAEVYFRIDGAMERFFHRLKESDGKAGFPRYRSRHEFFTLIYPAMYVKINNKTMVLPTGGKGRNKKYKNVLAKLTEQPPEKFKELAVSKDSRGNYYCSFVHERSENPVGNIGVVAFDLGIKTLATGINDNGRMYKIGGFKGYRWYNRQLDKVRSKRDKCQKGSRRYRFLSQVYKRVSEEKHNKQNDSLHKASHLIANKLAESAVVIGDLSQEQMVAKSKNRNKNRAVKNDWGLYKFTKMLNYKCMLYGKKLHVISERDTSKTCHKCGHIQAMPLYKRTYKCPECGLVMDRDENSAINILNRFLARLGPHTA

SEQ ID NO: 34331 - protein, 375 aa, Ktedonobacter sp.
MLVYEYKIDGTKQQYAAIEEAIRIVQFIRNKCLRLWMDEHATRNDLQCYCAVLAKEFPFAFSLNSQARQAAADRAWSAIARFYDNCKQKKPGKKGYPKFQHDNRSVEYKATGWKLDPDGKHITFTDGCGIGRVRLIGSRDLATRPIPAIMRVRLIRRADGYYAQFCVQAQRKVEHVPTGKQVGIDVGLKAFSTDSEGNTVENPRHYRKAETRLKRLQRRLSRKQKKSKNRKKARQAVAKAHLKVQRQREDFARKQANALVSSHDFIAFEDLQIRNMVRNRHLAKSIHDAGWGQFLAWVKYYATMHHIPVIAVLPHYTSQKCSACGTLVKKSLSVRTHVCTGCGVVLDRDHNAACNILQKALSTVGQMGTDAPLSA

SEQ ID NO: 34332 - protein, 422 aa, Ktedonobacter sp.
MLLCKKIRIDLSEQDAATLEFMQGKCRALYNWWVMRLREGEKWDLYEAKKSLQTSKVHDPELVEVYGKLLQEVYYRLDGAMKAFYRRVKAGEKPGFPRVRPRHCFFTLCYPAMYLKIEGDTLILPTGGKGKNKHYPNIVARLREVPPEEFKEVAISRDARGNYFASFVRERKEKHRETDGTVAFDLGIKTLATGANEQGRIYTIGGFKGSRWYNKQLDRIRSKRDKCKKKSRRYLHLSKVYKRVSQKKRNKQRDSLHKASHLISHNVVERTIVVGDLSQRQMVMKEHRERNKHLNRAVYNEWGVYAFLQMLSYKCQLYGKELHFLDERNTSKQCSGCGNLQAMPLWKRTYCCVECGLVMDRDENSAHNLLMRFLARQEPHAQAGSECGVLHATQSGVEVKGASCEGHVQQLDLFEWASRTFE

SEQ ID NO: 34333 - protein, 454 aa, Ktedonobacter sp.
MEDANDTPGPQPDEAPVRVKAYVYRLYPTRKQESTLLWTLRRCKELYNASLEERTAAYKMADVSVSYGMQADQLPQVKQERLEYQEIHSQVQQDVLRRLDKAMRAFFRRVAEGQTPGYPRYKSNTRYRSFTYPQSGYTIIGALTPHDNKGKKTCRLKLSKIGHLKMVMHRPIKGSIKACTIKHDGDQWYAVFSVEQAIHSTPVHPSSKTVGVDVGITSYATLSTGEQIANPRIYRSTEQQIKEAHRKLSRRKRGSHRRNRAKRALTRLYRKVRHRRQDFLHQTSRRLVNQYETLVFEALQIPNMTARPKPKKEEIPITTEGSEGSTTAAAVPHYLPNGAAAKSGLNKSIMDAAWGRFITLCACKAEEAGGMVMKVAPQQTSQVCSGCGVLVPKDLSVRWHSCSTCGAELDRDENAALNVLRRYELQGALPVRKKGKPTRKVGRGGKRPTATGAL

SEQ ID NO: 34334 - protein, 304 aa, Ktedonobacter sp.
MTAGADTFAGCVARSEKNKMSRERLKSPFSPVCLEWRPKPSKKKEFYLLVTLEVETSDPTPETHKQIVGVDVGMRYLAVTATMQGDCTFHADISPIAKSHHYARLRKRLQKKGTRSATRRLVAISGRERRLKANVNHVVSKRIVLEHPQSLIGLEHLTDIRERTKRRKGKKASAKQRKANRTFSKWAFGELHAMIAYKALLHRSMAIKVDANSTSQACPKCGHTCKENRPHKGLLFVCQNCQYTLHADLVGARNIAMRTLLIRQDWIGTGLLSVRPDVSDDEAKVARLKRYAELRWSSDTSPRL

SEQ ID NO: 34335 - protein, 387 aa, Ktedonobacter sp.
MIRAHKIRLHPTKEQHVYLAKAAGVARFVWNWALAEWNRQYEAGEKPTALKLKKHFNEIRREQFPWTWEVTKNASDQPFLDLGKAFTAFFEGKACHPKFKSKKRSKPSFYLANDQFELGDHRIWVPKLGWVNMAENLRFAGKVTGARITKTADWWFVSIQVEMPDEIPVKKRAAVGIDVGLNRLVTLSTGEGVENQAFLKTALGKLRRANKRLHRRKPGSNNREQARRQVARLHYRIACLREDALQKLTTRLADSYGIVGVETLNLKGLLKNRRLARSFSDASLGALRRLLEVKVAQRGGQVIKVGRFFPSSKTCHCCGWKWEDMTLKDRVFVCQNPSCPYYQFPQDRDHNAAQNVLREALRLIGLIDQVATGTGSDDGVNLAVDAG

SEQ ID NO: 34336 - protein, 310 aa, Ktedonobacter sp.
LKLSKIGHLKMVVHRPIKGTIKGCTIKHDGDQWYAVFSVEQAIGATPVHPSTKTVGIDMGITSYATLSTGEQIANPRIYRSTEQQIKEAHRRLSRRKQGSHRRARAKRALTRLYRKVRHRRQDFLHKASRQLVNQYGMLVFEALQIPNMTARPKLKPAEAPAPLQGSNSGTAAAVTHYLPNGAAAKGGLNKSILDAAWGRFITLCACKAEEAGGMAVKVAPQQTSQLCSGCGVLVPKDLSERWHSCPTCGAELDRDENAALNILRRYELHGPIRERKKRKATRKVVGVGSAPQRSFPSKKGADHCRSPRL

SEQ ID NO: 34337 - protein, 407 aa, Ktedonobacter sp.
VKEVLEVQLVERHIICKGDSRYAAIDAASFASKNLYNLANYHMRQSFIHTGKYLSSVDVYHLVKDTDAYKALPRKVSNDVLRLLEKNWKAFRKGLAAWFEDPSKFEGRPKVPKYKDKQKGRNILIYDIQAISKKALKKQGMIAPSLLGIEIPTKQAHVKQARIIPRSGFYVVEVVYEQEPKQAAVDPLLVAGIDIGLNNVATLTSNKAGFTPWLVNGRPLKHINQWYNKERARLQSHLSKHKRHTSTRLERLTNKRTRKIDHYLHTHSHRLIEHLIEEGIGTLVIGKNDGWKQEINIGNRNNQQFVQIPFARFIDMLRYKAELVGIHVILQEESYTYWCSFLDLEPLCHHEHYLGKRIKRGLFRTSTGRRINADVNGSLNILRKAIPESFGQGIVGVAVRPVGAPTY

SEQ ID NO: 34338 - protein, 511 aa, Ktedonobacter sp.
MAKALKTLRQALHYPPQYADYFAANQLLFNRVVAFYVEVIQAHEGILSLKNKEALTTLARLTHATEKNPRPIVPLSDLAPDVPAMFRRAAINAALGSARAFFSSLNTWRARKERHEAKAGTTGKKKQPFRERPPVPPRTWNKSAPFYAGLWKERTSHSITLKVWTGSRWSWLKIGTLSRELPDGFEMGSPHLVRKGARWWLHIPIEKTFEAPANVREQLTTGEKRICAVDLNLDQHLAVCSVQTVDGTILATSFIGNGTAIAGCRKKLLGRIARNRSQTGILAEGEQDNVALWRKIRHLDEHIAHQVSARIVQFALKQHASILVFEHLGSLRPAKGRYSRRGNLKRAYWMKGRIFRYSKYKAWNAGGIITCRVNPRNTSRECHRCHGLVIRYQEGEPVEGYTPGAPLCLCPQCQMRGHADRNASLNIGQRLLKRMQDPLKEKPHACSRRATREPKGSGVGISQDAKRHQRPSLPVARRGDHANEHGTAQRGRRRMGAPLLDIASQLRMHFE

SEQ ID NO: 34339 - protein, 421 aa, Ktedonobacter sp.
MMAPSIHFFAIDTGEYMFYYIGTTCFGVVQGEIPMIRAHKIRLHPTPEQAISFAKAAGTARFVWNWALAEWNRQYEAAEKPTALKLKKQFNAIRREQFPWTWEVTKNASDQPFLDLGKAFTAFFEGRARRPKFKSKKRSKPSFYLANDQFELGDHRIWVPKLGWVNMAEKLRFAGRVRGARITKTADWWFVSIQVEMPDESAEKKQVAVGIDVGLNRLATLSTGEGIENQAFLKTALGKLRRANKRLHRRKLGSKNREKARKQVARLHYRITCLRDDVLHKLTTRLATCYGIIGIEDLHLKGLLKNRKLARSFSDAAFGKLLSLLSSKMEQRGGQVIKVDRFFPSSKTCHCCDWKWETMQLSDRVFLCQNPTCAYYQFGQDRDQNAALNILQEALRLIGLIDQAVSGTGSDEDANLAVDAG

SEQ ID NO: 34340 - protein, 377 aa, Ktedonobacter sp.
MAMLIYEYKADGTKAQYAAIDEAIRIVQFIRNTCIRLWMDDHATKNDLQCHCAVLAKKFPFASSLNSQARQASADRAWSAIERFYDNCKQKKTGKKGYPRFQKNNRSVEYKQTGWKLEPDGRHITFTDGCGIGRLRLVGTRDIETFPLKQIKRVRLIRRADGYYVQFAVQAERNIEHIPTGKRVGIDVGLKAFYTDSEGSTVENPRHYRKAEKRLKRLQRRLSRKQKKSKNRKKARQVVAYAHVKVQRQREDFARKQANALVSSHDLIAFEDLHIRNMVKNRHLAKSIHDAGWGQFLAWVKYYAALHGIPVIRVSPHYTSQNCSACGTLVKKTLSIRTHVCTGCGVVLDRDHNAALNILQKALSTVGHTETDAPLSA

SEQ ID NO: 34341 - protein, 325 aa, Ktedonobacter sp.
MIKAHKIRLHPTAEQAVYFAKAAGTARFVWNWALAEWNRQYEAGGNPTAFKLKKQFNEIRREQFPWTWEVTKNASDQPFLDLGKAFTAFFEGRARRPKFKSKKRSTPSFYLANDQFELGDHRMWIPKLGWVNMAEKLRFAGRVKGARITKTAEWWFVSIQVEIPDPIAVKKPAAVGIDVGLNRLATLSTGEEVENQAFLKTTLKKLRQANKRLHRRKLGSRESGESAPTGRPSALSHHLPAPGCPSEAHNQTSRQLLDHRGGRSPPQGTPQESPSRSLVRRCLARHPQTSARGKSGATWGRGDQGGPFLSWKSRPVIAAVGRGKR

SEQ ID NO: 34342 - protein, 375 aa, Ktedonobacter sp.
MLIYEYKLDGNTQQYPAIDEAIRIVQFIRNKCLRLWMDGHATKNDLQCYCAILAKEFPFASSLNSQARQASADRAWAAIARFYDNCKQKKPGKKGYPRFQHDNRSVEYKQTGWKLDPDGRHITFTDGCGIGRLRLVGTRDIETFPMKQIKRVRLIRRADGYYAQFAVQAERQIEHVPTGKHVGIDVGLKAFSTDSEGAIVENPRHYRKAEKRLKRLQRRLSKKQKKSQNRKKARQAVAKAHLNVQRQREDFARKQANALVSSHDLIAFEDLQIRNMVRNRHLSKSISDAGWGRFLTWVKYYAALHGIPVIAVSPHYTSQNCSACGTLVKKSLSVRTHICTGCGVVLDRDHNAAVNILQKALSTVGQTGTDAPLSA

SEQ ID NO: 34343 - protein, 261 aa, Ktedonobacter sp.
MKQKRAFKYRVYPTPEQQQILAQTFGCCRFVYNWALRKKTDAYYNDHQRLYYKELSLLLTDLKKQEETHWLNEVSSVPLQQALRHLDKAFLNFFEGRAKYPTFHKKRNTQSATYTANAFTWRNGSLTLAKMSEPLQIVWSRPLPNEAIPSSVTITKDCADRYFISLLVEEEIAHLPCNEKAIGADLGLKSFVVLSTGEVVGNPRFFHKDEKKLAKAQRRHAKKKKGSKNRDKARLKVARIHARIADRRRDAPAQALYPPDS

SEQ ID NO: 34344 - protein, 553 aa, Ktedonobacter sp.
VGTSEERKCRKNAGGQGIPKKQQEKRAATPTFLLELPLVVDPGQAARLRAHLEAARQLYNAILSQGQKRLRRMRADPAWQEARALPRTHKTERAVAFSALRKTYGFTEAALHEAVKGLRVGWIAEHIEAVLAQTLATRAYRALNRVCLGKARRVRFKSRGRGFSSIENKRNDTSLRFVLQPPEAGNAGYLLWNGDRLPALIDWKDEVVTHGLKHRIKYARLIQRPASSPRAAGADAQGSRYVVQLALEGKPHHKPKHKVGKGIVGGDLGPSTLALVPQEGEASLEVFCAELAPDARTIRRLQRQMERQRRAANPEHYDEKGRIKKQGKKKPQWKQSKRYQATRRRKATKERKLAAHRKSLHGRKVHEVIALGSTIIIEKISYKAWQKTFGKSVGLRAPGMFVDLLRRTVASTGGILIEVPTRTTALSQWCHGCGKKAKKPLSERWHQCACGVGPAQRDLYSAFLAASLDPADPIPSCARYQAYWEGAEARLRAAHERTHQRAKEGQTVPQSFGLTRAGARLPKSPGEPTQEPVFLLGWEELEAWTEPLEPPLL

SEQ ID NO: 34345 - protein, 369 aa, Ktedonobacter sp.
MRNDSAWNKARALPRSHKQQRAQAFSALRKKYHFSEYELHEYAKLARVSWIADHIESTMAQTLATRAYQAVNRVCVGKATRVRFRSKGRGIDSVEGKRNDVGMRFVCDPNAGDGGFLIWNQEVIPAIIDWRDPVVRHGMRHPIKYVRLVRRKASSPQAQGADKDSHRYCVQLVLEGHAFVKPKHEEGGKDMIGLDIGPSTLAIVPRRAKADLVTFCQELSPNASRKRRLQRKMDRQRRATNPNNYDEKGRVKKGKGRLKWRESKRYQATRRQHATTERRLAAHRKSLHGHLAHRIASVGTTITIEKTSFKGWQKQYGRSIGRARPRDVCSAFDSHSCKNWRHPARSFSLPDQTLSVLPEVGAVSQEATI

SEQ ID NO: 34346 - protein, 375 aa, Ktedonobacter sp.
MLMYEYKLDGTKAQYAAIDEAIRIVQFIRNKCLRLWMDDHANKNDLQCYCAVLAKAFPFASSLNSQARQASADRAWSAIARFYDNCKQKKPGKKGYPRFQKNNRSVEYKTTGWKLEPDGRHITFTDGCGIGKLRLIGTREIETFPAKQIKRIHLVRRADGYYVQFAVQAERHVEHVPTGKQVGIDVGLKAFYTDSEGGTVENPRHYRKAEKRLKRLQRRLSKKQKKSQNRKKARKAVAKAHLNVQRQREDFARKQANALVTSHDLIAFEDLHIRNMVRNRHLSKSISDAGWGRFLHWVNYYAALHQIPVMAVSPQFTSQNCSACGTLVKKSLSVRTHVCTNCGVILDRDQNAALNILQKALSTVGHTGTDAPVSA

SEQ ID NO: 34347 - protein, 433 aa, Ktedonobacter sp.
MYQIKRVKIGKTKQLEELAHACGEVYTATLVSFWRTVRKKGIWLKPKHLMRWHSSNTLHAHTADACVQSFFASLKSWRERRKTDTTAKPPRRRKWYFRIEYKRSAMRMKDGKLLLSNGKGNEPLVLDWPWTMPQTLVIRWTGTEYEAIATYEPCFLPVPENGDKIAGIDLGEIHMAVSHDGEHTYILNGRLLRSKRQYRNKLLARLQKKIDAKKKGSRRRKRLVRSKQKQLKKLANQIKTIEHQSTSRLISTLQKDGVQTLAIGDVRAIRQDLDVGSKNNQKLHQWSFGSLRHKLTYKAERVGMVVEIQEESYTSKTCPVCGKRRKSPVQGRNFCCTNKACGWKGHRDLVGACNIRYKYRGEMGIPHVVGADMAAPIGLRFMPHIGVARKEEMYLREAAGLRDHAEKSLRLHGYWFHLVTHYKRRNKSLQTSM

SEQ ID NO: 34348 - protein, 237 aa, Ktedonobacter sp.
MLIYEYKLDGTKAQYAAIDEAIRSVQFIRNTCLRLWMDDYATRNDLQLYCAVLAKEHPFVFSLNSQARQASADRAWSAIVRFYDNCKNKKPGKKGYPCFQKNNRSVKYKQTGWKLDPDGKHITFTDGCGIGRLRLIGSRDLATRPIPAITRVRLIRRADGYYAQFCIQAHRRVEHVPTGKQVGIDVGLKAFSTDSEGNTIENPRHYRKTEKRLKRLQRRLSRKQKKSKNRKKLGRQA

SEQ ID NO: 34349 - protein, 475 aa, Ktedonobacter sp.
VYGCTAHHTCHLQAGFPLYHEKANDIKQIITAKLKLLPTPEQQQRLRQTQLAYRDALNAVSHYAFAHGKTSSVTTLHKGMYAQLRARFGLPSQLACSVERQVSATYKGLWTKLVKNIEHRRAKITKKRFKGLDQPPHYSSPTVQYTYARDYTFQCESRVSIGTLTGRISIPYQGYDKQTALIQHGARIGDAKLWYDQPKKQFYLLVSLELEIPDPTPAQLTEVVGVDVGIRYLAVTSTSTGKASFYSGKRVRHRANHYARLRKRLQQKGTRGAKRRLRRIEQRERRLKLHTNHIIAKQIIEQHPHALIGLEQLTDIRERTRRRKRKRTKKGKGTQTVSAKARKANRVHSQWSFAELQALLSYKATLAGSLAVKVDADYTSKACPMCGHTADENRPNKGLRFGCQQCGYTLHADLIGARNVTLRTLLIRQDWIRTGFVSMAPDASDKEAKAARLRRYAEVRWSPGVTNKPPVSDRR

SEQ ID NO: 34350 - protein, 382 aa, Ktedonobacter sp.
LIKAHKIRLHPTEEQKGYFAKAAGTARFVWNWALAEWNRQYEAGERPTALKLKKQFNKIRREQYPWTWEVTKNASDQPFLDLAKAWIAYFEGLKNGTKTGRPTFKSKKKSRPGFYLANDQFELGDYRIWIPKLGWVNMAEKLRFTGKVTGARLTRQADWWFVSVTVEVPDEFPLRKGRPSVGVDVGLNRLATLSDGTEFENQRFLKTALKKLRQANKRLHRRKPGSKNREKARRKVARLHYKVACMREDVLQKLTTKAANTFALVGIEDLHIKGLMKNRKLSRSFSDAALGRLLRLLSMKVTHRGGVVVKVDRYFPSSQLCSRCGWRWKDIRLSDRVFVCKSCGLVADRDKNAALNLLQEAQRLVAAFPPCEVDHGTGSDGS

SEQ ID NO: 34351 - protein, 433 aa, unknown
  TnpB Polypeptide
MIITFQYRLKPTPAQVATMSTWSELLRRHWNFALGQRLDWLRQTRCQIDRCSILSCPTGEIPQLVDYYYQQSALKETKLLFPAYKDIYSEVQQMNLQRLDQAWKRWLFPGKTGKRGGCPRFKKRGAKPSFSFSRVNHPKAACFLEGSNLRIPYIGDIPIVVHRPIPEGFTLKTATICCRADGWYVSISMADETVPDLIPLDEIKSAVGIDVGLKEFLTTSDGETEPVQQNFRRSQKRLARTQRRQTRMQKGSNNAQKQKNRVARIHQRIKRQRKEFHYKVAHKLVKAYDLIGVEDLNIQGLARTKLAKSILDAAWGEFIAILEAVAVKRGVRVVKVKPHGTTTDCSTCGCQVPKTLEIRIHDCPKCLTVLDRDLNAAINILVRAINAVGLTVPACGGLLSWVTRYAGQLVKSVEAGISSCEIGSLHHTASRLV

SEQ ID NO: 34352 - protein, 333 aa, unknown
  TnpB Polypeptide
MAEKTVVCRFQQPNKDKLEAVRQEYSNAQNYLQGEDDIDLYSATKQQMDRRAGKEDKGQPLFIRNDTFEVSKRDTELTEYWVRIPVASVRGGVWTPIQPHTEIQEDWEIGDSKILQKEYGFELHLTVKKEVETQEEYDGALGVDLGLKKLATAKDVPLSDTTSNQTICLASQVENYPDKYFHLRRNCRNGYVRKRWDGKVKNRTEDLCHQISREIVDHAKENNLFIVIGDLEGIQDKDRGKRMNRTIRNFPHWKLRNYIKYKAEWVGIKVVEVSEAYTSQTCSKCGEKVVRGKECLDAQVVATKQTVIRTLPTTSGSEESERFQNPLLIPRVA

SEQ ID NO: 34353 - protein, 528 aa, unknown
  TnpB Polypeptide
VKAKPKATRKRTSQKRAKAFTGVHALLLFPSGEDHKATLDLMRRFSAGVRYAYNRLLEGQPREELKRQDSPLCAFFGLNTRYADDAVLKAKATLDSAKELGENPRKVVFGGRGLFDQLKRRHLSGKPLKRLKREWREKRQGLLYSRGDRTKGGNLNLKLLVKEGALWLRINLGDGSYVHALVKTRHPNLSALVERVHASLPYNVELSLKDGKIYAAFTWEEEPAPLVATKENGVLALDVNSDPYHLALALVSPDGNLKRHLTLSLEEVDRAPNKGAKELLLWKIAHQVVSLAEEHGVAVATERLKYLRKSRRGDGSGRAFRGKQHRFAYASLLRKVHSLARKKGVQVVEVNPQDTSTIGMLKYAPQLSLSKDVAAAYVIGRRALGFKEKLPKGYQKLLGDGAFLVQAWDFYRARAEELRTQKRNERDRSRRNRLSRELKKAQGALSLLSSPLGSPGSQDGFTEGRKRPGANAWRVLRVGTFLPLLGREVPRDLSPLKVFLHRGAWEGWKGGLGPPPGGGPKCANVHFG

SEQ ID NO: 34354 - protein, 365 aa, unknown
  TnpB Polypeptide
MLEFGITNRMAKAIIRTAKNQLKFSKELSYYQYSHLYKRRQSLQRKIDKLKLSLNSKRLKRRKLAKVRLFWAQMKLNKINQLISNGFKINLTFGTKHLLKTNKNKFLAKRDNQIVYIGSKCETCGNQQFQIYFNSKYNRFDYKLRVDNRWISKSDKYIFGSFALKNKEAKTNILQTLSKKGSNPLTYRILKRNGTLYLQIMYRREVLNITQNTNGVLGVDFNKGFISVSEINQNGKLQSLTRYNYLHKGKATKTKTSMLELVSKLVAQAIDVEKDIVIEDLVSLDSSKKQDKTTSKGYNRMLNSLKFGLFKRCLLSKATKEGVSIHIVNPYNTSKIAKENYTNRMKLNVHDAASYVIARRFYQYD

SEQ ID NO: 34355 - protein, 578 aa, unknown
  TnpB Polypeptide
MAIGSKNSTPSFVLTLSMDIGLNEQDLLYKEFKKCGIIYNQLVSVTTKMWHQLRKTRKYRELMAAIAKAVPDSDEQKALFKQREKMLKEYRFSEDAFHAMVAPYAKYYAINSHVAQSIATAVWTAWSSFFFDNGKEVHYKKLEQVSSMSGKNNATGIILRPANCTTSVINSAKKKIKNSIEEKYFAAYRKPDAKKDEEVALPDEVKAQMEKEIVAATAKVKTSIGKGELRIVYGNHAFPVTLRNPNTQTGRYQQEALKCGVKYCRIIRKWVGTKWKYYAQIVLEGYPPIKCDNNGVAKHPVKQGRVGIDIGTQTIAFSGKDVCDLRVLAPSARAQAKSLVNEIASTLRAMDRSRRATNPKYYNPDGTIKRLRRQHGQKQKRKWKYSKRYYRLRAKLRNLYRKLTDIRKMEHNILANELLVHGNGFVVEDMNYKALQKCSKETKINPKTGRAHTKKRFGKSLSRCAPAMFISILEKKASRYGGSVIKVSTFETKASQFDHTDESYTKKKLSKRMARLRSGDIVQRDLYSAFLLEHIDIESLQYNMETLNSAFPAFLEMHENTKQRLQAVGSSLPASIGF

SEQ ID NO: 34356 - protein, 255 aa, unknown
  TnpB Polypeptide
MEGKVKICTIKREGDCWYVVFTCKIEAQTRLPYTDLVIGIDMGLKHFMTDSNGDVVDNPRFFRTSHGKLKKNQQRLAKKKRTSHRRKKAVRLVAKAHKKVRNQRCDFHHKQARILVSTFETIVFEDLSIHYMVKRPKAKQDEKGNYLPNGASAKGGLNKSILDAGWGNFIELVKHKAEWAGVTVMQVDPEKTSQMCSACGKEGEHKDLSIRTHMCVHCGVVLDRDHNAALNILDRGLGRSPRETVTTGTFRETAA

SEQ ID NO: 34357 - protein, 411 aa, unknown
  TnpB Polypeptide
MKGSIRQLAWRIPEGAYHRALKAEAEVVEGSLSDLLWDLLLYKYAMQRVVDALWDLDKIPNRSQAHQMFYQMLRSYGFRAHVAKNIHEYALALVKAVKESGGDKPTLRRLSARLDYCDARVELDKGIVRVILRNKWYTLKLKHRREYIERFKNLKWKEVHVKYENGKIYVSIVFEFRYEPYVPRGIIALDINLRTVTAYDGSEVRRFRTRFIDALSKRKRAEELQKKYAKRWRYNKKILERVRSFHRKARNIVIDWSWKLAKQVVLKALRHGYAIALEDLEGLRENANSKGDAVTWKFTMFAYRRLQHSIISKAIEYGVPVIIVDPRNTSSTCPRCGEKLVYIHRLAVCKKCGFKADRDSVGAMNIWLRALQAYAGVPGSPPRAPAVKGEARRSGGTKHEGMKKLVRAIHR

SEQ ID NO: 34358 - protein, 607 aa, unknown
  TnpB Polypeptide
MRRTVTESVRLTFQGKLLEVAEEDRVKIDDLMRRLQSAKRTAFKRLLEVTSSEKEIRKELSEKFILNSKYVDSAIIDAKAIIDSQRELLPYYIENYEGKIRKSKKKLQKCRSELKRKGIQARIKKYEEKRDLLKQHLENGATPRVVFGRRGNFDLLIKGKILGEEWRDLRTNQVYNKGEAYQKGNRNLRVTYEEKEKQFYLLINYPSKVKGKRGRKKKYKLFVPEPFKPYILSNLETEKITVGKQKKTRIVNKKPHTVRVIRNKGEYYVNITVELSCPDETFSNANKKGLMGLDVNVKGIGVAIVFPNGNLRVHRWFPCHELFYTRSEKRSHLIGNLLVKVFRWAKKFGVNTVVSEGLDRFKKDNDTNAKYNRATHNFCKEKMIKTIKSRALKENFVHIEVFPAYSSIIGAIKYQKMYGLNTHEAAAFVIGRRGLGFNNEKIPKELSKSLKLKGRRQWKDDADPLASICRQWGGLWKQVSKIKNLFFETTREIPMNLRWFCRHLLIKSGGANSALQLALSYLNKKEEMEVEETGLSSGFRSYLADLTRSVLENAEELRESRSTRRKQALCAVVDFINNGGLSSFEGQRYEEKHPQRIETSKIACRGF

SEQ ID NO: 34359 - protein, 267 aa, unknown
  TnpB Polypeptide
MVDESLWIGIANDASSLRKLSLLSYNQLAQYDSPSYYKLCAISRAAGILAARKKSLRRGYASRPPYLVRPMLVSCYGFKMRNGELDIPISRGKRLSIRLTKHTLQIISQPGVKVRSFTLARNRLSLCIARDVPAINCASTVGVDRNLRNLTVGNDQQTSHYDLSKTLRIASTTTRIVASFRRDDDRIRTAIASRHGQRRTARVGHLLHAATKTIVALAVQRREAIVLENIEGIRSLYRKGNGQGRKYRGRMNSWSFGEAQRQIEYKA

SEQ ID NO: 34360 - protein, 436 aa, Sulfobacillus sp.
MQETTVFTYRVSLSPTEWAKATAARRAAGDLWTRLVKIHRFCRRRHWRWPTEAQLKAHFRRRFPLHSQTVQALIEKFCATIDGVRTKRKQGDKQARYPWRFRRYFNPIFKGQSLKKEGSSLLLPLGRGREPIRVHLPEAMPTGTMVQAELGYGTIYLTVTRTMPEPVPVPSSKAGGLDIGVIHLGMVSDGEEALAISGRGLRSVKQGRAKAQAQLRKKRARTQPGSRRRKRLNQAQHRMSQKVERVTRNALHHAANQIVAFCVAYGITILYAGALGTLNHKKRHRRSRRTNQDVGALEFGRLEQYLEYKLRRHGIQLIKISEAYTSQTCPQCGHLNKVAGRTYHCRACGYRAHRDGVGAVNILNKGMHGEIRPGEFLVPQRITYRRPVPLQGTLRRSPAEPREIAGGISDSESGAAHQGLTARGRSHRGSPRISAL

SEQ ID NO: 34361 - protein, 449 aa, unknown
  TnpB Polypeptide
MNQKSKQRKKKKYVTLGKPYLVTKAVTHIRLIEANPGKLAALDTLAPVFLSLCQQYVTLFCTDEAPDKLRAPLYQTPLSERWHRVAIQQAAGIAQSWRANRATAYQDYLDELEEYQEQEAEGTVDPKTKAPVWREWDVPTLRQTCIQANINVVKLLPSEDSTEFDYWLQISTLEFRKPLLVPVKIADYHRQTLKDKMINTSVQLNKRADSWWLTLSYDEVVMIQTEPDAPVVGIDVGIANFVTTSDGKHYGSFHKKLKERHRRDREKRRRKAKLRACLKKKGVKKLPSTSSKSSQRLSRHVRQEINRAVNECMDEHPEAQLAYEQLSVATMKFKARAQNAYLYASHLGHIPEQITWNATKRGIRATKVKSAYSSQECQMCHYTHRKNRPDQQTFCCQVCHFQAHADQNAAVNIERRFGDAEIRACKDKQEIKALLMRRHEAWKHVQGCP

SEQ ID NO: 34362 - protein, 403 aa, unknown
  TnpB Polypeptide
MRKAYKFRLHLNKKQEKTLFFTLNRCRELYNAALSERRDSYRYTGKGVTYYEQKRDLPEIKDIREEYKDIHSQVLQDVLNRLEKGMQAFYRRVKAGEKAGFPRFQGRNRYTSFTYTQGGYTLSEKHVTLSKIGKIRVKLHREIQGTIKTATIKHEVDQWYIIFSCDIADEQGGTHLPYADDAIGIDLGLLHFATLSTGDTIENPRYYRKAQADLKRKQRKLSRCKRGSHRRDKAKKQVAKAHRKIKNQRQDFLQKQSRQLVNTYEMIVFEELQVATISKAPKAKQDENGKYLPNGASQKAGLNKSILDAGWGQFVSFCKSKAEYAGSVTVLTVNPYKTSQVCSACERECPPKALDERTHVCPHCGVVLDRDQNAALNILRLGRSPQLPLVRAWQVPTVEAPAF

SEQ ID NO: 34363 - protein, 327 aa, Bacillus sp.
  misc_feature (10)..(10): Xaa can be any naturally occurring amino acid
LEAKNCFGLXGRKDAKHGNFVFQYVVEKQELWMTTSAGKLVMFPAVTFPYGQEIIEEVITKQLQCKNKKKHGKPIAWSVEDYGEYYIVKCLVDVPENPHTNYSKADGVIGVDCNLDHFAWAHVTEDGNYKGSGSFRFSVIGKTTGQITKIIEAEVIRLVDLAVRYHKPIIIEKLDTMQSKTGDRYGNKRANRMKSLFAYEKMTSAILNRADKKGVAVFQVNPAYTSISGKMKYMRKLGISIHQSAAFTIGRRGLGYKEKVPQVLQPYILKKEAHHWSHWHQLNNRLDIRAHHFYQLYDVNQPKEALQIERLDLLEDEKKKLANMFVS

SEQ ID NO: 34364 - protein, 308 aa, Microbispora sp.
MMCGVAQTVKRAYKYRFYPTSAQAAELARTFGCVRLVYNKALEERTRAYTRESARVSYAESSAALTAWKRTEELAFLAEVSSVPLQQALRHLQAAFANFFAKRARYPVFKSRKKSRASAEYTRSAFRWRDGRLTLAKMDGPLDIVWSRPLPQGAQPSTVTVSKDAAGRWFVSILVEQAIDPLAPTGGAVGVDAGITALVTLSTGEKITNPRHERADRRALTRAQRALARKTAGSGNRAKARVRVARLYARELVVIDRWFPSSKLCSACGTLHEAMPLHVREWECACGTVHVRDVNAANNILAAGLAER

SEQ ID NO: 34365 - protein, 397 aa, unknown
  TnpB Polypeptide
MKRRIVKDPNKVYRRISVRLFPTEDQLALFYKHIHSCRFIWNCMITIQERCYKLYNRRYTYDETSAILTDLKHQDVYAWLNEVSRHSLGATLNDLDNAYKQYHKDKNAGLPRYKRKRKSKKTFPVRDEFLYFNDGYASIEKIGMVKYKSDRSIPEGRKVTKFRDARIFLSKNNKWILSFVIECDKQAPKDSLYGNMGIDMGIRRLATFSYLHTHEYIPNINKSRRVRTLRHKLKHLHKKAGKIYHMHKNNVKSKHIIRIENQMRKVYHRVSNITKNYNHMQTRQLVNLCPRKVIMEDFEVKKLTRNMPRWMRREIYYASWYDFKVKMEYKCNELGIQFILASKDFPSTQVCSECGHIKHGSDKLKLEDHVYVCKKCGLKLNRDINAARNLEWYGKFN

SEQ ID NO: 34366 - protein, 632 aa, unknown
  TnpB Polypeptide
MVKKKKLKDEFKEFRNNDKSAYKTLKIPIKHVLLNRDLVQPIINNLVFEMNDLMIHSYQFIRLYVLNCYSNKITLPEIDNTFILYCIKSLGTRSNQGVKSKNIELLDKLGKFYLEEYQPLVNHEKTNLKNTTFLLPYLATQIHTSLSNNAQEHFVQHFLRFINKTTPQITEDRSILFKLKHQLMSLDNETDEIFNEWKTTHLFNILPSNITKSVYYDVKVRPFEYLKGMLYMNEVLEKQESKLFQPLPLRNNIIPKHIILDTASLVSLFCPANKIDGIKKGELHKNLKENQNDIWNAFLNLNHKIFRNQHYQFHHQIQTDGVSCCLLFIRKDLKDKKWGSRVPMIPEQDFYGIEDLSKEQLDTLKERNIVGCDPGKHSLVYMMDKNGNKLQYTASQRKIESYGKRNQRILLQEKKKHKIIEKETHLSVQNSKSVDYTNFKKYLVEKDKLNKEVGEFYKKETWRKMKFRQYSYGKKSIDIFLNKIQETFGSNILIGYGNWSRDTQMKHFMPTMNKGLRKQIHKRYDTITINEFNTSKKCCGCSNEMKHYRDKKNKEVYRLFVCSNCVSCQNKQIVFRTRDANSAVNIMNLTACWINNQTRPEEFSRASSFTCLGEGIETRKSKTIVVKAEVNR

SEQ ID NO: 34367 - protein, 425 aa, unknown
  TnpB Polypeptide
MIKMILVETHIIKQSNKYYNEADQLCFLSKNLYNASNYVVRQQYFDNKTYLDYNHINKMFTDTDQPDYRSLPAKVSKGTQRKLHSNWLSYFAARKDYFKYPEKYKSEPKIPKYLKKTGRFMVHYEKGALSFKRKGYINLSKTEIYIKTNLSKDVVSYVDIIPATHHIKFLIGYKVSEPEVKQNNNRYASVDLGVNNLAVVTSNVMKPVIFNGKPLKSINQYANKKLAEYKSVRDNADNKNDLITKFRYQDKIDKLMLKRSNKIKDYLHKTSTLLVNHLVSNDISVLIIGKNKYWKQDGNIGKQNNQNFVSIPFNIFINMISYKCALKGIYVDFIDESYTSKVSFLDNDVIPTYKKNSKTRYVFSGMRIKRGLYVSAGKTKLNADVNGSLNILRKYLISKVAWNNQLWFDCVEQCSNETILKINVV

SEQ ID NO: 34368 - protein, 415 aa, unknown
  TnpB Polypeptide
MSIRQGFSFKLKPNGAQDKKMSRFAGCTRWVYNQGLAWNEERRTADPAFHLSYAKLCTELLVWKEQNPWFRETHSQVLQQSLKDLMGGFQKFFKGLSAFPKKHKKFVTTDSFRFPQGFKIDEGRRQIYLPSIGWVKYKRSRFIQGKAKNVTVSRQADGWHVSIQTEYEMEPPKHAGDSVGIDMGCVRFCTLSDGTFFEPCGALKKQLKKLAWMQRRLARMQKFEKNWRKQKAAIARLHQHIANVRRDFIEKVSLNICKNHAEIFREDLKIKNMTASAKGTVEEHGTRVAQKSGLNRSILDQGWRIFFSKLDWKALRLGGHVHTVPPQNTSRTCPICGCVSKDNRKTQALFKCVSCGHQGNADGVAAINIKERGRSSLACGESERNAQAQVNLGRSKKPAPNQQQESTEVISSASC

SEQ ID NO: 34369 - protein, 550 aa, unknown
  TnpB Polypeptide
MAKTQTLSFPIRLPDAMQAEALRLLDASTIAINQIITDLWPQLDLFVADRTGPAWKQVEKHLLRRSGHGNRQERCEMEQAGRILRAQASRKQVFQSILPLLSEGLIRPAEGKRPARKDHRQINEQVRALRAHMQEAGEDADAFMAMTNVIEQACNRYLQTEEFPTTYEELQPVPVLSVGQLTFAGDDGMQAGQTYRARIEVSHFCDISSRQEQCRASLWLKLRSPDGQGKWAWGAWSEEIPLPATVFSSLWRGATTQAPTLREIRGDDGSRVAVLDVMLEVPAKYVSPLEQETRVLGWDWGVRSLITVSILEKPEGEEPYRQVSRPVFLDTGGIDGRQARLRREIDRLKACRERYDTLFKQALSAHTQQHLPLPADFPRWQARVSDYEARIKQCWKKYERRNRELAHLASNLLILLALLHDCRLICGENLTTLKTEGRGRGVRGRWRNWRNNTTVRGELWRVLRYKCHLLGIRARQVEPRGTTHTCPHCVTPVKGHHFSGEQSSTSSGIGSMPNVSLAPERAVKDQSMTPREGERWFQQTGVSLRAISTW

SEQ ID NO: 34370 - protein, 361 aa, unknown
  TnpB Polypeptide
MYNDFIFESRLAYKENYKIKFDELQRMIPAMIPKDKVYSKVAQMVLWQFYNNLKTLSASAKRGKRIGKMRFKPKTRYNSIIYNQSGFKFLPEGKIKFSKIGKIKCIIHREIQGKIKEVIIKKEFTGNWYAIVVCENEIKSTCSLFRKKIVGIDVGINNFTYDSDGYIIKYPQFFRKSEKKIKRSQRKLSKKVKNSNNRWKHRLSLARIHQKIKNQRNDFLHKTSRYYVDNYDTIFVEELKIQNMIKNHRLAKSISDSSWNSFFQKLEYKAERAGILFRKISPYNTSQKCSMCNKLVEKSLAQRTHRCPFCGIVIDRDYNASLNIKQKGIDSLPVGYREVMPLERRPLTMIQTDRSHVISMN

SEQ ID NO: 34371 - protein, 372 aa, Sporosarcina sp.
MLVNKAYKFRIYPNKEQEILIAKTIGCSRFVFNHFLEKWNQTYQETGKGLTYNFCSSQLTQLKKELIWLKEVDSIALQSSLKNLADAYSRFFKKQNRIPRFKSKKNKVQSYTTKHTNGNISIVGNKVKLPKLGFVKFAKSREVEGRILNATIRRNPSGKYFVSILAETEVKPLPQTDSSIGIDVGLKDFAVLSDGTIYGNPKWFRKLEKKLAKAQRILSRRKKESSNWHKQRIKVARLHEKITNARIDYLHKTSTEIVKNHDVIGIEDLQVTNMLKNRKLAKAISEVSWSKFRTLLEYKAKWYGKKVLSVARNFPSSQLCSNCHYRNKDVKNLALREWTCPECGKHHDRDLNASINIRNEAIQVTAGTAGLA

SEQ ID NO: 34372 - protein, 206 aa, Burkholderia sp.
FATLSTREKLPNDPFGRRAAEKLAKAQRAHKHKHKHKHKHKHKHKHKHKHKHKHKRHSAKLHAKMANARVDFQHKLALDLVRRFDYIAVGNVSAVKLARTRMAKSVYDASWSSFRNKLRYKAIAHGALFEEVDESGSTQFCSACGSKDSTTRPKGIAGLRIREWVCSDCGVEHDRDTNAALNILRCGRASPGVGILCLLGGGGRQR

SEQ ID NO: 34373 - protein, 418 aa, unknown
  TnpB Polypeptide
VLLTHETTIVLNKNDANIVGHMCYAAYKLWNVCNYERSNYKNLGLEKYPDWYYQKSKHKDDLWFKSLPSQTAQEICKLLDKSWKSFYRLKESGGIENPGTPRYKKDKMPITYMQNGIQHENGSYNVRLSLPKKLKEYMAHTYDIRAAYLYLKNPVFSNMDIIKQIKIYPPANDGTSRILVIYEVEDVLPEEDNGHYLSIDLGLHNLMTCYDNVGKTFIIGREYLSLSYFYNKEIARVQSQWGRIQAAREMEDLKTSKHLQKLYRKKNDCIKDYIHKMTRYITNYCVKNDIHTVVIGDIKGIRKERNLGRKTNQKLHSLPYARIYMQLEYKLKMKGICLIRQEESYSSQCPPQSEEVSHIYAEKRNRKKRGIYIVDTVIYNADAVGAYNILRKYHAVSGKEIDMPVTGLSSTKTIKVAV

SEQ ID NO: 34374 - protein, 381 aa, Endozoicomonas sp.
MLLAHKIELRPTAQQADYLDRACGSRRHAFNQLLAHFSQEGVRWSKQAAHEKYKELRIEFPWYAEVSQRVTRNTVDDLHNAFTHFFRRVKNGNKAGYPRFKKRGLNDSFSLREKPKFGVHGRTLRIEKLKTRIKMREALRFTGTACQVTISKRAGKYFASILIDTQDYDPKAQEEESVGVDFGIRDLAVCSNGKTFAANQKLKLSLKRLGQKQRALSRKTKGSNRSAKAKRAVAKLHYRVSNQRLAVLHEVSDYLTANFRVITIEDLNVRGMTEGRPTRNRKLARAVNDAGFGMLRQFIEYKAVLRGCQVVVADRFFPSSKRCSVPGCGFLNDSLLLSVREWECPNCKTHHDRDHNASVNLDNYGRDTLQLDGVAQTLNPT

SEQ ID NO: 34375 - protein, 374 aa, Fischerella sp.
MIKAYKVRLTPNNKQRTQLEQSAHVARWAYNWALSEKKSHYEETKKSYSQGDLRKHLTQLKKTDEYKWLYNFSNNITKQAIKDCDEAFKRFFKGLSKFPRFKSRRRCKWSFYNDPYKVKLESNRIRLEKIGWIRLAETGYLPDAFKPLSYRISKEGVHWFVSITVEVPNYVDNSKSTQQPIGIDLGIKTLATLSTGKIYKNINKSGKVKRLEKRFRRLQRKASRKYQLNKEGNRYRKTRNLIKLEKSIAKLRSRINNTRTDFIHQMTTEIVKTKPSHIVIEDLNVKGMMKNKHLAKHIQLCNFYEIRRQLEYKCKWYNIELVIADRWYPSSKTCSSCGQIHKGLKLSDRWMKCDCGLRMDRDFNAAINLAKLAS

SEQ ID NO: 34376 - protein, 434 aa, Nostoc sp.
VIYLYGCQQVLIHVDKDLKAILEFICSEANKLSNCAVYYARQIWFKAKRYITKFELDSEMKSNRHFQTLYSQAAQQLCHSVYESFASFKQLNALYNRGELADKPRPPKYRKNGFNLVSYPKQALKLNDGQVRIPLGSQVKAWFKLDSFSLPMPSNLRFEDIKKVRILPKNRCFYAEFVYKTTTVKPDVDKSNVLGIDHGLNNWLTCLSNVGTSFIVDGKHIKSLNRWYNKQVATIKENKSQGFWSNKLATITEKRNRQIRDAINKVGRIVINHCLDNRIGRVIFGWGQGIKQEINLGKKRNQQFVQIPTARLKGRIEQLCQQYSIEFVETEEANTSAASFVDADTLPKHGEKPDSWKSSGRRIKRGLFRTAMNWYINADCNGAANIIRKVSTTLGLDLSGVSRGALTHPTRICIWVTAKKKPSDVVLTRRVASF

SEQ ID NO: 34377 - protein, 490 aa, unknown
  TnpB Polypeptide
MFVSLQFKLELKKEDKEKLIKLMRKQSSAIRVAYNMLKDLEKEKTKNPHAQIYHRLRQLFPELPTKYIDSAMYKAKQYPTDKPVVFGGKKLFEKLCKNYISGKAREKLKKQWRELRQGTLISIGSKSDKGNRLARFEDLNGQLHLRITTGNREFIYAKVLREPSNSKDKWHTFMAMLLESWQTKNYFAYTVELKLRNGEVYGSISFEIPTPEVKYTKENGVIAIDTNASPIHLAIAEVSKTGELVSYRTINLHHLLGLSQDSKDHQEWILAHKIVDLAIQKGKAIAIENLKKLKKGMRGNGKATLRKRLHHWNAKKFLQKLKRVAMLKGVEIVEVHPAYTSVIGMLKYAPQLNIDKDIAGAYVIGRRALGFKEDMPENYEKLLKDKAYLEFALKRYEERKKEHRELVEKETNEYKRNALRSELRSVENSKKLLTNLIQSLQGESSGCEGADGRNPELASSEGSPPLPCSWTNSTKGFVPSEASVGGRGVG

SEQ ID NO: 34378 - protein, 506 aa, unknown
  TnpB Polypeptide
MEKMNVGNAQIKQTANPPKMMKNLEYYFINDKKKSGETSKTQVKTVKLTERIQIKTSKALHYLFRCSENLYNQANTLLIKGTHVFVLTKGRSTQKAGKLIPYRALERELKDEPEYRALPAQTSQQILLLLQRNWKSFFEAYTNWKKHPEKYEKRPQSPKLRKNGESILIFTNQQIRIKGKMLYFPKRTQLLPIRVNKARLGKLKQVRVLPRGYYSILEIIYEREVVIPSLANEQKNRILALDLGVRNTICAVNNCGLRPFIVKGGAIKWINQYYNKIRARYQKIYANYGIKSKTKRLQQLARKRNNKIEDLFHKLSKVIIQYCMCNQINTVVIGYNELWKQRLNLGKRNNQNFVGIPFYRLIEKIKYKAELKGINVVLIGENHTSKCSFLDNESIEHHNTYKGKRGIYRPKDRGGNGKIEFGLFKTAQGKIINSDVNGAYNILRKAFPKAISADEIEGLGLVPYSVSFAELEHLANLKSAQKVILKASEADGIEVRGIVPSSQGLL

SEQ ID NO: 34379 - protein, 315 aa, unknown
  TnpB Polypeptide
MPYYTSHKVSLATVEGRVECEYDLPENPEGTPHGEYLLNEDYSFSTSTVHYDSEADEFYLHATMERERDVDSPEKADDSNVLGVDCNVDDHIAVTSTGRFTGNADFLNHQRREFEKRRASLQQTGTRSAHLTFQRTGDRFGHWSKDYLHQCSKAIVEEARRNECTHIAFENLERIRERISDGKKFQQWAFNALQTMVEYKAEEYGIVVETVNPQYTSQQCSKCGCTLEKNRDDQHFECLDCGYTANADYNAAKNVARKLALELRRGQKSSVGGAFCQYALKSGTMTVNATDVASDTPVSVERKSTDKPTHLGVGS

SEQ ID NO: 34380 - protein, 373 aa, Chitinophagia sp.
MIIRKAFQFRLRLTKKQRRLLQELLEECRWLYNELLFQRKLAYEELEMFLSKYQQNMLLPFLKEERPSLEKVHSQVLQNVVDRLDKSFQSFFRRCKAGEKPGFPRFRGMHRYDSVCYPQSGFSIQGNQLYLSKIGKVRVKLHRPIEGIIKTCTLKKTASGEWDVTLSCEVSVSEKPPKEEAVAIDMGIESFATFSNGQKIENPRFFKKGEKSLAKAQRKLSKLNKGTKERSKQGKRVAKIHEHIKNQRKDFCHKEARKIVDQYQYICIEDLNIMKMVEKSSLAKNIMDVSWNQFRQILTYKAEEAGRKLGVVNPAYTSQTCYQCGYIEKKRLSERTHRCSKCGYTVSRDLNAAQNILALGLDGLGAIPRSLRL

SEQ ID NO: 34381 - protein, 184 aa, Lactobacillus sp.
MSKPARMEFCKTLRLSVIRFCLNHYLPLQVEISEPEKYSLTGKQVGIDVGVADLAILSNRLKYPSFNSSYFEKKAKIWQRKYARRRHLAKLLVLQDRNKKVLCPRSLESFANWQKAQKSKAKYQAKAANQRRDYLHKLTTHLVKQYDVIAIEDLKTKNLQKNHHLAKSIANASWRIFETVKFFV

SEQ ID NO: 34382 - protein, 363 aa, unknown
  TnpB Polypeptide
MNKGFEVRIYPTKEQQILINKTFGCVRYIYNRMLKLKQKAYSIFELKLNYVKISSILTKLKQRKAWLYEVDCVALQQCLRDLDAAYVKFFNGAGYPNFKSKRGKNSYRTNGRNIHLDQDNKMIRIPKVGWIKFRDKSNFSGLTKIYNITISKTSSGKYFANISAEVDVKAFAKTKKSCGVDLGLKDFCILNDGTKFENPRFLVNNEKRLRLLQKSLSRKIYGSKNYEKARTKLAKFHEYIANCRKDYLHKISIFLVKNYDIICAESLQVKNMIKNHKLAKAIADVSWSEFCQQLEYKCLWYDKKFVKINSYFASSQLCSNCGYKNSDVRNLDVRKWTCPECGIYHDRDINAAINILNEGLKLI

SEQ ID NO: 34383 - protein, 397 aa, unknown
  TnpB Polypeptide
MYLTKRIRLLPTAEQEKLFWKSAGVARWSYNFFLSYNQEKYNEHLEDNSKERFVTEGDVRKYINNVLKKTTHTWLQEVGSSVMKMGVMDANNSLQRFFNKISDYPKYKSRKKSKPSFYVNYETLKRTPNGFRGERLGVIKTRESLPKIPKDQKYVNPRITYDGKFWYLSVGYKVKQKQVKLTDNKIGIDLGLKDLAIVSNKDNSYSKKYKNINKGYKIKLLEKRLKRAQRKLSRKILNNIESYDEKRVPTYIKPLKDCKNIQKQIHIIQNLYRKLTNIRNNYINQVTTEIVKTKPSKIVLEDLNIKGLMKNKHASKNIANVKWYEFRRQILYKAELYGIEVVLANRFYPSSKTCSCCGSYKKDLKLKDRTYICNECGLIIDRDINAAINLANYKNLE

SEQ ID NO: 34384 - protein, 362 aa, unknown
  TnpB Polypeptide
MNKSFKIRIYPNQEQQILINKTFGCVRYVYNRILKFKQKAYNIFELKLNYVKTSSILTKLKQRKSWLCEVDAVALQQCLRDLDVAYIKFFNGSGYPNFKSKRGKNSYRTNMNIHLDQNNKMIRIPKVGWIKFRDKTKFNGLTKIYNITISKNSSGKYFASISAEVDIKALAKTKKSCGIDLGLKDFCILNDGIKFENPKFLVHNKRRLRLLQKSLSRKVYGSRNYEKARIKLAKFHEYIANCRKDYLHKISLFLVKNYDVICTETLQVKNMLKNHNLAKAINDVSWYEFCRQLEYKCLWYDKKFIKIDTYFASSQICSNCGFKNSDVKNLDVREWTCPECGIHHDRDINAAANILNQGLTLI

SEQ ID NO: 34385 - protein, 464 aa, unknown
  TnpB Polypeptide
MRVYQAYRFALDPTPAQKRKLASHAGAARFAYNFGLLLVRSRLAQKQRGEAVEVPWTLYALRREWNRQKHEVAPWWRENSKEAANSGLEDLARALKAFFDWRDGRRTGPRVGFPKPKRKGRSRDSFHYTTGAFGISGRTQVKLPRIGHLRTHHPTTELQELIEAGKARILRATVSREGDRWYCSFGCEVEREVGVPRHPEAVIGVDLGLASLAVLSTGEVVDNPRALERVQRKLRRLQRKADRQRRANNPDCYDTEGQAIRGSRPLGRSKRQMRTERQIGRLHARARHIREDCLHKLTTRLAKGYGTVVCEHLNTKSLCRSAHRGLRRALHDASLSRIRQLLAYKCQWYGATLVEAPTRFPSSKRCSRCGAVKATLPLGARIYGCERCGLRIDRDLNAACNLAALVHTTVAGSGPETINARSLTRVSPGCAGRWVDRESGGPAGHKTGTVCGQPQTPDLAHSVV

SEQ ID NO: 34386 - protein, 394 aa, Anoxybacillus sp.
MIKTYKVMLLPNHKQKTKLFQCAGVARWAYNFALAQEQESYKQDGKFLGDREIRKRLTKLKQTKEYGWLNQFSNNITKQAIKDATTAYKNFFEGRAKFPTFKTKKRTRPSFYQDTAKIKVTDTHVKLEKLTPSKKKNKQKFNWIRLAERGRIPHGKHVKYVNPRIVFDGLHWFLTIGVEEVEVKHETYTEGIGIDLGIKSLATVSNGMAFPNINYTPKVKKLEKQIKRLQRKLSRKYEMNNIQTEGGEFRYRKTENIKKLEFLVLKKRRRLKNIQLNHTHHITTALVKTKPAYVVMEHLNTSGMLKNKKLSKAIHQQTFHEFKRQMTYKCAWHGIEWIVADRFYPSSKRCSNCGHVKEKLSLSERIYRCEECGMEIDRDVNASINLKQYAASII

SEQ ID NO: 34387 - protein, 379 aa, unknown
  TnpB Polypeptide
MMRNFKFRLYPTSPQEKKLLWTLDKCRFVYNTLLDRLRKDRKVKSDELQHSILEIKRQHPELGDVYSKVLQYENRRLFAHLRMLSSLKKNGKKVGALRFKGKSWFKTFTYNQSGFKVFPRNTRYDLLHLSKIGEIPFIMHQEINGKIKQITIKKHTSGKWFAFVVADSAKKATTIGAQKRVGIDLGINNFVFDSDGHREDSPKTLGKSLKRLRIAQKRLSRTKKGSRNREKQKKRVARVHEKIVNQRNDFLHKLSHLYAKTYTFIAIEALNIRGMIRTSFNSRNIMDASWACFVRMLEYKAESAGAQVIKVDPRGTTQTCVECGRKEKKELWQRTHACACGFVADRDYNSALEILKRAVGQGLPEFTPAETGPLPFEAS

SEQ ID NO: 34388 - protein, 406 aa, Paenalcaligenes sp.
MKRLQAYQYELKPNGAQRRDMRRFAGACRFVFNKALAWQKDRYATDNTTRFSYTVLANFLPAWKVDKETEWLKHSPSQSLQQALKDLERAYKNFFAQRADFPRFKKKGQSDSFRYPQGCKLDQENSRVFLPKLGWVRYRNSRDVLGTVKNVTVSHKAGKWFISIQTERDVEPPVPQGTSAVGIDMGVARFATLSDGTYYAPLNSFKKHEVALRKAQQALSRKVKFSHNWKKAKVRVQRIHSRIGNARRDYLHKCSTTISQNHAMVCIEDLQVRNMSRSAAGTAGEPGRNVRAKSGLNRAILDQGWFEFRRQLDYKLAWAGGWLVAVPPHYTSQTCPECGHCSKENRSTQAAFACVQCRFEEHADVVGAINVLRAGHAQFACEVSGAVRPPAAGTHRSDSEAAQCRA

SEQ ID NO: 34389 - protein, 351 aa, Clostridiales sp.
MAESVIRTVLARYRSLGSSHKTGVLIRFSKPQYDLVWNRDYSLKGDIFSVNTLEGRKRLSFARPSSSLDGKLGTAKLVYRHGKFYLHVSVTHDAPDVSEEDISCVVGIDRGIRFLATAYDSNGDTSFFSGASVKSKRAHYIELRKELQKVGTPSSRRRLKAIGQRENRWMRDIDHCISKALTESYPEGTMFVLEDLAGIRSQTERIRGKHRYFSVSWPFYDLEQKIMYKAALKGQMVIKVDPAYTSQVCPVCGRRDKSSRDKANHLFRCHECGYTSNDDRIAAMNLHSMGMKYLVQCGKSMPLSAGAESTVPDVTPATQAMPVCVINAGGESRILQGSHKPPLQGVSLSGG

SEQ ID NO: 34390 - protein, 386 aa, unknown
  TnpB Polypeptide
MKYIRSSKCHYFKWLTADKQLAIKELLEETHRVVSWAIDKHHLSIAHCGMEKNQLTLAHNLHECESWLTERAKKNCFAEAFSLVSGTKASADELKKGYTKPTHNPNRIMLSSTNAFINLNPSLKSFDSLVGLYCFDSRVKARKIAIPLKRNDVFNSWFKKGKLATSVILTDKYIQFSFEMECEKKKTGSAVGFDPGAKTLLTTDTGEKYGTDIWRLLEKLKRKKRCSHAWYACREEISEYIDKTCKEIPFEAIKYLVLEDNRRIKNKMKRRKGKRLSKTNRSVLTGWAIGRLNLRCTLLTEENGVRFRREPAWNNSRTCPDCGCCEEANRVSQDVFVCRKCGHIWHADVVGATNTLARFALGPYGAECKPEFMEKHPGYYQLRATG

SEQ ID NO: 34391 - protein, 464 aa, unknown
  TnpB Polypeptide
MKTKETTKERDCSPYWNDYCMELNSYMWSPITTNLASSKTISDDVLSNKMLRDSWFSMELSKASNGSTYRISQQSLKNFRVEIMKEEDTESTLTKTRKIRIYPTKKQAEIFSRWFGTARFTYNKTVELLKQPGSYAAWKTIKNDLISSLPEWSVEIPYQIKSIAIRDCCKNVSNAKIKCKETGIPQTVHFKKRRDPIKSCYIPKQAITDRGLYYTLTKELKWAEDLPGDLCDARLIKYNGRYYVSVPYKATILNSENQGRIVALDPGIRNFISFYSDQFCGKIGAGDFKRIFRLCRVLDKLQSILSKPLSFYKRARIKAACGRLRWKIWDLVSELHHKAALFFVKNFDVILLPTFEVSQMVRRELRKINSKSARQMLTLGHFRFKQFIKHKAFEFGKLVVDVSEAFTSKTISWTGEIIEGLGGRRIIQSKIDRQIMDRDYNGARGIFFRALVDSPISGLDFEIN

SEQ ID NO: 34392 - protein, 503 aa, unknown
  TnpB Polypeptide
MATTRKQPIWATKPLNYCTTGKAYLTPAQDRELQHWMRMTRALWNILVDALDYRYRYNQAYKACDHVAIGAMVIPDKLLCIESVLLAPTWVNSQYKVKTAHPADIGYVQYLITCYLAQLGLSAPVSPQQQQADRSLLVAYRLVPADVLYAVGRQIANTYKAFFARVKRGKHLKYRNGGAISIIGLPQYKSRKHQRGSVTLPGEYADGRCKPLRNGNYINMPKARSSLVQLNPIKTRGLREPRGRITGVTVRYNQRRYDLILRYEGQVTQHRPTGQGIIGIDMTAQRTEVGYTCFDTPHGTAYGTLSQLRAFPNHVHALQASVSVLQSLQDTLGRRHKAYAGLGRKRRRTEAKITRIYQDYYHKLCQQLLLRYDLIVLEDLDVQSMLESAYRGLAKQIQDSRFALFRSMLAYKVYQTPHSFLGLAPQYFPSSQLCSHCGTKPDKRLTLVQKHWVCPHCNTRHQRDENAAANLRALGETQWTVMTLTPKERVQPLKDTYHYPTVQ

SEQ ID NO: 34393 - protein, 372 aa, unknown
  TnpB Polypeptide
MEYSYRFRIYPNKAQENLIQRTFGCCRFVYNYYLAKRKEVYETTKETFNYNACSADMTNLKKELEWLREVDATALQSSVRDLDTAYQNFFRRVKSGGAPGYPRFKSKRDHRKSYKSKKVGENIAVIGNSVRLPKLGLVKCRISKEVKGRILSATVSQNPSGKYFVSLCCTDVEIEPLPTTGTVCGVDLGVKDLAITSDGTKYQNNKFLYQSEKKLARLQRQLSRKTKGSKRYEKQRIKLARMHEHIANQRLNAMHEATTKLVRNYDIICIEDLNVSGMVKCHSRAKSISDASFSQFRRQLEYKAEWYGKTISVIDRFYPSSQLCSDCGYQNKLIKDTSIRDWICPVCGKYHDRDVNAAINILMKGLRLLEAS

SEQ ID NO: 34394 - protein, 430 aa, unknown
  TnpB Polypeptide
MTVFQVLARKSIKQSYCPSKEILCLMHHYRQMTNDAIRIGLANNNVSALKKLSMLSYKELKRYRNVPSCYKLCAISKAAGILASRKKSIKRGHPTKDPYLKKSIVVSCYSFKIVNGELRIPIGRGKYEFISLNAHTVKILASDPDIKVRSFTLTERSLSLCIAKEVPEITGITSAAGIDRNLRNLATGNPSRVAYYDMNKIVEIGETTKGIIKSFVRNDFRIRKRITSKYGRRKKNRTQSILNLVSNDIITFCSLNRLAIVFEDITNIRSMYGKGNYQGRKYRRMMNNNWPFTEIKRLIEYRANWQGIPVIRLTKKETRGTSLECYICGERLQEPLKSDAEHKRELWCIACKRWFDRDLVAVMNIFRRGWVRFAQSHNVKGLESEAVRGNPQTPTVILRVDSSKLGQRKEWSREFMRSSFADQRPNRTIS

SEQ ID NO: 34395 - protein, 391 aa, unknown
  TnpB Polypeptide
MKANLIELPGRDLWHLITYKFRICPTVSQEKILNETIETCRCLYNKALADRIQNHSKFYDQEKVLVVRAKKQNKHLKAVHSQVLLDALFRVDKSFKAFFAGIARFPKFKRYGRFNSFSCPQSGFKLEGNRLYLSKIGSVKIVLHRKISGVVKRVTVIRDIDQWFVALTVIEESSTLPKSPEIAVGVDSGLLNLVALSDGTIIENPRTLKQSVERIKSLQRQLSRKKKGSHNREKARIGLAKAWRKVRRQRDDFSHKLSHKFSAENNVVVFEDLKISNLVRNHNLASAIMDATWGKLRVMTAYKAERRGGRVVLVTPYGSSQKCSRCDWISPTKLTLKDRVFHCLNCGLILDRDVNAAGNILKAGLEQSLAETEPLLIRRISKFQSRKQRSP

SEQ ID NO: 34396 - protein, 456 aa, unknown
  TnpB Polypeptide
MSQICKQYEVKIDISHLNSQTVNHLNGLFREAKWYYNSVIGSRNISELSNDYYKISQVSVKVTDHFEARNLDHLSSQMKQELVDRTKDSLKALLRLKKNGRRVGALKFKSYVNSIPLKQYHNTWWIMDKNHIHIQNIKQKLRVKGLSQLPKEAEITSAVLIRKHGDFYLHVTTYQTPRRQKLDKDKESNFSRNQSSNPAKRSTGIDLGIRNQITLSDGIRINYEIPVTKKIKRLQRELSRRQERSNNWYNSKDKLNKEYEKTVNQKKDIRNKLIHKLTETYSIICCQDDPIKVWMKNYGSKILNTGLGGLTSALKQKTHTPILVPRFYPSTQKCSNCNAINKIERGRSVYHCPTCDLVLDRDVNGSRSIKKEGLKMLGNEVAVPTEGLTRRELTPVDTSASTLTHNEALVEYFKNIPRVRASVVEEAGSPLKAMIVMTLNEAHNDIAAVGSSQSSF

SEQ ID NO: 34397 - protein, 404 aa, Methylophilaceae sp.
LTYCKYNLYVIRDQSSYLPNKVQAEKLAKAFGSARWYWNNSLAETQKVYQETGKGLGQYQLNARLPQLKSEIDWLSETHSKVLQSVGLYHSRAFVNFFERRAKYPQFKSKQRKQSIQYPQGVKIVDDCKVFLPKIGYIKSVLHREIVGSIKTVTVSKDPSGKYFASILTENDEVAPDVSLNGKILGVNVGLTDLAVTSDGSKFNDPKHLLKAQKNLDRKQQHLSKKVKDSNTRNKARLLVAKAHERVANAPKDYLHKLSKRLVDENQVIAVEDLHVKGMMKNHNLASAIGDAGWGAFTSMLKYKTARQGRGYIEVNRFFASSKTYSCCLHAQAAMPLDIRMWTCDKFSTKHDRDISASINICNESQRMMAAGMVATANGGTVSQGTGRKSSVLDRANEAGSPCL

SEQ ID NO: 34398 - protein, 400 aa, Bacillus sp.
LLAVVGAPLEMLKQYIETQGQNEWEVMTMLLNQKYEIFPTEAQKEMLDRWLQYCRQTYNSALLDKERKYKQNKENYDRYDMQRQLTLDKKAYPFLKEMPSQPLQEVFSRLKKAFDHFFRKDAKYPKQKKYKDYNSMTFPQFGFKSYGKHRYAMSFSDHDKLYNKKLGEIDILLHRPLEGTIKQFILKRQGKRWYAIFSVERQVVPSDIDTNRAIGIDVGLHKYAVLSNGSEFENPRFLREKEKQLQKAGRKLSKKKKGSANFIKQAQRVRKLHEKVANQRRDFLHKLSYNLAKEYSVIVVENLNIRNMVKNRKLSKSISDAGWGMFRNMLAYKCENNGGILIKVEPKYTSQDCSVCGNRVKKSLSIRTHICTKCGMILDRDYNASRNILQKGLEELLATN

SEQ ID NO: 34399 - protein, 669 aa, Micromonospora sp.
VLVVLDRWWVVEPVSGKLRLGEGETVRTACARAVLRTGVDEATGEVLSAAVLAQRVGWCADLVAGMVAALIGEHWNTADVEVLAAGVDAGGRRLPSNAWMALRRLGWTVAPPGGVRVNDRVVRMAQEQAGRVLRSAVWRAEVTAGVLSTWPADPRQRTPAEWDQVRKAIPGGQHLPSNVIKGRTRQAVTFVKANGRLPVDVFELEGVPRIPRMLLLAACDRQQAIIERSDTDPAKALLRLQLPLRSDPQTYRDWTWVECRITLPSTVPAAAVLHLPTLRVTDGTVRADVAYTHAVPKARTTGHSVALGVDWGLNTLLSAGALRLHNTGRIMALGAGGQFRAAGVLAKQHRLRRQSERLHAKADQYLRLLGGRPDEQLSAKHEVLAGEIRHVSARRANLNDALAWAAARWTVDQAIAAAASVIYLEDLRSMETKGMGRTLNTRLTQQVRGKITDRIRHLAAEHGIAVVTVPARNTSKHCPQCLTPLRHRRAPDKPTVAGWKWAICPNQSCRWQGDRDHGAWRRIAARGLTHQGKTVIDKTSGQMVIRSVMDTLEAAAVVTPTNTGSRRDRSKTSPTRPHASRPAPRRRRAPSPTRPHSRAGKRPEGHAPTDRGLPRAAHRHQGVNTISTPTAGHRPRGAALGAGFHLHAHATPPRWETIPETPSDSRSQS

SEQ ID NO: 34400 - protein, 394 aa, Methanosarcinales sp.
VKSDSNMMLIAYKYRMYPDERQREMFLKHIGACRFVYNLSLERKIKAYETDKTTLSCYNLNAMLPDLKKEFEWLTEVNSQSLQQTNRNLDSAFTRFFREKKGFPKFKSRKNPLQTFGIPQHYKVDFDNNRVKLPKIGWIKTKLSRQFNGISKTATVSMTATGKFFISILVDDGRETPEKEPFGYDSTIGLDVGITDFVTMSDGTKIDNPKFLRGSIQRLNVLQKRVSQKKKGSKNRDKAKYQVAKQHEKITDQRKDFLHKVSSKAVSDNQAIAIETLNVAGMMKNHCLAQAIGDVSWSEFFRQLEYKCEWYGKTLLRVGQFEPSSKICSVCGSINDDLKLSDREWTCAGCGTFHDRDVNASINIKKFALQDQNLIGVIAPGGTGEEPVGDVIDG

SEQ ID NO: 34401 - protein, 266 aa, unknown
  TnpB Polypeptide
LLNVTRDSVGDLFVSFVCEVEQRVNRETVDEVLNKTENCSNIVGYDFGLNSDRFLVASNGEDVSTPLFFKESEAKLIELDKSLSSKVKGSNNYKKAKIKRAKLQRHIANQRSNFQWNLAKEQVLKADVHCFETLDLNEMKERRGGFRFGKKVSDIAMADFLAKLTQQAEKYGKYVVKVPRYFPSTQLCGKCGFRNTELKGQLQIRHWVCPNCGAEHDRDFNAAINIRNKGIEMFKEGKFEKKRKPRRSCSFKRKAGKAKIEEVRAE

SEQ ID NO: 34402 - protein, 487 aa, Streptomyces sp.
VSSVKKFRPQSGFVVQAYRYALDPNATQEAALRSHCGAARAAYNWAVAWVTASWWQRRAEESYGIPEAALTEWRPWSLPSLRKAFNEVKRTDPRFAAWWEDNSKEAYNTGLANASAAFDNYAKSKRGQRKGKRAGMPRFKSKRKARLSCRFTTGTIRVDQDGRHVTLPRLGAMRVHERTDGLRDRVSAGTARVLSATVRHERGRWFVAFQVEVKREITRVARPDVAVGIDLGVKTLAVMADSTGEIRQVPNPKYYDEAAKLLRRLSRRVSRRQGPDRRTGQKPSRRWEKANRERNRVHHRIANLRTDALHKLTTAVRAEYGTVVVEDLNVAGMLRNRRLARRIADAGFGEIRRQITYKGQRNAARTVVANRWYPSSKTCSGCGAVKAKLPLHARTYECDACGLVIDRDDNAALNLAALAAACTTGTGVAGDQDTAPVVSKPRGADQKTRTTRRSRKATAGRAGGATLPQQRQEETRDRPQAEALTLW

SEQ ID NO: 34403 - protein, 392 aa, unknown
  TnpB Polypeptide
MYLTERHIIKNNKELDELCFNSKNLYNKALYLIRQHYFETGGYLNYYDVNKLMIESKDVDYYAVSTRVSNETLRLLDRNFKSFFALLRMKQNGDCDKSIRIPRYLDKQGRYTAIFNKEAISKKYLKKGIIKLSKLSIEIPTKKANESNLVEVRVLPRNNHHVVEVVYKVEQKEPKSDNGRYASIDLGLDNLATVASNVVKPFIINGRPLKSINQYYNKEKARLQSHLKGNKKTTKRIYSISNKRNNKVKDYLHKSSRKIVNFLVSNNISTLIIGYNEEWKQNINLGRTNNQSFTNIPFYTFIKQLEYKCKLEGINVILTEESYTSKCSFLDGETLEEHENYLGKRIERGLFKSAKGKLINADLNGSLNILKKVVGEFQYPIEACSTPLRVTL

SEQ ID NO: 34404 - protein, 413 aa, unknown
  TnpB Polypeptide
MNYSHRYRAYPTQEVAKRLKHHLDVHRQLYNHVRWDYETSPADDKPSEYDQNNKLPEWKQKWPRFSELHSKAAQATVARFHRNLSTLRKKKEKGHKVGRLTRQAPAEYRSVTYNQSGFDLDEKGDHDKYASVRFSKIGWVKIRYSRPSPNRATIKEVTVKKERTGEWFVSFGLETDDADLPEKRAVDSLNTKNSVGIDLGIQNYIHTSDGKTADWLDLEDEYERLRREQRKLSRKEHGSNNYEKQRRKVAKTKRKIQRKVLDYQHKITTWLVREYDAVFVEDLDVKEMLQGDGNARSKQDAAWRRFITLLEYKGELYGTHVVQVEAAGTTKECASCGVETAKPIWVREHLCPSCGFESDRDANAAMNVIKRGFAELGLGWPEDTPVETVTATDTADFQQVSASHVLETGSLPS

SEQ ID NO: 34405 - protein, 407 aa, unknown
  TnpB Polypeptide
MKASHVITLDPTVKQAQALLRACGCARYAWNWGLAEWQRQYLAGEKPNAFKVKLALNQHRKSDLPWAYESPKNAMEGAVRDLGRAFQNFFDSLSGKRKGPRMGYPQRKRRGQRDSFYVANDKFSVRGLTAKLPVIGNVKLREPLRFAGKVLGGRVSLRAGRWFLSVQVETEIRVPNVPVGTTLGVDLNMGNISTSDGEVIDTPRSHRAVSAQLRRANRMLHRRVRGSKNRAKAKLRLARIHARIAYIRKDFLDKITTRLCRENQTVVIEDLNIAGIARCRSLARSVLDGGFGMFRHMMEYKCARFGTKLVVALRWFPSSKRCSGCGAIKRDLSLSERLYCCDLCGLTIPRDTNAAMNLMQYPRLEGNWDTQVSKTTVESRPLLDSMPCRASQLVEAVTNQCSQMSTS

SEQ ID NO: 34406 - protein, 418 aa, Sulfolobus sp.
LNKLPSLHKGGVKGAESLARGWIAPLYLNISFSKISLMARRVKAIRATVSMKIALSDSLLALVNNYVKALRFVLFWLKDNVKNPDEKGVLSKVHEELYTRLREEYNLPSKVAEDCYRDALSIYKGWYNNPRRGRFPRVYRPTVWLTPKASYNVDFDKMSVRITGVGELPILGYPRNLKEYLSWRMKEARLVIKDGRAFLKVVFEKEEANAEPKSSIAVDINMSEIVVGKDDQNYVRIPTRLDEVHHWKSLAENLQRKYPRMWRENKRILHRIHSFHQKAKRIAEDFARKVGKWVVEIARIMGANVIKLENLRNLIKNVDRLPREFHDKLYLMQYRRLQYWISWQARKHGMIVEFVNPSYSSVSCPKCGRKMVEVSHRWFKCSCGYENDRDVIAIMNLNGRGSLTLSTAPQMRNVNPNR

SEQ ID NO: 34407 - protein, 368 aa, unknown
  TnpB Polypeptide
MLSKTAGTARYCYNWGLAKWNEMYKNGEACSTCELSRIWTKERPDWAKETFRGAQTKSFMYLGTAFAKFFRKQADHPKFHKKGVKDSFYVDNDKGWLKDDWHVHLPNIGNVRMAERLRFSGKIQRFVVSKEADKWYVSITVEMPDEAFEYNASAVGIDVGSKHWAVSSDGDVLDRPKSIQKLEKSLKRAQRSLSRKRKASRNRAKARMRVARLHQRICNVKRDAVHKFTSRIAKNHGIVCCENLCVNGMGRSVKSIRKAVRNSCMAELRMMLSYKAAHYVEIDRFYPSSKRCSRCGNVKSELGLSERTYRCEACGNVLDRDLNAALNIRDEGFRIFTEGHSGSACRGRRSDLGRGLGSGASVEAGSVI

SEQ ID NO: 34408 - protein, 371 aa, unknown
  TnpB Polypeptide
MIVVERHYIDRQHQFFKQFDDLSFLSKNLYKHGNYWMRQHFFNSGSSVSSALSLKQLYAILKATADYKSLPAKISNQVLKQVVHDWEDWQNSIRADRRDSHLFLSRPNIPKYKHKTCGRNLLIYDNQSLGSRGKNKNNGLLHLSQTEMIIATKAKDVREVRIVPKTATYIVEVVSEKPVTLVDLNPKLIAGIDLGIDNLVTIAANKPTFTPTLYDGKHLKSINQGFNKRSSFLQFQLATGKYTTRQIQQITLKRNKGVENYLHQTSSRIVKQLVDAQIGQLVIGLNVGWKQNLELGKKTNQTFVAIPHAKLIETIAYKAELVGSKVTVTEESYTSKCSFLDLEPVGKQESYQGKRVFRGLFRSFHGTLINE

SEQ ID NO: 34409 - protein, 367 aa, unknown
  TnpB Polypeptide
VEKAYKYRIYPNKKQKELIAKTFGCCRFIYNVYLAKRIKIYEESKKSFSYAQCANDMKNLKTELQWLKEVDSTALQSSLKDLDSAYQNFFKERSGYPKFKSKKIHRYSYKSKCTNGNIQYCNKHIKLPKLGMVKTKNKLVPQGRILNATVSQVPSGKYYVSLCCTDVNMEPLEKTEKSVGIDLGIKEFCIMSNGEMIANPKYFKKSLDKLVKLQKELSRKSKGGSNCNKARIKVARLQEHIANQRKDFLQKLSTKIIRNNDIICLEDLQVSNMIKNHKLAMSIADASWSEFVRELEYKANWYGKQVVKVGKFFASSQICNVCGYVNKETKNLKVREWVCPCCNTHLDRDINAAINILNEGIRILEVV

SEQ ID NO: 34410 - protein, 502 aa, Caldilineaceae sp.
MPTRTAAPKSKTTEVRSERYRIRFDRRAQAALCAQIAGACRLVWNLLLADCERRYRLHKEYGKGAAIEGAVPVDKSVSFFTLGKRFTDLRSRPDAAWVRAFLGSPWGRRYRDMDLSWLGDLPYAPLRYTAKYLADAYTRFFEAWAAAKFQGQSLGVRKSDGKPKGFPKYKAKFDRDDGFTIPDGVRMDGDRLHIPKVGWVRLEGSGLYRGCKAKQVRIRKEGTEEHPKWYAYVFHEVPADRLKQPAWTGAVGVDRNVGQATDSEGEVYEVPDDPKLDANIKRKQRSAAKARARSKANGQPMSNRGRRICGQLKKRQRKKKRRRENANHQASRKLADTAHTVVLEDLNTKAMTRSAKGTVEEPGKNVKPKAGLNRGILNTGWGQLERNLDYKAGNVVNVDAAYTSQTCSSCGHVGQENRRTQATFKCVACGYKANADHNAALNILARGLALLPKARGNGASARREALGPCLLPLAMDKSTSVTREQGMPTAQGPPGSGAWSSM

SEQ ID NO: 34411 - protein, 524 aa, Massilia sp.
MCPIVIMETECARARLSSCWESRSIRCSGASAKIGLSRLPAPPKTGAATWIASQADCMACASTAASCARLRRAAMLLAHRIRIDATAEQRDYFARAAGTARRVWNWALAEWNRQAACGLRPNAMALKKAFNHIKYSDPDWLDADGKPWLRAIHRDAHAQPFANLAKAWSRYFEQRRAGQSAHAPRFKKKGRSAESFYLANDKFRLEGRSAVLPKVGRVVLREALRWAGKIMGASVSREAGHWYLAVQVDVPDHLARRRRTGDAVTGVDLGVTSAATLSSGEKIAAPRPLKAALRRLRIRSRRQSRKLEAAKAAAGIVGRIVKGTRLPASKNRTKGALALARLQARIARVRRDFTHKLTTRLCRENQALAIEDLNVRGMLANARLARAISDVGFYEFRRQLTYKSGRYGTHIVLADRWYPSSKLCSGCGTRNAELALGERAWTCAGCGARHDRDVNAAINLQRLATGALAARTALPEASQAVTRGTPAGLMPAGGGEVTPVRHEHGQRDGSGQEEYAVHICTRNR

SEQ ID NO: 34412 - protein, 449 aa, Massilia sp.
MLLAHRIRLAPTPAQRDYFVRAAGTARRVWNWALAEWNRQVAAGMKPNAMALKRQFNSIKYSDPDWQDADGQPWLRTIHRDAHAQPFANLAKAWTHYFKQRRAGQHAHRPRFKKKGRCRDAFYLANDKFRLEGMVAVLSKVGRVLLCEHLRWPGKIIGASVGRCADHWYLSVQVDVPDHVAHLRRMADGVTGVDLGVSAAATLSNGEKITAPRPLAAALRRLRIRSRRLSRKLETAKANAGIKGQIPKGTRLPVSKNQTCGTRALARLHARIARVRADFMHKLTARLCRENQAVVIEDLNVRGMLANARLARAISDIGFYEFRRQLQYKAVRYGTQLVLADRWYPSSKLCSACGAKYSALGLGERVWACTTCDAHHDRDVNAAINLQRLATGVLAAQSALPVASSAVTPGTAAGNGPAGGGKVTPARHEHGQQDGSGQEENGVHLCPPS

SEQ ID NO: 34413 - protein, 389 aa, unknown
  TnpB Polypeptide
MLIQKGFKYRLKPTKEQKQMLLQHGGNARFVYNYFLKQNIDYYKETKKFKFYHELATPLPKLKQEFPFLKESFSQSLQMVTRHLDKALKDSFKKEKGFPSFKKKHFLNDSFTCPQKYRLGNGFVFIPKIGEVKWIKHRPLQGKPKSITISQDGNNWYCSVLCEHEIKEQEKKSDNIVGCDVGLKNFLTLSDKTVINNPKHLKKYEGKLASEQRRLSKKQKGSKNRFKQRMKVRKIHSKIKNIRQDFLHKTTSNMIAKYDGIVLEDLNVKGMMKNHNLAKSISDVSWSEFKRQLKYKSKWNFKHFIIIDRFTPTSKTCSNCGCIQDMALSKRQYNCPDCGISINRDLNASINIKNLGLNEINTEGRSGINACGVETVVSTVKQEKECLVD

SEQ ID NO: 34414 - protein, 447 aa, unknown
  TnpB Polypeptide
MEKYIACVNSLVSLHLSGVSIQKFTSKDVVAELPSTVKSQAIRDAKSVLQRYAKKQRKVERRRAWFAEQGKTPKRPIHDVKVPVLRKPVLFVNNQNFKIDLDAKTVSFPLFHDGETKRRTVQKVIRVANLTPRQREILTKTPHLTTLRIVRRGNATLAQLGYTVEEPKPAELANLLADPNTLIMGVDLGIKCPAVSYSTDGTVRFFGNGRENRYKRRKFYARRKKLQKAKKLRAIKRVSDKDARFMKERDHQVSRAIVNEAIRQGAKVIALENLDGIRKGCTWSTKSSLTRKSRKNVDKPKVDAVSESVKNVTDAGANAGEPAQFDLFSEPETLTKKERRKKRKLSKKQIAARRKNNRSLNSWSFYRLTKYIEYKASLAGIRLVHVNPYKTSQRCPVCGSEHKAHDRRYECACGFHAHRDIVGAINIAKNALNSNKTGCAGDEKETA

SEQ ID NO: 34415 - protein, 413 aa, unknown
  TnpB Polypeptide
MPYLGMTNSLVLALLVTAMRSVRQKHQASLELLWLLDEFRRMVNVCIAVGIEENVSSLKTLSSKSYHRLSREMLGYYRLGAISKATVILHNHRKAKKKNPRTRTPYARKLALTACYGFKIKDGLLRLPVKPRQYTYVKLNRHSLQVLSGLSVRSVTLTPDSLSLTYSKETIEVKPEGYLGVDRNLDNVTIASTDKAVRTFDLSTATRIKSDYRNVKSRFKRNDARIRTRVFYKYGRNQLNRIQPILHSVSKSIVDEARTRRYGIVMEKLTGIRKLYRRGNGQSRNYRARMNSWSYGELQRQIEYKARWEGVKVIYVPARNTSKRCSICGYKTLESTRRRLWCPHCGAILDRDENAARNIAARGLRFSPNGPPGEAMVEEREQENATLILTVDGGKLSQQTNDNPSDEDLTEPE

SEQ ID NO: 34416 - protein, 255 aa, Enterococcus sp.
MQKESLKEMFNESSSLWRTLSKEDNCRQKLSYKPVQKKISVRDNCIYIRKTGLVKMKPAQKITGKVIRISIIREEMDNYSLSVLYCQKERHLVENHSSVIITRTKSGSFYLSNGVYIDKEKLEYQYTRRLKYEMARQEKLKDYCTMKQVNLNQAKNYQKQRQKVIRLQNKLYQKREDYLHKLTTQLVKKYQFIVVPNYGEARFLCDSFWLNFIEKLSYKCKGYGRTLQLIRLSKEEMHLSHIQQVVCITQQLKKV

SEQ ID NO: 34417 - protein, 408 aa, Colwellia sp.
MKKTLRYNYRLKPTAAQEAKFVEFGSYARGLWNLLLSENMRRYRYDKTFLFYNEMARLIRELKKFDEFAWLKAFDSAASQQVARDLDLALKNSFAKGRVQRFPTFKVSFKQKKRHDDSFRCVNNSNCVRIEKGAISLPKVGKVPLILHRDLASKIKTATIQFKHGKWYISLTQEVECKSAKQVLSTLVGYDINSQYTVVGSNGWYVKNPKAFKKASVKLKQIQVQLSRRKKGSIRWQKTKARLNKLHGKISRQRLAFAHEVSCSIAKTSDIIVFEDLNVKGMQQFNGQMVNDNVMGMITGLAKYKAELNGAVYHEIGRFVKSSGICHECKHEHKFDLSVREFSCESCGLVQCRDLAAAKSVADTGEKDLMATGIVVRALPKFQQKSPSKTKVFEQSKFGVETEKKEAA

SEQ ID NO: 34418 - protein, 410 aa, Hydrococcus sp.
MIVLEYKVKGKESQFFAIDEGIRTAQFIRNKALRLWEDEDKIGKYDLNKYCAKLAKQFPFASKLNSEARQVSAERAWSAIARFYDNCKRKISGKKGYPKYKKHSRSIEYRTSGWKLDSNTKKHITFTDKLGIGRLKLMGSRDIYFYNEDDIKRVRLVKRADGYYCQFSINVDVRLETTPTANSIGLDVGIKEFYADSNGHTEPNPKFYRKAENSLNRANRKKSKKYSKERKKAKQKQSNNYHKARNRYALKHLRVSRQRIEYAKRLAYYVIQSNDLVAYEDLNVLGMIRNRKLAKSISDVAWSTFRCWLEYFGYKYGKVTVAVPPHNTSQNCSNCGEKVQKSLSTRTHICQECGYVEDRDVNAAINILRLGLTTTGHVGCQAWGEGTSTLIGESLSEQVSSVNQESHGAA

SEQ ID NO: 34419 - protein, 407 aa, unknown
  TnpB Polypeptide
MVLVEKHIIKPSHQYYDELDHLCLLSKNLYNSTLYTVRQYYFANKQFFNYQAVNKLFVSGNQPDYRALPAKVAKHTQMLVDRNFKSFFALLELKAQGKYNKPIKIPRYLKKTGKQVAHYEKGALSFKKQGFIQLSKTNIKIKTGLTKEAVQFVRLVPRNNYIAVDIGYNVKEPEQKINNNVLAIDIGINNIASCVTTDGDKLLVNGKPLKYINHNYNKAVADAKSNLKSTHNKNSSKYISQIINKRNNRINDYLHKITTYIVNHAVSKNIGTIVVGYNKEWKQDTNMGKVNNQNFVHIPFYRLINLLEYKCRLKGITFQTITESYTSKCSFVDNEEIKKHTTYSGKRISREWFKTKDGLIINADINGAYNILKKYMQKNATWNESLSQTLVKVCSVPSVRKVNIRLS

SEQ ID NO: 34420 - protein, 426 aa, Halogeometricum sp.
MHYNYRLDPPKALIETLLHHVDTCRQLYNHVLYKLNEVDEIPARYEVQGQLPDLKTWWDDLGNVHSKVLQMVVKRVYDNLSTLKAQKENGRTVGMLKWKPPRDYRSLTYNQSGFKLKNTSGRPVLWLSKIGEVPIHLHRDIPENATIKQVTVKQEPTGEWFATFGIDVDEDTPEKPETPEKVVGVDVGILRYAHDTDGYAIESPDFTNERERLERAQRDLSRKEHGSNNWEKQRKVVAERHADLKRKRRDFLHKLSNYYATEYDLVAVEDLDAKGLVELPGNSRNRAGAAWGTFLRMLEYKCECKGTHFIAVNPRGTTKECASCGTETDKPLWVREHSCPSCGFEADRDANAAWNILSRSLKDVGVGHSESTSSETPRVSDVRTRAKLSSTPVETTLPVDTPVSAKRIVETGSHTLKERTASAVSE

SEQ ID NO: 34421 - protein, 800 aa, unknown
  TnpB Polypeptide
MRTIIRITKSELRVLFFSPIAWLILIVFSFQVGMAYSDALALQLRNQELGYRVFAVTLSLFSGYSGILSNLLENLYLYIPLFTMGLMSRELSSGSIKLLYSSPVSNLQIILGKFLAVVVYALLLCVILMGPLISTCVSVQAPDVLLMLTGVLGVFLTVLAYGAIGLFMSTITKYQVVAVVGTLAILAILNFIGGVGQEYDFVRDITYWLAISGRSKVFIDGMISSKDTLYFILVIFMFLGFSVIKLQGERLRLNKWKTSLKYGFVLLITLTLGYISSLPKFSIYYDSTATKINTLTEESQQILEQLKGDLSITTYVNYLDETYDRGAPRNRIDDIAQFEQYLRFKPEIKLEYVYYYAKGYMPYARADYDTMTLEQIVEDKCRYSGYNPKRFLSLDEVLKKDDISGENGRFARVITAANGKKAILRIYQDNSIYPYEAQISTALKTLLQEAPVVGFVTGHKERSGMDLGEKGYGTFASNKTFRYSLINSGFGIREISLGQPVPEDIDIVVLADMRSGLTEEEFRNFDAYLARGGNLFILGEPKRQKFMNPVVEKLGLRFADGIIVSPSEIHLDDIVAADIKEGAAMVSENYIKYFRRGYSIITPSACAVEIIDTTKGFKITEVLASASKGSWIEKETTDFINEKSVLNPDAGEVERSNSIMLYLTRLVKNKEQRIMKDIDHKISREIVNTAKKHKAKVIKLERLENIRSTTRTSRKNNPSLHTWSFYRLAQYIEYKAKLAGIEVEYVYPAYTSQKCPQCGNIHHAKDRKYICKCGYHTHRDLLGAINICNSTEYIGNRCIA

SEQ ID NO: 34422 - protein, 367 aa, unknown
  TnpB Polypeptide
MKIRLKPTKEQEELFIKSCGAKRFAYNWGLERFIQIKKDNETYNKYRLKKEFNQYKKQFNWIKEVSSDVTAMAFTNLDNAINNYFNKITKFPKFKSKKHSKQSFYVRYDRLYFKNGKVQMCKIGEVVYHSDRKIPKLNTYINPVCSFDGKYWYLSFGYEIENQEFEHSNVSIGVDVGVKELAVISDGSIYHGVNKTQKVKKINKRIKRKQKQLARKYEANKLGLNKYVDTKNILKLNKEIKLLNRKLTNIRFNYIHHLTSDLVKKLPKRIVIEDLIITEMTKNKYLAKQIKSQNLFEFINQITYKCDKYGIELVKANKWYPSSKLCCVCGKKNNKLKLSDRVYKCECGNVIDRDLNAAINLSKYTLN

SEQ ID NO: 34423 - protein, 225 aa, Lachnospiraceae sp.
MKYKIQYVYVQEEEPQTLDNAKALGIDLGVDNLVTCVPSDGTPFIIDGRKLKSYNRYWNKKKAYYQSIADHQKINGVTKRIALLNFKRNNKVKDCIRKSARCIVNYCISNDIGTIVVGYNEDFKRNANLGQRNNQNFVQLPLGDLRQSLQYLCERYNIQYTEQPYTGTFSGKRVYRGLYKSSDGTLLNADVNGAANILRKAKVNGCDISLPSSGCLAHPLRIKLA

SEQ ID NO: 34424 - protein, 460 aa, Psychrobacter sp.
LQQISLNASIISIISNTYSLIKKAFMKLNKAYKFRLEPTIEQEIILNNLVGSARFVWNHMLAISFEMFAKNEFINATNLVNKIAGLKNNPDFAFLKSSSNAVTLQQKVRDLASAWSRFFDPKVHARLKENKKKPKKPKFFKLADGTEIQLRPLMPQFKRKADGCDSIRLVQFDKYCRIEGNRVKLPNGIGLVKFRKSQDIIGTIKNVTISKKSGHWYVSFGCERELAQNPRHPSKSAIGLDMGITKLLTTSNGETLKPKNSFKANQVKLAKLQRGLAKKVTFSENWKKHNRKIQKLHHHIANIRHDYLHKLTTSISKNHAMIACEDLKVANMSTSASGSMENKGRHVKAKSGLNKSILDQGWGMMIDMLEYKQQWRGGLLIKVNPRYTSQTCYQCKHIAKDNRQTQSKFECVKCGYKANADINAAKNILSAGHAVLSAEGGCSQGHPMKQKTCDGREKVA

SEQ ID NO: 34425 - protein, 379 aa, Kandleria sp.
MEQMTITAKVQIVATDTDKVLLDETMSVYRDACNYVSDYVFQTHDLKQFSLNKALYSTLREKFGLKSQMAQSVLKTVIARYKTILENQKEWIQPGFKKPQYDLVWNRDYSLSENRFSVNTLNGRVKLSYFTEGMSKYFDHTIYKFGTARLTNKHGKYYLHIPVTFDVEESNISDICNVVGIDRGINFVVATYDSKHKSGFVSGKAIKQRRASYSKLRKELQMRQTPSARRRLKAIGQRENRWMQDVNHCVSKALVESNPKHTLFVLEDLTGVRNATERVRTKNRYVSVSWAFYDLEQKLIYKAKQNQSSVIKVDPRYTSQCCPLCGHTEKANRNKKIHLFACKNCGYKSNDDRIGAMNLYRMGISYLADSQVPDTVAAE

SEQ ID NO: 34426 - protein, 250 aa, Sharpea sp.
MVNGKSKRLSVKTKMSDKQKSVFANSKLGTMRIVYKGNKIVAQVVYETIEPTYTTEGNVMGVDLGVKCPAVSYISDGSVKFYGNGRKNKYMRRHYRCLRKKLQKAKHIDAVKRINDKEQRIMKDIDHKLSHDVVETAVAHNVKTIKLERLANIRSTTRTSRKNNHSLHNWSFYRLAQFIEYKAKMAGIAVEHVNPAYTSQTCPVCGHVHHANDRNYTCKCGFHIHRDILGAMNICNSTEYVGDSNIRHTA

SEQ ID NO: 34427 - protein, 426 aa, unknown
  TnpB Polypeptide
MLVTRGYKYELKVNNKERTLLGKCAGISRFAWNWGLAAQKSRYQTQTGVTRFTNAMKQHKELNRLKHTDFPWMYEVSKCIPQEALRDLDRAYQNFFTNHQQRKRKQTIRYVGLPRFKKKGKCKDSFRLTGVIHLFPEVKQVQFPRLGKLRIKERSNFPLSARILSVTISRTADRWYVALTVKEEQSDCKPNGGPIIALDKGLSVFAALSSGIPIARPRFLLQQARKQRRLSKAHSRKQKGSNNKRKSALRLAQFYRRITNQRHNFLHQTSTYLAKNHSVIVTEDLHVKGLMQNKKLSKYWGDLSHGLFQRLLAYKAPLYGSTLIEIDRWFPSSKLCSNCMYYHRNLTLADRVFHCPLCGLVLDRDQNAAFNVANYYTIYQFLLFPVAESSAETLNACGEVVRPAFKQARVVESGRTAPKTVGNDYP

SEQ ID NO: 34428 - protein, 162 aa, unknown
  TnpB Polypeptide
VSQKKRSKQQDCLHKASHLIAHTLVERTVVIGDLSQWQIVTKEHKERNKHLNRAVFNDWGLYTFVQMLTYKCALYGKELVIVDERDTSKTCSGCGHMQAMPLWKRTYRCKECGLIMDRDENSAVNILMRFLARLWATQGADLPAVCGGFHRNGYVLHTFEHI

SEQ ID NO: 34429 - protein, 407 aa, Nonomuraea sp.
MRPAKILGVRTAYKCRAYPSPEQAAVLNRTFGCVRVVWNQTLAWRHQRWHQERVSTNVPQANAFLTQLKRSEEFAWLNEVSSVPLQQVLRTQQRAYANFFAGRARYPRFKSRTGRQSAEYTRSGFRWREGRLFLAKTDAPLEFVWSWPEVDPASIDPSTVTVSRDPCGRWHVSFAVEVADPDQAPATGAVVGVDLGVKDFAVTSGGDKIANPRKLAKRERNLARYQRRMARKQRGSNNRKKAKAKVARAHRKIRASRADFLHKTSTRLVRDHDVIVIEDLNINGMVRNRSLAKAISDSGWGAFRRMLEYKTAKYGRHLVVIDRWYPSSKTCSACGHLLAELSLKTRHWTCPGCGTRHDRDVNAAKNILAAGLAVSACGGDVRHSESSRVQSPVKQEPQPVKVGIPRL

SEQ ID NO: 34430 - protein, 216 aa, Ruminococcaceae sp.
MRADGTVLGRRFINHPSEKDWMYRTLGRIRKFQREHGSAQSRGRWAYTKRLNIELGKKIAGAIIRYAEENHADVIVFEYLEMQGKISGEKKQKLHLWRKRDIQKRCEHQAHRKGMRVSRVCAWDTSRLAYDGSGRVSRDPKNHSLCVFQTGKRYNCDLSASYNIGARYFIRELLKPLPATERSLLEAKVPSVKRRISCVYADLGELFLEMELLRAA

SEQ ID NO: 34431 - protein, 522 aa, Nostocales sp.
MRAKSKASKTQQGKGCTMSNHTSEVIQIELPLFAIAESVQQNNAMTSTDRSPICNPSTQTQKSSKISGQDSTLKEKVCAPYWTDFCKGISSSLLLPVGIDSQDLDLNLYNTWSSKTVDKSWFSTKLYTVHNQNSLRIYSQSFTSFPVECTDSENTLKKSKKIYLELTPSQKRKIKYWFGVSRFVYNETIRYLQTPETKANWKGIKTGIIQQLPEWCKDAPYQIKSIAIKDACQAVKNAKKKYIDGGGISRCRFRTKKDPVQSCYIPKSAVKDAGIYHTVLGGLEYKEPLPDGFGDCRLVSFYGDYYICLPIENPRHRTENQGRVVALDPGIRNFLTFFSDKRFGWLGENANLKIQKLCFKLDKLISKISKAKSKQKKRLKNAATRLRGKIKYLVDELHKKTARFLIDNFDVILLPTFETSVMSRKAKRRIRSKSVRQMLTLSHYKFKQFIKHKAHEFNKIVVDVNEAYTSKTVSWTGEIINNLGGAKTIKSRIDGKTMNRDLNGARGIYLCAIAHATRTCIG

SEQ ID NO: 34432 - protein, 397 aa, Oscillatoria sp.
MIVLEFKLKGKSQQYRIVDEMIRTAQFIRNKALRYWMDNQNVKLSDLYKQCAVLAKEFEWAGKLNSMARQASAERAIFAIQRFFANCKANKPGKKGYPRFKKGTRSVEYKTSGWKLSPDKRSLTFTDGFAAGTFKLVGSRDLHFYAPDEIKRVRVIGRADGYYAQFCISVERTEEVIPTGKAIGIDVGLNHFLTDSTGATVSNPRHLRKSEKGLKRAQKRVSSKKKGSANQKKAINRLGRKHLKVSRQRKDFAIKTALCVVKSSDFVAYEDLQVRNMVKNHKLAKSISDAAWSQFARWLQYLGKVYGKTVVAVAPQYTSQDCSTCGNTVKKSLSVRTHICGCGTVLDRDHNAALNILAKVLRQAGINLNTLGHREINAWGQSDLYSLVVTSMSKLTG

SEQ ID NO: 34433 - protein, 165 aa, unknown
  TnpB Polypeptide
MYKRVERLRHLYITAIRFLADELYRRDVRKLYIGYPIMLSQDNGNEYNTNIWWYRKIVLWIVDIFMEYGIEVEIVPEDYTSKQCSICGNKHKNGRKHRGLYECKKTGKKINADINAALNIARRLGYRIEISRKIESYSITHNGVKPLIPNHGANTRDPEIRNSAP

SEQ ID NO: 34434 - protein, 284 aa, Cyanobacteria sp.
LERYLKGDSKSSCSGKPRFKSLSRYRTFTFAQLKQDCLQGKFIKLPKLGNLKLIKHRSVPDGFKLKTASITRKRNGYYLSLSIECENVANGSPDPDWSKTVGVDVGLKDFLTRSKGETVAIPQCYRKAERKLKRLQLRVSRKKKDSNNRKKAVHRLAKQHKKVADTRKDFHFKTSKWLLDNYDVVAHEDLNVRGLANSRLSGLLSVAVNPNSTSQICSNCGANVPKQLSDRWHWCPHCHYEADRDVNAAVNIKTLAEGHPVHQACGERRDGGSKKQEALSIAEA

SEQ ID NO: 34435 - protein, 486 aa, Mycobacterium sp.
MARFEIPHGWTAQAYRFALDPTPTQLQALASHAGAARFAHNHMLALVKAVMDQRAAERSYGIGEDQLTPVLGWSLPALRKVWNQRKPSCAPWWGENSKEAYNTGLDGLARALEAWLSSRRGQRAGRVVGFPRFKSARAPKSVRFTTGAIRIEADRRHVTLPRLGAIRTHESTRKLARRIEAGTARILSSTVRQDSAGRWYCSLQTIVAAKTRPAHAARSVHAVVGVDVGVKADRLLVIATPDGTEVDRIPAPKSLSTAQSRLRALQRQAARRRGPHDAATRTRQQPSKRWRRTQARIGRTHAHAAAVRRDVLHKATTALAQRHDVVVVETLNAAGMRAAGGARKRGLNRALADAALAEIRRMLSYKSRWYGSQLVQADRFYPSSKTCTGCGRRKSNLTLADQVFECDECGIRIDRDLGAAINLARLGVPTPVGEQSPAGSGPVAGRGATRETEPAPAGDAAGDEASTPHHQQVDQTGTASPQGEAA

SEQ ID NO: 34436 - protein, 349 aa, Deinococcus sp.
MDEAVRTARFVRNACLRFWMNGEKVSKNAIDKHTMKLRAEYKWAKKLNSTACKRRAWAAMSRFYDNCKKGVKPVGHPRLKKSVRSVEFKQSVWEPDAANKRLTQTDGFRVGDVKRKGTRNLILHRLEDIKGLWVVKRADGYCALFLVDVERLFNLEASGKATRLDVWLKAFNTDAEGNDEPNPHFYRKAQQLPKKLQRRVSRKGKGSNNRKKALAKLAVFRFKVSRQRKGHAVKLVWCAVASHDVVASEELKVRNMTRNLKLSKSIGDTSWREFRQWVKYIARVMGKIAIPVNPAYTSQIRSARHKHHIEAAAHRCADRSGQPPRFWQPARAARRQFLPPRPRADPAHQ

SEQ ID NO: 34437 - protein, 308 aa, Methanohalophilus sp.
MLSAYKYRMYPTKEQEEKFFQHFGACRFIYNWALEQKIKSYEQDGKSISRFDLNKGITILKRDGEHEWLKDVNSQSLQGATLNLDNAFTRFFRENRSFPKFKSKKNPVQAYSVPQNYKVDFENNKIYIPKIGSVKTILHRHYGDGDLKTATVSRTSTGKYYISILVDDSRKIPEKAEISENNTVGVDVGIKDFAITSNGNKIDNPRHLKNSMKRLKVLSKRLSRKQKGSKNRKKARQKIAKIYEKISNQRHDFQHKVSTKLISENQAVALETLNVSGMLKNHNLAQHIADASWSSFVTKLEYKAEWYG

SEQ ID NO: 34438 - protein, 373 aa, Tissierella sp.
MLRAYKYRIYPDETQKVQLAKTFGCARFVYNYYLDKKIKGYENGEKSISKIDCNNHLNRELKKELIWLKEVDKFALTNAIYNLDEAYQNFFRRVKTGKDKAGFPKFKSRHSNRFSYKSNSTNNNIEVDYAKNKIKLPKLKWCDAKVHREFDGEIKSATISQNPSERYFVSILVDEKIKELPKTNKEIGFDLGLSQFLIENNGNKIPNPKHLSKNERKLAKLQRQLAKKQKSSKNRNKMRIKVARLHEKITDTRKDFLHKLSSQIINENQVIVSEDINISGIIKNQRLAKAISDASWSEFTRQLEYKAAWYGRTYIKIDRFYPSSQICSNCGFKNIELKNLKIRDWTCESCGSHHDRDINASQNILKEGKRMLA

SEQ ID NO: 34439 - protein, 378 aa, Ferrimicrobium sp.
MMSSFIELLASRAIYTRAKDDEAELTRLYTLLQQGEWTQENFLHRQMRKHFKHGHSKVNNQFIVRPDKYHTEIVDGQLVVVIKIAAKYGQPIRLVTTTNGKSVDPSGKNIRIIVKDNVTEIHYAFKKPLGRPRGTEVIAVDKGYTEAFVDSDGEVHGVGLGEIMTEYSDKASKTGQARNRLYALEQKHREAGRTAKADRIKTNNLGTKKINARKDKVQKRIRNNAFRAAHSVVDKASLVISEDLSRPIAKRRPWKKYNRRMSALARGTLAEALESTTQQRKARHVLVNAAYTSQMDSNTHLLEGKREADKFYCANGDVLQADFNAALNLLHRYSDQEITLYTPHKEVRRVLLARSSGATERQGARVARDQNLLSTVCG

SEQ ID NO: 34440 - protein, 421 aa, unknown
  TnpB Polypeptide
MKKYFIIIPILALVYFLSGKDNSSIKTENKRIETDNLIVNMTNYGMENILLSEYLNGVIACEMPALFHDEAIKAGIVAARTFYLYKYESDKDYKPSNGDQCFFSESKRKENWKDNYELYNEKILNNINLTKNEVITYNGSVIKAFYFSMSNGYTEDAVNVFKKSEPYLVSVISVFDKDVKNNLSSKSISVNEFKEKLNVDNDMLTYRSTQKDIVFKMQFHKYKDELYARVNEKHNSPNKAVAYELMDYGEYFIVKAIFEKHMNLPKTNILYGAIGIDINVDHIALCETNMDGNIVLIKKYPIHKENTKNKRNEELYQLAIEIMEFCKSKKKSLVVEDLNFKQLKTRMLYRPKKQNKTLSSFAYKKILEKVERKCLMNEVDVIKVDPKNTSKIGKEKYTKIKGLSVHYCAAYVINRRGDVSI

SEQ ID NO: 34441 - protein, 460 aa, unknown
  TnpB Polypeptide
MPKVGIFLPSLPQKGGRCMKLSMTYRVRTKGFNHIFDKTVRLYRQAVSFFVDVCLKEWNLISTGKLQKKRVNLVESLTVRTRQNPAVPYDFSAKFYKFPSYLRRAAIAEALGKASSYRSNLANWEAAEPEKRGEKPSLPQVGYVYPAMYRSGMFVRTGMYQAALKVFIRNTWDWVLVDLRKSDVDYIEHHCANYKECVPTLQKRGKKWFLDFAFQTAVKLPDTDIRNTCILAVDLGLNSACTCSIMTPEGAVLGREFLSLPGEYDSLEHAVSHIKHAQKLCARKTPGLWKQAKGINDDIAVKTARFIVDTAVKYDANCIVMEYLDLGGRKRGSKKQRLHLWRAKYVQAMVTDKAHRNMIRTARVCAWNTSRLAFDGSGRVMRGKEADLPSYSLCRFPTGKQYNCDLNASYNIGSRYFIRELLKALPVTAGQAVAAKVPELAHRSQCTLSSLIKLRAVLAA

SEQ ID NO: 34442 - protein, 568 aa, unknown
  TnpB Polypeptide
MKKHKKNKKNPVVPDGDIKYTVCGEWFPLFWDYYPDPYSKEDETPLDTEMRLFCSCTRWAFNRLLEGIGTTEIERGGQEKFALNGRYVKDAVAKADWIVSSQKELLALEIEETETKLSRARKKLGWAEKDLDGAIKKNDPVKIEKFKRSVHGRKARVKKLADKLNKLQAHQNNGIIPTVVFGGRSLWKKVCKGRISNGEWRQSRQDRLYSRGEESKGGNQNIKVSWHDGEFTLSVAISHLSKQKGVDSKGRPIMTRAPRVKGKLWLPEKHRLKVWELLLSGAPYTVELIKGRDGRYRAHFTFTVAAPDLVTNSNRGYLGMDTNPDGVALANVGCTGRPEPWPEDFEVPYPKALHKFDGEFQVTVHPNGFLYVKVPELAYSRGFRRTHLIGVLAKVVVDIAKALGKPIALESLDFGKDRLDTNRKFNRMAANFPFKKMTEAVIRRAFKEGVGVKHVWPAHTSTIGYYKYMERYGIIIHHAAALVIARRAIGFRERITNELKQKVQVLKEKLDQKVKSLPGEGKGMTRKVRQLFKRLDGKVSVHNGLTRLKQESFYSVWRDLKQLVLLSR

SEQ ID NO: 34443 - protein, 256 aa, Trichococcus sp.
VKCGFFLNGFEEYFDGTWAFGLAKLVKSGKHWFLHISVKKEIAEIELTDVKHVVGIDRGLRQLVTTYDEKDKTTFFNGNAVLKKRRHYKELRRSLQARNTRNSKRRIRKMESRENHWMADVNHCLSKTLVFLYGSDTVFVLEDLIGVRFATEQVAKSQRYEHVSWAFFQFGQMLTYKANKVGSMVVEVSAAYTSQRCPKCGTIKKSNRDTHNHEYHCPCGYRSNDDRVAAMNIQQLGTQYVSGVENPKFEKQKANS

SEQ ID NO: 34444 - protein, 346 aa, unknown
  TnpB Polypeptide
MAYAGNKVNLTCFELIKQLPELKKELPWLKDCNSQSLQAPIRNLDNAFTKFFKGQADFPVFKKKSNKGSFNIPQNVILSDEVLVIPKFREGIKIKIHRDYYGKIKSATISYTSTGKYFVSILCDTEEEKPSKPKITEESSVGIDLGIKDFIVSSEAQVFDNPKYLRKSEKRLKFLQRKYSKHKGKRTKLKLAKLHEKVANQRKDFLHKVSKELIKNHDTICTETLQVRNMLKNHNLAKSISDAGWGMFMTMLEYKSEWYGKNLIKIGTFEPSSKTCGNCGLINKDLQLKDREWTCKSCSTILDRDLNAACNIKNFALRNYVSGTDTENQNELPTLVGVLTSETNTL

SEQ ID NO: 34445 - protein, 358 aa, unknown
  TnpB Polypeptide
LITYTFKIKTTKTLENIFIEHLNTTRCIYNLAKEVKEIAYSKGVKLSKYDLSKQLPELKKECKWISNVNAQTLQGVIERLYKGYDKFFKDLKRGVKVSKPHWASKRKWKSIEFKQNSNILRFEKNKFKLPKIGLIKIFKSREVNGNIKLTRVVKKADGWYLQIVTDYERPKCENQAKIGCDLGIKHFLVTSDGQYFENINTAKKFKKKLRVAQRSLSRKKKGSNNWYKQVERIKKLYLKIQRVREDYLHKISNDLASNYQYIFLEDLKVSKMIQNKNYSKSISDVSWSKFSSYLEYKTNVTKVDAKYSSQECNNCGHISKENRPNQETFKCVKCSHSGNADENAAKVVRKRGVARLLK

SEQ ID NO: 34446 - protein, 248 aa, Bacillus sp.
KVSLVNLAEQVKEISREITLTQRKMNRSMRATNPQNFHFDGTIKKGKIYWVFSTRYKKLRAKLKEFHRKQVVIRTVSHRTLANGLLELGDTFYIETMNFKALQKRKKETEVSVKTGKYKRKKRFGKSLGHRAPAMFVSILEEKVKRLGGSFIKVNTHKFKASQYCHVRDNYIKKALSQRWHQIDENTKIQRDLYSAFLLMNSNASGTKANRKRCHETFPIFQNQHDFAIKEIISQKKMIFNSGIILNN

SEQ ID NO: 34447 - protein, 374 aa, Phormidesmis sp.
MKTLKFKLYNHKRNRFLKRSINAAGVIYNHCIALHKRYYRMWGKHLNCAKLQAHIAKLRQRKEFWQLVGSQAVQDICQRIEKAYQLFFKHPKKGVRPPNFKKVRRHKSFTLKQTGYKFLSGDRIQIGNRVYPYWNSREIEGTVKTLTIKRTPLGELFMVVVVDSVDEPETKFETSRIAGFDFGLKTFLTASDGTKIESPQFLKQSLNAIQKASRNHSKKRKGSSNRERARLNLVRKHEDVVNHRSDWFWKLAHDLTNQFDVLCFETLNLKGMQRLWGRKISDLAFGEFLKILEWVATKKGKQVVFIDRWYPSSKTCSNCGHVLKELDLSVREWRCPSCQSVNGRDENAAINIQRVGASTLKLGDVRQAMPAIAV

SEQ ID NO: 34448 - protein, 392 aa, unknown
  TnpB Polypeptide
MRRAYKYRLYLNKTQQVLLHQTFDCCRYVYNATLARKIKAYETDKISLSKFDCIKLITGLKKEHEWLRAVPHVCLPQAVYDMDSAYRMFFKTKQGFPKFKSKHRSKLSCRFPVPFCSVDQETYHIKLPKLGLVRYKQDRRFNGQLRNVTVSCDGCGRYWVSCLVETGTVEPQPDPITSQSKCVGLDLGLKDFIVASDGRKIPNPRFADVIDRRILRLQKIEARRQKGSRRRAEIRLKINKLYAKKRNLINNFIHHTVNSILGENQAIFIEDLNVKGMMGNHRLAKSIQSVCWFEFVRVLDYKARWLGKTVLKIDRFFPSSKTCGCCGFKNDGLTLKDRSWACPQCGTFHDRDLNAASNILRNGLAMFLPSVGRFDGRGDGGYEVVETPICAV

SEQ ID NO: 34449 - protein, 351 aa, Clostridium sp.
MLNSNMAQQILKEVDGSFKSFFGLLKLAKQGKYPFSSCRRPKYLPKDGYATLIVGFVRLNGNRFVLPYSAAYKKHHKPVTITIPPVLADKNIKEIRIIPKADARFFEIQYTYQVEAAQRNLNPTHALVIDFGIDNLMTAVSNRGESFLIDGKRLKSINQWFNKRNACLQSVKDKQHYGKKTTRRQAVLQRKRNNQVRDYMGKAAKQVVTYCIRNDIGTLIVGYNTTFQRSSDLGRQMNQVFVGIPFGILRRKLKYLCEMNGIRYVEQEESYTSMASFWDLDEMPVYGEAGLVPPVFSGRRICRGLYQDRSGRRINADVNGALNIMRKCNIVSLRALYDRGDVDTPVRIRIA

SEQ ID NO: 34450 - protein, 429 aa, unknown
  TnpB Polypeptide
MHIFYTFLCYFSTKLDNIYDANFLVIFKLSCYNFIMEKFIKYKTFTFRAYPNKSQTNLIYLTFIMCRYMFNTLLSIELENLKKYNNEVEKCLKSYKYFDDKKFAKEHKMPKISKLKNSNENYKKVDSLAICAEYSNLVRGMELFYRGKSNLPKFKGRNDKHSYTTSQVNNNIRIVNNKIRLPKVGFIKVRGMREIPSNFKIKRAIIFEDKKGKFFISIVFEYEKIDKNDDIYSIKNENKVVGLDFKIGDIFVSSAGFIPKYSNSYFILLDKIPIIQNYVNRKKKFSKNYWKSINKLRKIHRNVVNIRKDMLNKLSYTLSKNYNYVIIEDLSIKEIVYKLGRGKNAYNTSFNSFVKRLLYKFENKVIKINKWFPSSKKCSICGKKKKHLRLSQRIYRCYFCGNIIDRDLNAAINIKNEGVRLLNTCEFEV

SEQ ID NO: 34451 - protein, 427 aa, unknown
  TnpB Polypeptide
VKLAQTGQPSHSGEETSLTSLNYNQISRSVSLSVPIAPTSSSFRELPVVRTLRFKLMRSKKNRKLDYEIEQFCRVYNHFIAVIERYYRLFKKHPSANRLKMLLPKLKRTRRFGWMKLLPSQALQDVVERIDRAYKRFFEERKKGKRCGKPHFKQSENYKSFTLKQAGWEIVGEHGLRIGDNTFKFHKSREIPAEKVKTVTVKRDKLGDIYVFFVVKSTEFVPKRCATGQSVGIDFGFDQFLTLSDGTRVDAPMVFKQDLRHIKQLSRSMSRKVHDSKSWNSTRLALNRAHRAIQHKRDDWHWRLAHELCQKYDLICFETLNFKFFQRKHGKKVQDFGFLNFVKKLKYLAKRYGIQIVFVDPFFPSSQLCNACGYQNPELKDLKIREWVCPECGEHHERDFNAAKNIHDEGGRALVGLTKFKNFEIIS

SEQ ID NO: 34452 - protein, 286 aa, unknown
  TnpB Polypeptide
VNLPLRGAEGHENLLGSDVRVCNSEFIRRNGDFYIHITIQKEVSPPLMPYGRVLAVDLGERVVATSVAFDSTRWCEPHFHARSVRGVRRHYAWLRSRLQERGGFRSIASVGKSERRRVYNTLHEAAKAIVKQAESLDAVIAIGDLTGIRKRSRQKGRRLKSIVNAMPFRQLTSLVEYKAAWAGIPVLRVGAEYSSVECHTCNERGLRPSQGRFVCRSCGEYNADVNGAINIGKRALRYTREVGAYGFRPEGGPPFSRPSELAIAVSAEPICIHRPPEFPGMRVETF

SEQ ID NO: 34453 - protein, 380 aa, unknown
  TnpB Polypeptide
VFEEETKLFDARLEGNMKEYRTEMYRLYPDKAQKDAICKKFDLADSEFNKLAMVVNALASNGNDRTKLETAISEYPLASLLDETEAHSVRNTVKKLIPKLVSGEISAILPRNRYRNTKTLEVMASPAPAAQVMIDGVGVVRLAFHRSLPNNARVFRVTLKSDCCGERFYLMYSYYFEHAGVAPHPINPDLVLGIDYKQDGLYVDSDGNSGGYPGFRQKGREKLCRYRENTKHFQKGSHRWKKHQSRLAKYEQHIENQRADWQYKKAEELAESCDAVCRETLDFKSMIRADPRLAAKIYDNDLLTFSRRLSQKMEQQGKRVIQISRYFPSSQICSYCGNNFGPHALDEHSFCCPYCGAWIDRDVNAARNIKEEGLRLMQAA

SEQ ID NO: 34454 - protein, 265 aa, Escherichia sp.
  misc_feature (166)..(203): Xaa can be any naturally occurring amino acid
VKRLQAFKFQLRPGGQQEYEMRRFAGACRFVFNRALARQNENHEAGNKYIPYGKMASWLVEWKNATETQWLKDSPSQPLQQSLKDLERAYKNFFQKRAAFPRFKKRGQNDAFRYPQGVKLDQENSRIFLPKLGWMRYRNSRQVTGVVKNVTVSQSSGKWYISIQTXXXXXXXXXXXXXXXXXXXXXXXXXXXXXXXXXXXXXXAEKPEEAGETSAAVKPQGQIQQQLAEAEMQNTATAFPYRKYPQGLPSQSHNDRQQKPRNDSH

SEQ ID NO: 34455 - protein, 601 aa, Rhodococcus sp.
MTGPGTTAPRQFAVTTRPHGAVDDATGEPIGLDDVDTRVGWLLDLVTAAGRELVSRLWQPPTFDVLAAGRDRQDRRLPAQGHVAAARLGWNPSYPDGVYVPSRVARVVTAQVMATLRTLTHRDNAIAALSARFDPATGAVAPPTGSADDVPPGFARGVRRQLIAHARRGGEAPAGRLRITDVQEPPRMAAMARLSAADRQLAQSTVTEREMVLTVKLPTCPAPAGRAQWRSVRLTAAIPAHLHGRAIIDWHLPTLVLDHRGLLWRCAATELVPAADLDSATMAMGVDWSPSTLGAAAIAAENPEGLVSDYRGWTYDDRGLGIKLARLQAEGQLLHAKAARLTRLAAAAPPEVRAELEEKIAVLDAHRTAVGAKRGKINRELAFDFARQATDYAAAAGAQVIAVEDLTTLETHGHGRVNNNRAAQSARRQAVAALAHTAAGAGITVVSVPARGSSAQCPGCDEPLSRPGGYHTAWCSRCRVGGNRDHMAGVNLAKRALLGKGKVTRRRGQMPAVRVAEHAPVRQCRDKNGPTPGRPRHRRVRRSLPTTTPQVGVNPNRHVPAPQASVWDTVKPTPPHGDTGSRDTPTSQASATPVADSLRST

SEQ ID NO: 34456 - protein, 390 aa, Rhodococcus sp.
VKRIVVVKLVPRPDQFAALEATLALCNEVANEVAGVAQSMGLRSRRALQVALYPRVKTRGLSAQPALHVLRKVADAYTTRQGNLTNGNYGRPGSTRYTAVADAAVKFRPHAAQPFDDRCLSWQMDSSTVSIWTTAGRMRGVRFVCAPWQHELLAARKGETDLVYRDGLFYLYATVDEASPEPAPPPDSAAGWLGVDLGIVNLAVTTDDDPATLDVRWSAGAVTARRKKNAALRATLQKVGTKSAKRKLKTRRRKEQRFATDVNHQLSKSIVAKAQRTGRGIAMEDLSGIRDRVRLARGQRTQLHSWDTPSYAPRSPTRPRWLGCPSLSLTPGILRERAHSAGTATRRTGSRKQHSDADTASGPVIPTTTRPATSPHSDIARTGPPNQPCP

SEQ ID NO: 34457 - protein, 389 aa, Rhodococcus sp.
VKRVVKIKLAPTDAQARALHDTLMLCDTAAGVVSRVAQASEDRRAFALQKAVYHQLKALGLSAQPAVRTIKKVADAYATRGANLEAGNYGPGGGKRATDIAATAIGFRALAAQPFDDRCLSWQQQGSTISIWTSEGRLKAVRYVCAPWQRALLEHRCGETDLVFRDNMWFLHATVDVPAPEPVEPVVVEEFLGVDLGIVNLAVTSDDTAASADWSSGAVTARRGKYTRTRRTLQKVGSKSAKRKLRRRREKEHRYATDINHQISKTIVAQAQRTGRGIVLEDLSGIRERVRPAKAQRQQLHSWAYAQLRDFVTYKAASVGVPVEVINPRNTSRTCYPCGHVDKANRITQDRFVCRVCGHVDQADHNAALNIAYLGYVKYMTTTHGYWAA

SEQ ID NO: 34458 - protein, 149 aa, unknown
  TnpB Polypeptide
MIKYQMHCISKYVVDWCVLYGIDTLIVGHNDEWKQKKQGMQNFTYIPYELFIQMLAYKCENNGIKFIENEEAYTSGTSFLDNEDPVKENYNKERRVHRGLFIADCGKKINADVNGAYQILKKVIPDAFSKGIEGAGSHPTIINLAMLRV

SEQ ID NO: 34459 - protein, 297 aa, unknown
  TnpB Polypeptide
MALQEALRNLDRAFQNFFDKRAGYPRFKSKHSHAQSYRTRNQSNGVRIVGKRIKLPKIGLVRIRQSREFSGRILSAAVSRTASGKYFVSLCVEQDKAKLLRPNAGGQIGIDVGIREFYTDSNGNTVENPKPLKKLLRKLKREQRRLSRKLPRSQNRGKARVRLARVHERIANIRKDFLHKCTTRLARENQTAAVEHLNVKGMLKNHRLAQAISDVSWSEFFRQLAYKMELRGGELLKVETFYPSSQTCSVCGYQNTEVKNLGVREWTCPQCGAHHDRDHNAAKNILRRALENKAKAA

SEQ ID NO: 34460 - protein, 445 aa, unknown
  TnpB Polypeptide
MAFVQRKISYRLYPNATQELRMGEVLALHCRAYNALLEEHQRRFKAKEPIFGFSAMCKSLTEWRGYADSLKGLNAQSLQVTAKRVALAFDSFFRRVNAGETPGFPRFKPIQRFGGWGYKTYGDGWKLIQPEGRHGKVRLTGIGEIPMRGQGRFTGTPKTAEVIRKGGKWYLSVTYDVTLEAVSRPVGREAAAFDWGLDTLLTIAKADGSLKEVDNPRWLKAKLDTVKNVSRCISAEEARIRAIRGLESDAPIHPSQRTSKLNRLRRQLAVIHGKVSRQRKDFYHKLTAELVSRFAFLGTEELAVKNMSKAPKAKPDPAKPGEYLPNGAAQKAGLNRSILDAAPSMLIGMLRTKAAEAASVFAEANTRKVKPTQRCHCCGAIVKKELKDRRHVCACGADCGRDENAAKTLLRWLLEGDFWLGTQPEGRRRLPSETPSIAAHAAWVG

SEQ ID NO: 34461 - protein, 388 aa, Trichococcus sp.
MIINKAYKFRLYPTKEQQILIGKTIGCSRFVFNYFLSEWNQCYEDTGKGLSYGACSASLTALKKETDTLWLQEVDSIALQSSLRNLSDSFDRFFKKQNSAPRFKSKRNPVQSYTTKLTNGNIAIVGNKLKLPKLGLVPFAKSKEVDGRILNATIRRNPSGKYYISILVETEVQELPKTGSVCGIDVGLKDFAVLSDETVYKNLRPFRKLERKLAKEQKVLSRRREQAKKDGRKLSESKNYQKQRAKVAGIHEQISNARTDNLQKISTEIVKNHDIIGIEDLQVSNLVKNHKLAKAISDSSWSQFRTMLEYKACWYGKQIVAVARNFPSSQLCSGCGYQNKDVKNLAVREWECPKCHTQHDRDLNASINIKNEALRLLTAGICGDSLLN

SEQ ID NO: 34462 - protein, 368 aa, unknown
  TnpB Polypeptide
VLTYKFRIYPKKSQQEKLWRHANKLNWLYNQFLDQKIKAYETEKRFISRYDLQNQIPIIKKEDNVLREIHSQVIQQVTYRLDKTYKSFFKRGFGFPKFRSCRKFFSIVYPQSGYSIKDKTFHTKVYGDIKFIKHRDIEGNIKTATIKNENNRWFLCITTDFKKDIKCSGIIGIDVGITNLAALSNGTIIKNKTHAKYFDKHINKLKSRRDSQCKKGSRKSKYLSQVVKRLYGVKNRKINDFQHKVTCNLSREFDIVVVEDLDTKKMSEGKITGLNRELRNSKLSSFIDKLEYKTNELIKVNPMNTSKTCNSCGKLQSMPLSKRTYACTCGYSEDRDVNAAKNIICLGQAILAKECTGGSTIQEALSFR

SEQ ID NO: 34463 - protein, 430 aa, Desulfovirgula sp.
MKRCNVVRVLFSKEQAKTLETLGDRCAALWNAANFRCRQAFLKGEPVPSYATLCAEFQNHPAYKALPSDIAQEILKKLRKTWNSFFTLLRLWKKGELEKRPGLPRYWKDRRTGKRLAKLIPVKSPRSYFLDTRTLSLTLPADLRDGNGRLVLYTRGVLRFSGTPKTLELRYDRVKKRWYAHQVVEVPEPERKAKPEKYAALDLGARVLAALAVEGLDRQILFSGRKVWKDFLYWTKRIAEEQSRLNRAGRKTSRQLRRLYQVRARRLKHAFVALAAEIARILKQHRVSTLLFEDLTGIREDMDFGPGNLLVHNFWAFRMLRNLIEAACTRAGIKVVPVEPRGTSSRCAVCGSPVKRPIRHKAVCENCGRIWHADANAALNILLLGSSKGHGAEATPQKPLAFRWNRHRWVSRFESAAGTLYATSGSRMAA

SEQ ID NO: 34464 - protein, 410 aa, unknown
  TnpB Polypeptide
MSIQTRVEKHIIKSSNAFFSMLIDFCHKSKNLYNHANYLVRQAFTSQDNSKWIRYAELDKLLKADEEYPDYKEMPTAQSAQQILRVLDSNWKAFFASIKDWSKNKDKYLGRPKLPKYLKKNGNFLLILTNQNCKLRNGSLHFPKTFKGFTLIPRFIKKENFASFQQIRFIPKRNRIIAELVYNINVPEKKSDNQRYIGIDIGVDNLATVCNNAGEKAFIINGKPLKSINQHYNKKISHYREIAKRMNNSEYSKRMDRLTEKRNSKIDDYLHKASKYIIDYCLKHDICTIIIGKNKEWKQNVNLSKRINQHFVQIPFARLIEMIEYKAEEYGIAVVTTEESYTSGTSFIDNEEPVKENYNKSRRVHRGLFVSNSGITINADLNGAYQILKKVVPIKWDRGCVLHPFVVNVA

SEQ ID NO: 34465 - protein, 422 aa, unknown
  TnpB Polypeptide
VNKRADFQTSPAEIFFRGNEVGCITFIKAESSSSIMKIIRAWKYRIYPSKKQEKELNSYMCDCKNLWNFLLEHTKKSYKETGKFPTRKELYVLSKEVNVYSQVAQNVADKLIKSLKVMIAKKKAGKKAGFPRFKSFERMRSFTYPQFGFKVNEKLELSKIGNIAIKKHRKMQGEIKTLTLKKSPSEKWFAIFTTESDKKAHQNVEMPKVGIDLGIENFAYLSNGEIIENPRHLKKAEKRLKKTQRKLSKKKKGSRNRRKARLNVAKAHEELTNTRRDFIHKTSKKLVDSYSLIAMENLNVSGLARGFLAKHVLDCSWAEFLSMLHYKAEEAGCEVVLVNPAHTSQRCSSCGLMQKKTLAERWYECSCGASMHRDLNAAKNILARVTSGTGEYQACGKGTSIHYKQNGQVTSMKQEVHDFSRG

SEQ ID NO: 34466 - protein, 404 aa, unknown
  TnpB Polypeptide
MSSNPIYRSYKYRLYPTKQQSQYLEQVFGSVRFVWNQLVANFNSWASDGPNRPMNEKSLKDTPEYSWLAKTISYALQQKRMDFDEAKSQYFNKGRKKKPGRMKFKKKGIARDSFRIPVASMGGQKSIDLDNGRIKLPKMTSMKLIVDRKFMGTAKSVTVSKNKIGQFFVSVLVEEDVKVKTSVGRSIGIDLGLSCLATLSNGVQVKNPRWFRKSQAKLRKEQKHLSRKKKGSTRYEKQRRKVAKVHLKVANQRSWAIHNLTTTIINTFDTIIVEDLNVAGMKKLFGKSISDAAFGEILRQLEYKSSWYGRVFHKIDRWYPSSKTCNCCAYKMDTMTLDIREWDCPNCNTHHDRDLNAAKNILDEGLRDLYGFTSDELADYRRGEEVRHASSGAFLDEAFRLFCL

SEQ ID NO: 34467 - protein, 244 aa, unknown
  TnpB Polypeptide
VRLVKRADAVYVQFCIDVDRSENTEPSGNTIGLDVGLKEYYTDSNGVIVENPRFLRKGEQVLKRCQRRVFRKVKSSKNRGKARQLLGKCHLKISRQRKDHAIKLARCVVQSNDLIAYEHLRIKNMVKNHCLAKSINDASWYQFRVWLEYFGKVFQKVTVAVNPQYTSQECSSCGAIVKKTLSTRTHVCQCGCSLDRDENAARNILSRGLGTVGHTGTFALDASNALGDEASTFVGEILHQQVMS

SEQ ID NO: 34468 - protein, 396 aa, unknown
  TnpB Polypeptide
MMFSERHIIKDNRFESIRLKSGLLYNYVLYNVRQGIFSGNYLKEYEFSTRLCRENQFDFRNLPCSISQQVVGHVFKNIKTWVRLKKDFEKNPSKYDNRKPRLPRYKKGKKQNMVVFTSSACRLKEDGYIYFVKNIIQPIKTKIGDNKLCQVRIIPQATCYVVEVIYEKKEQDLNLNKDNVLSIDLGLNNLCTCISNVGLKPFIVNGKIIKSFNQWFNKKRAKLMSYIGDKGTSKRLQQLNNYRNFWIEDHIHKISRFIVNYCINNNIGSLVIGLNKGWKNGISLGKKTNQKFVEIPFSKLVYKISYKCKLVGISFQTHEESYTSKVDHLAFEPLKKQEVYLGKRKKRGLFQSSTGKLLNADINGAIGIGRKAFGNSYVSRIIDSGLAFNPVKVNIL

SEQ ID NO: 34469 - protein, 309 aa, unknown
  TnpB Polypeptide
MLKGIKIRIYPDEEQEKLLLSYCKDYHNMKNFLVAKFKDNLPNVGNNNIIGYKDQDLLQDYESEYNCQTELLMRSVRGAIVDYVSGVKRFYQKLSSRPPKFHKYDPNKQSFYIVDVIYKIKDSYICMPIRKTFNHKYKSTISRKIPINKKYATKENLTYLKDIRFKYEKGKWYISGCYDVPNVDIDNDKEFLGLDWGIKNFMTTSCKELINYPKEIVREYYRIRKLSHYLDKKVKNSNNYKKLKKKFDKAYKRMNGLKRNFIHQETTKLARQYHIVIEDISWNQISKDKKGKKRKFIRRMSMIAPKIYV

SEQ ID NO: 34470 - protein, 403 aa, Planktothrix sp.
MIVLEFKAKGKTTQYAAIDEAIRTAQFVRNKCIRFWMDNRGVGQKELYRHNTALRAEYPFVKALNSHACQVAVERSYTSIARFYDNCKKQVSGKKGYPKFKKNNRSVEYKISGWSLSETRKQISFTDKKGIGKLKLKGTWNLNYYQIEQIKRVRLVRRADGYYVQFLIKTDVKVEVKPTGKTIGLDVGLKEFYTDSNGHTEPNPRFYRTGEKRLKFYQRRVSRKKKGSANRKKAINKLGRTHLNISRKREERAKRIVRCVIKSNDLVAYEDLRVKNLVKNHCLAKSINDAGWYQFRKWLEYFGVKFGRITVAVNPSYTSQNCSSCGTIVKKSLSTRTHICQCGFVLDRDWNAAINILNLALGTVGHTGTWIFNPNASGDLASTVLGVNLLQQAESLNEESSSL

SEQ ID NO: 34471 - protein, 385 aa, unknown
  TnpB Polypeptide
MRLVERHIIKTQDARYKELNTLTILSKNLYNASLYAIRQYFFSHKTYLNYYELNKEFVSNKNVDYYNLPSKVSQQTLKCVEQNFKSFFSLLKLKSGNISIPKYLPKDGRFQVIYTSQAISKIKLKKGIVKLSGTNIEIPTKQKDIQQVRVVPKGNHIVVEVIYNQECKPKIVSDNLASIDIGLNNLAAISYNNRKGELINGKPLKSINQFYNKKKSKLQIKNKSSKRVKSLTLKRDNKITDYLHKSSRYIINQLVSNNVSALIIGKNNGWKQEIKLGKVNNQNFVQIPHARFIQMLEYKANLEGIQVILQEESYTSLCSFLDNEPVKKHDTYVGKRNGRLFTSFDGKVINSDINGSLNIMRKAVTNVKFTDVIEVCSTPSVFTVK

SEQ ID NO: 34472 - protein, 337 aa, unknown
  TnpB Polypeptide
MSSSKFRVWLNHEYLPQHPEYLWIKEAYSKAVTQAVNHGQTAFKKFFNHESAFPKFKKKGRSDVKMYFVKNNPKDCRCERHRVNIPSLGWVRIKEKGYIPTTKDGYIIKSGSVSIKVDKFYVSVLVEIPDAQIANNSNDGIGIDLGLKDFAIVSNGKTYKNINKSARLKKLEKQLIREQRRLSRKYENLKKGEVTQRANIQKQKLKVQKLHHKIDNVRTDYINKTIAEIVKTKPSYITIEDLNVKGMMKNRHLSKAVASQKFYEFRAKLQSKCNENGIELRVVARWYPSSKMCHRCGRIKRDLKLSDRIYRCECGYVEDRDFNAALNLRDAITYEVA

SEQ ID NO: 34473 - protein, 167 aa, Microcystis sp.
MPSKEAWGVIKSNDFIAQVNLNIQGMVKNSRLAKSINDVAWSTLRQSSVLTFRQWLEYFGFKYGKATVATPSHNTSQNCSNCGQKVPKTLSTRTHVCPHCGYVEDRDINAAINILKRGLSTVGHTETDTLGERFPIKGSSLLFMLNQHTRCQDKILLTQKLQKFLKP

SEQ ID NO: 34474 - protein, 384 aa, Cupriavidus sp.
MRPFTRCNTPSRTWSRRTRISSPSVPPSRSSRSGASTTASATPTPSNSSSNERIFLPKLGWMRLRLSRPVMGELRNVSISLSGSKWFVSIQTEREVVQPVPQAMSAVGIDIGIARFATMSDGSFLAPLNSFKKHEACLRRYQRAMSRKTKFSNNWKKAKARPAHSHPHRQRPPRLPAQSHDHDQQKPRDGVYRGLAGAEHVQVGGRQHRGTGKKCSGQVRPEQVHPRSGLVRVPSPVGLQGVVERWMAGGRAIGEHKPDMSGLWMRECREPDHAGKICLRRMRLRRERRCRRRSQHFGARTSRCSLWRAGAVGPLREAGTRRGDLRRAHRFRRGRNPPPSGRGGCQRNSSSTSSLCAAWTIHRPPTGAASGSDLSDPAAKIFSR

SEQ ID NO: 34475 - protein, 415 aa, unknown
  TnpB Polypeptide
MKVVRGYKTELDLNNKQRTACLQHAGAARFAYNWALARSQEVYRTTGKRPNAIALHKELNALKKTDFPWMYGVSKCAPQEALRDLDNAYKHFFRRVELKKQGKYKGKLGFPTFKKKSKGIGSFRLTGSIHVFAHAVQLPRLGRLRFHEHNYIPTDAKILSATVSEQAGRWFVSIQVEEEHDTPVMTATSTIGVDLGIKTLATCSDGMIFANPRALKHAQKSLKRLERQKSRRKKGSKNRAKTCKRIAKQHARIANIRKDASHKLTSYLSKNHALIAIEDVHVAGMLKNHSLAQAVSDSNFGEIRRQLTYKAEWHGSHLVTVDRFYPSSKTCSGCGYVKAELSLQERTFICEQCGLVIDRDMNAAINLRDAAVSSIDTQNAYGERSAGLLNGVGETTLVELGTKGDVWALPHISMF

SEQ ID NO: 34476 - protein, 350 aa, Thermoprotei sp.
MAREGEEKATVVGKLILNDEVSLARLLTIMRQFRDAVELGHSLLFREKLSESEVKRRLTRILSNAWYAYSAIKVARLYKEQSKIRLRKPLLYSVGARCEKSNRNIRLVSTDKVLIKIPHASGKHEWIEVGVRFGKKYLPLMRELISGSYSYGAGVTIKLKGKKEDWRRVFREKLYLYLNIPVSLYVKYFSKRVKVKPRNRFYAGFDFNVDRINMVIVDSYGRIRDVRNIRFPEVVNYDKDKSRAIRQEALSKLVEYAVSHGVKYFVIEDLSKPNKIRGKIRKWSVREYQQQMEMLIKKVSGTLIKVNPVYTSIDAIGIALSRRIDIHTASAYLIALRGIKGYELIQKTII

SEQ ID NO: 34477 - protein, 378 aa, unknown
  TnpB Polypeptide
MIRSYKIRLLPNQKQEQLLWKHINTSRFVWNFGLSHQIELYKNNQKHLSGYDLRKVFANLKQQEEYTWLKEISAHTISNVCLDLDNAYQRFFKKINGHPKFKKKNKCKNSFSVRKDDFYFLNNCARIEKIGKVKYQTNYKLPQGRGIYKITNPHIEYKNNKWILSFGMECNNQTQILTDNSMGIDLGIKDLVIVSCGNEFKVFKNINKTKYVKKIKKQLKHSQRKVSKKYYTNKSWGKSNNILKTEKRVKQLYNKLSNIRKNYIHQTTRELINLLPYRVVMEDLNVKGMMKNKHLSKAIQEQCFYEFTRQMKYKCEEYGIEFIQVDRFYPSSKTCSNCGSIKKDLKLSDRVFICPECGFEIDRDKNASLNLMNYGLVG

SEQ ID NO: 34478 - protein, 332 aa, unknown
  TnpB Polypeptide
MLTRRATYRLYPTATQEQQLYGWRRLHAYLYNAAISNRRTQYEKFGQTVDYFQQQNCLPAFKEVWPEYRDLGSHALQATLKRVDFAYLRFFKGLGGYPKFKSIRHYGGWTYPDKAGWKAHTIGDNGYLELSNLGQIQMRGKAKVWGTPTTCTIVHRHGNWYASITINCTPTPRELGTGAIGIDFGTKTAAAIWDGEKGSFIDNPRWFQQSLPKIKKASRDKRRKRAPNHKKKIKASRRYKTAQNQVTKLYRKAANLRQNWIHHQAAEIVSGNSLVASEKLEVKNMTRKAKPVVRFVRSKSVEILRYDRHLRGNPIRIEFALESLVNDNLMFI

SEQ ID NO: 34479 - protein, 394 aa, unknown
  TnpB Polypeptide
MYNVGLYNIRQFYFAEKRYLRYESNYHQCKENENYKLLPTDIAQQTLKVVSRSFESFLKLIQAAKKGLYRFEQILMPRYLPKDGYFPLIIPRIKVKDGFFNIPISRAFKQEYGTVKIPFPERLKDKELKEVRVLPKYNARFFEVEFIVKEDTPESKKSDNSLAIDLGLDNLAACVSNTASSFILDGRKLKSINQWYNKQNARLASIKDRQGIKGITTQQVQIVVNRNNRVRDYLNKAVRYIADWCLENQVTNIVVGVNPGMKKEINLGKKTNQKFVQIPHHSFRMKLDAMCERYGWNYIDQEESYTSKASFIDSDELPVFNADNPTEYQFSGKRIKRGLYKSKHGFIVNADCQAAANIGRKSNLNGFTPDRVAASLAMPLRVKFDGVYAVKFTP

SEQ ID NO: 34480 - protein, 369 aa, Anaerolineales sp.
VRKTFKYRLFPTKAQQTAMQKSLDACRWVYNKTLEVRRDAWQQRQESLSRYDTIRMLPGWKTEHSFLSDAYSQCLQEACTRVDLAFQHFFRRVKAGEKPGYPRFKGDRYKSFTYPQSGFNLSDNGRLHLSKIGKVRIKIHRPIKGEVKALTIRRDVLPKGWHACFSCEIDSEPLPPSPNVVGVDVGLTHFATLSTGEHISNPRFFRQDKKSLAKTQRRLSKYEKGTSEYHKQKRVIQHIHQRIANRRKDFAHQLSRRLVNEFQIIAFEDLDIQDMQNGNWRSMNKSIADAAWRQFVDFTAYKAEYAGRSSPRIKPRGTTQECSGCGEVVPKDLSVRIHNCPHCGLILDRDHNAAINILARGMASIRLDR

SEQ ID NO: 34481 - protein, 259 aa, Bacillus sp.
QTNENIAVVGNKMKLPKLGLVRFAKSREVKGRILNATVRRNPSGRYFVSLLVETEVQELPKTLSYIGMDVGLKDFAILSDGTTYKNPKFFRSLEEKLAKVQRVLSRRMKGSSRWNKQRIKVARIHEYIMNSRKDYLDKISTEIIKNHDVIGIEDLQVSNMLKNHKLAKAISEVSWSQFRTMLEYKAKWYGKQVIVVSKTFASSQLCSCCGYQNKDVKNLNLRKWECPSCSTHHDRDINASINLKNEAIRLLTARTAEIA

SEQ ID NO: 34482 - protein, 367 aa, unknown
  TnpB Polypeptide
MPKVFRYRLKPTKSQVAILNRQLDLCRWVYNETLALRKNAWENEDRSISYFESKRMLPIWKESKPELSEVYSQVLQEAVQRVDLAFKAFFRRVKAGENPGYPRFKGINWYDSLTYPQSGFAFEDNVLHLSKIGDIKVWLHRKVEGTIKRLTIRRSSTKKWYVSFLVEDAPNDAVPDSEKAVGIDVGISNFAVFSDGTFIENQRYLASCEKKLATAQSKKDKLPHKSPERRKAAKKVSHIYERLGNLRDNFAHQLSHRIVNDYGIICLEDINIKNLIEKKPYMAKSVLDASWNRFRTYVTYKAESAGRKVVLVNPAYTSQICSSCGSIVKKDLSVRVHSCPKCGLVMDRDLNAAKNILRLGLQSVAKA

SEQ ID NO: 34483 - protein, 401 aa, Synechococcales sp.
MLVLEFKARTNSQQVVAIDEAIRTAQFIRNKAVRLWMDAKGTGQNDLQKYCAVLAKEFPFANSLNSMARQAAADRAWISISKFYNNCKKGVHPVGFPKFKKHSRSVEYKTSGWKFLSPKKIRFTDKCGIGDLRLIGSHDLAFYPVELIKRVRLVRRADGYYVQFCVRVDREEYLEPTGRTMGLDMGLQDFYTDSNGEKEPNPRFLRKAEKRRKKLSRRFSKTQKGSNNRQNARVRLAKLDLKISRQRKDHAVKLARCVVQSNDLIAYEDLRIKNMAKNHCLAKSISDAGWYQFRVWVERFGVVFGRVTVAVPPQYTSQTCSSCGTIVKKSLSTRTHICRCGCELDRDHNAALNILSVGLSTVGHTGTWIEDPNASGDETSLSVASGQLGKVTSMKEESPSL

SEQ ID NO: 34484 - protein, 389 aa, unknown
  TnpB Polypeptide
MRKTFKYRLFPTAAQRTSLQAQLDACRWVYNKTLEVRRDAWEQEQKSLSRYDTNKLLTGWKQEHEWLKEGHAQAMQDAQKRVDLAFRAFFRRVKAGAKPGYPRFRGRDRYDSFTYPQAKGNWRFLSDKRLRLSKIGDVRIKLHRPLEGECKTLTIRRDSAGNWYACFSCIVEPKPLPPNDRVAGIDLGLTTFATLSNGDEIKRQRWMKRDAKDIARLQRKKERFVKGSPERRKVVRALQHAYRRAANRRSNFAHQESRKLVNDYQFIAFENLDIQDMQKNGCRTINQGIADVAWRQFVQFTTYKAEEAGRSVALVDPRGTTQECSGCGAVVPKDLSVRTHSCPHCGLSLSRDHNAALNILARGLASLGESPGSSLIYGESSHRPGRGSQ

SEQ ID NO: 34485 - protein, 389 aa, unknown; identical to SEQ ID NO: 34484
  TnpB Polypeptide

SEQ ID NO: 34486 - protein, 380 aa, unknown
  TnpB Polypeptide
MILTNKQFSTIIIKIGKYPELEHTIKIFNIICQEIINYGWEQKTWNKNNLRYGTYKMIREKYPMFSSAMIQTARDQASEILKKSMKTKKKLTKPVKQDYSGIRYDRRSLSIMFNKNLISINTTFGRIKLPIKLADYYWKYKDWKYTNAQLIKRKDKNYYLNIQVYQELPEKIKDCNVLGVDLGIKKIAVLSNNTFYKSNKLKNIKGKYQKLKRDLQSIGTKSAKRNLISISRKENRFVRDVNHCISKEIASTDYSVFALENLQNIRTTTKTYNKKLNQMIGNWSFAQLQGFVKYKAERLGKNVVFINPNYTSQQCSKCGHTEKENRKGNVFSCKQCNFKLDADLNASRNIARIGRTDFLQGSVNNPNVGIDENKAVEILN

SEQ ID NO: 34487 - protein, 403 aa, unknown
  TnpB Polypeptide
MRKALVKKAVTLLLLLTIIVPGCFVRYYDVYGDNKQNLDNANNKKSDLQSEYDKTQKKLDELKSQSNDIETYLTQLDSQMSAINSSLDEVNGQIEQIETEITDTEEKLAEAEEDVDEQYDSMKLRIQYMYEHNEETYFALLLNSESMGDMLNKAEYITKISEYDRKMLEKFNDTVNFITAAKIKLEQDRETLVVKQEELTDISLGIDLGLKDLAVCSDGKVFKNINKTKEVKNLEKRLKQKQRQISRKYEINKIKKGGSCQFIKTKNIKKLENTTKLIYRKLANIRNNYIHQVTTSIVKTKPYRIVIEDLNVSGMMKNKHLSDSVKKQCFHKFRQYLTYKSELNGIELVVADRFYPSSKTCNKCGFIKKDLKLKDRVYRCPHCGAVIDRDLNASLNLSMYKLA

SEQ ID NO: 34488 - protein, 335 aa, unknown
  TnpB Polypeptide
MILTYKIKHGRDFSDELRKAKQIAKFAIQTHSLSSKDVKHIGLKSMIANQILRKYSRSNTARSVKSVKLAIPNQGIKVDRDTKTISAPCLKFSLKYEFPDNFEKINQIEVGEEYAYVSVSIPEPELIKAEKWIGVDRNTVGHIAVVSDPETGKVIKLGKSALHIHQKYKSLRKGLQKKGKYGKVKQIKDRESRIVKDINHKVSRKIVDTAKESGKGIKLEDLTGIRNGKHNTKSFRYAKNSWSFYQLQNQIEYKAKLLGVEVAYVDPAYTSKSCSRCGLIGDRNKKSFKCPHCGHVDHADSNAGFNIAKRPCIGRSTKERDLVEGNTDIPKVALA

SEQ ID NO: 34489 - protein, 915 aa, unknown
  TnpB Polypeptide
MEAEIENPPSKRVRRRERPSVGDVCNDLRSNKHLTEATDVHPEKLEDARTVVSISLKKCLVDTERCTLAYIERMVDATTWASQRTMWMANLVVLKCLENDLEPPALTRDFLFKCFQYSCQAKMRGAIDKRPFDYDTSEIHQAQRAKVNARLKIQGVSLLKACMVKSYQDEVLTPQERDVALAVAGGKTQKREQEARALAMCDEMFVRIRVDAGFDDLTIWCPDSARPSKTKSGQIVKGAFEVAGLSDQMEQVIRAELVPNAITYISESYRQRRRVYIEDVMSKFFKTKAHTSRVATHMEQIIDGVVPALLDGVEIDWTPVRGRIRTDKLRKSFEEELKLAESGDDQNRTFRDECVDVIKCMKSIPATTENLKKQPHAFLRPMHYIQRQRCDALDWIQQVAAEVDGDAVNKPNVDRNEAVGDEEDEESDEEDEGAALTEGLRYDIKKYRSVFALLPMRKGHASFLFLDKKRAESMGLPVSDEDSWSSTIFKFSDSLAPDRLNRIIHNSFRTDGVQIKVSLQRPGCPSDILSKRGFAKLHSRTSDVLELERRGVFELTNTHSLDHTNLLKRGVVGLDPGVKDVYTSVMNSTAEIQRRDSHHISNDEWSHLQRTRLIRRKDHGWRTVSGIALRSPMENSILTGLSLRSPKVGRYTDLLVAVKYRMLNAKTMWSYQMRRNRRVYRFSRLIATKSATERACDAIIHHRRVFPRVKDHKRVKKTRQRRRGRTRKPKESLHTDVKLRPIVVFGGGQYASGGNGLASVPRKALIATIAHKTVVCIADENNTSQKCSDCGSQLVHPDLRPLVNNCRIGRERKFTIPQKRRLRQCTSETCSGIRSQSHADGVRETYHKHWNRDVNAAINILNIGIEWWTHHRRPRALCRKSSDSGTQSSPNSPCIQPDITLHTSKKRKKSLSEQE

SEQ ID NO: 34490 - protein, 388 aa, unknown
  TnpB Polypeptide
MVVQQMFRYRLYPSKKHKERLINSFKTCKEIYNFLLDTSIKTYKESGKTLRKFDYDKMLKGQFKMVYSQVAQNVSDRVHKAFSNFFRRVKDPKEKRKGFPRFKSRVNSITFPQSGFKFVSNKRLFASKIGNIPIVLHRVPKGKNKTLTIKQNKAGQWFATFACEVDIPAVKHSSTDKIGLDVGLESYAVLSNGEFIDNPRHLVQSERRLKLLQRRLSRKKKGSSNRRKARFRLAKQHIKVVNQRNDFMHKLSHRIAKSYSFIAIENLNVKGMLNNHWLAKSISDASWSNFIKCLEYKAVTSGSKLVKVNPKNTSKICSKCGTIVDIPLSKREFLCPNCGFACHRDLNASINILKVGTDCAKLNACGDTIRPSFGKASVVESGTICDNC

SEQ ID NO: 34491 - protein, 402 aa, Escherichia sp.
VKRLQAFKFQLRPGGQQEREMRRFAGACRFVFNRALALQNENHEAGNKYIPYGKMASWLVEWKNATETQWLKDAPSQPLQQSLKDLERAYKNFFQKRAAFPRFKKRGQNDAFRYPQGVKLDQENSRIFLPTLGWMRYRNSRQVTGVVKNVTVSQSCGKWYISIQTENEVSTPVHPSALMVGLDAGVAKLATLSDGTVFGPVNSFQKNQKTLARLQRQLSRKVKFSNNWQKQKRKIQRLHSCIANIRRDYLHKVTTTVSKNHAMIVIEDLKVSNMSKSAAGTVSQPGRNVRAKSGLNRSILDQGWYEMRRQLEYKQLWRGGQVLAVPPAYTSQRCACCGHTAKENRLSQSKFRCQACGYTANADVNGARNILAAGHAVLACGEMVQSGRPLKQEPTEMIQATA

SEQ ID NO: 34492 - protein, 532 aa, unknown
  TnpB Polypeptide
VQRLQAFKYELLPNGQQERQMRRFAGSCRFVYNKALALQKERHEQGQKKLGYAGLCQLLTAWRHSADTAWLADAPVHPLQQALQDLERAYSHFFAQRAGFPKFKKKGRSDSFRYPDPKQIQLDQANSRICLPKLGWVRYRNSREVLGTVKNVTVSKHAGKWFVSIQTEREVNWPIPQGGAVGMDMGIARLATLSDGTFYAPLNSFKRHEARLRKAQQALSRKVKFSNNWKKAKARLQRIHSQMANARRDFLHKVSTAICKSQAIVCIEDLRVRNMSKLAAGTADAPGKNVRAKSALNKAILDQGWYEFRCMLEYKLAWKGGRLIVVPPQNPSRTCPCCGHVSSDNRQTQAWFECVACGYENNADRGSGPEAFRGSGPEAFRGSGPEAFRGSGPEAFRAAGRRPFWSVPSTSLLAGYSCCETKGRTRPTLRSGCGWVNHPCQPGWPVDRTARAVGSRNPPRRLRKEPSMRSVVGISGLQAGEDVKRPQLPNTVQLTKNTVLLGEEPRVVALAARSAWERIHRLGKGRQMLTSE

SEQ ID NO: 34493 - protein, 374 aa, unknown
  TnpB Polypeptide
  misc_feature (229)..(233): Xaa can be any naturally occurring amino acid
MRKTVAVKLRPTPEQAKALKATLSAFAVACNQALKVAQDNQVKRAYDIHHLCYYIIKATTGLTANYVIRAIARVAASFGKKRPPKDFKPTSLDLDKDLIRFIPFNETVSIATLQGRMKIKLQLGNYQRHLLKGQKPTAGTLVYDKKKKTYHIHFVIDVPENPASEPEGTLGVDLGINRIATLSTGETMSGRNLNRLREVRQRTRSNLQRKETKSAKRVLKRLSGKQARXXXXXHVISKQIAAKAKAENKAIALEDLTGIRDRAAKGKRMRKMLGNWAFYDLRIKIEYKAKAAGVPVVLVDPAYTSKTCSVCDSIGSRRKHKFVCKSCGHSMDADINGAVNISRRGGRSLPLGNAVNPPEVSSLKTQVQAPTTTR

SEQ ID NO: 34494 - protein, 370 aa, unknown
  TnpB Polypeptide
MLKAFQYRIYPDSGQSEQLEKTFGCVRFVYNHYLEKKKTLYDKEQKSISKTDCNNDLNHVLKMEKPWLREVDKFALTNAVYHLDAAYHKFFRENAGYPRFKTKHSHRDSYTTNFTNGNIKALFEENLIQLPKLGKVRAKLHRRFEGQIKSAVVSRNPAGHYYVSVLVETAEKSFLPVNGKQIGFDMGIKEFLVDSNGIHIANPKPLSVYEKKLAREQRKLAHKKTGGKNWEKQRRKTARVHEKIKNIRNEFTNQLSHKLVEENQILISEKLMIRNMIKNHHLSKSIADAGWGDFLRKIEYKALWKGRIYHQIDPWYASSQLCSSCGKKKTEVKLLSVRKWECSCGAIHERDENAAKNILRKGLEELKEVS

SEQ ID NO: 34495 - protein, 444 aa, unknown
  TnpB Polypeptide
MQKRKFTVVTQLHDKNNSQIIEYVENSRATYAHAMRKTFQHIKHTNNFNKSAYNTYLQNQYSITKRTANSIISDAQGRLSALIELKRHEKQVLEHKIDYFETKVIPQLQEQHDDNCAMLRAGLFVNLIKHRNLKRKLVVKKNKLNHMKQKLSNLDYQLESGQVKICFGTKNLLNKDYAGFIEHRDNQMSFVGTKTETSGNQLLQLNYNKLNNQFNIKLRKDFGGFKTTQGNDKYAFGKVYFNHHKQEIISILEQKNSPLSYKIIKRYGRYYLYCTFEIQQEDTDIMTRSTHGVIGLDFNKGFVTLTETNAFGHMIQNQFLPYRFQQGYATKSDLQAIANYIVKLALTTGKDVTIEDLNFKRTKAKTESKRGKKYNEMIHSLAYRQFVETMESITYRNNVYLNKVNPAWTSWIAKNKYCPQMKLNTHVGASFVIARRGQGFRDKV

SEQ ID NO: 34496 - protein, 373 aa, unknown
  TnpB Polypeptide
MQVKRAFKYRFYPTDAQATELSRTFGCVRKVYNLALAARSEAWTLRQEQVTYNQTSAMLTGWKKTEELAFLSDVSSVPLQQTLRHVQTAFTHFFAKRAKYPRFKTRKKSRKSAEYTRSGFRFRDGQLTLAKMTEPLDIAWSRPLPEGIQPSTVNVSQDTAGRWFVSMLCDDPTIRPLPATDKAVGIDVGLTHLLTFSTGEKVANPRHERRDRVRLARAQRQLSRKARGEGTNRHKARRKVAKIHARIADRRRDLLHQLTTQLVRENQTLVIEDLTVRNMVKNHTLARAISDASWSAFRSMLEYKASWYGREVIVVDRFFPSSKLCSNCGSLRQEMSLSVRTWKCVCGTTHDRDVNAARNLWPPDWRRLSVELV

SEQ ID NO: 34497 - protein, 316 aa, unknown
  TnpB Polypeptide
VTDQVFCTPEQQQAAACAAVKTRARQRALDRSRRNTNFADYGPSVRQVARAQRRCPAGLPAKQVSNPAGPRNSRADGVPLRAYRRDTLSHRYRSLRSDHRSDCRKISQTNQSRACDVAVRIVAAHGNVITIENCRIFTWAALWGTRIAVFSPGMLVSALKRDCAATGGQLFRAGTRSTALSQHCRCRQRVKKTLDQCSHDCGQCGLRGDRDVVSATLAACVELTDAEDPRTARVDYELATVLRAWLAPRHERGGSVNRHQPPAPPDAVGPARTGSHHPVASAEHAALGSPPNRPGRKPGRRGGSRKRQPPKLFGAA

SEQ ID NO: 34498 - protein, 377 aa, Pontibacter sp.
MLKSYKYALLPTPAQQEQLQRFFGSCRFVFNLGLETKIAAWVQAKKNLTCIELANQMKELKDTDATWLSECPSQTLQMSLRNLDNAYTSFFKGGGFPRFKNRYSKQSIQFPQGVRVNFENQTVFLPKLKNVSVVLHRKFEGVIKTVTVSKTKTGKYFVSILVENQASIPAKKAITEQTAIGVDMGVKTFATLSDGASFANIRTLRTNLKRLRVEQRILNRRFRKGVKEQSKNYYKQRMVVARLHERVSNQREDYLHKVSTEFIRRYDTVVLEDLNIAGMMKNRKLALAIGEVGWHKFEMMLNYKAEWYGNNIIYIGRFEPSSKICSNCGTINKELKLHHREWTCVKCATTHDRDVNAARNIKTFGWRNQPASVNASQ

SEQ ID NO: 34499 - protein, 402 aa, Escherichia sp.
VKRLQAFKFQLRPGGQQECEMRRFAGACRFVFNRALARQNENHEAGNKYIPYGKMASWLVEWKNATETQWLKDSPSQPLQQSLKDLERAYKNFFRKRAAFPRFKKRGQNDAFRYPQGVKLDQENSRIFLPKLGWMRYRNSRQVTGVVKNVTVSQSCGKWYISIQTESEVSTPVHPSASMVGLDAGVAKLATLSDGTVFEPVNSFQKNQKKLARLQRQLSRKVKFSNNWQKQKRKIQRLHSCIANIRRDYLHKVTTAVSKNHAMIVIEDLKVSNMSKSAAGTVSQPGRNVRAKSGLNRSILDQGWYEMRRQLAYKQLWRGGQVLAVPPAYTSQRCAYCDHTAKENRLSQSKFRCQVCGYTANADVNGARNILAAGHAVLACGEMVQSGRPLKQEPTEMIQATA

SEQ ID NO: 34500 - protein, 436 aa, unknown
  TnpB Polypeptide
LEVHRTHKAKIRNHSQVSDSLDRHGWSASKLWNVANYHSREVWDETGEIPDHEDLKRELKTHPKYNGLHSQSSQRVLEELAEAFNSWYSSDDDRGNPPGYRKENYYDSEGRRVHEEHPRSTVTWKQKGIRHDTKNNRVRLSKGANHKEHPRAWEYILVEYETRPGVTVDDLQQVRAVYDQQKERWELHLVCTHEVETPDSPGTKTAGVDLGICNFAAVAYSTEEADLYPGNRLKQDGYYFPKEIAKCNDSDGDKARRLHHKWSERRTHFFHSLAKHIVQRCVEKGVGQINVGDLEGVREDENGRSKNWGKHGNLDLHSWAFDRFTSILEYKAKVEGIDVEDVSEEATSKTCCICGTEDESQRVERGLYVCDECDAAFNADVNGAENIRLDINESNSESSARLDEDRRTGWLAQPAVYLHDLSRGFEPRAEVVDCEP

SEQ ID NO: 34501 - protein, 699 aa, unknown
  TnpB Polypeptide
MLLTHETTIVLNKNDANIVGHMCYAAYKLWNVCNYERNNYKNLGLEKYPDWYYQKSKHKDDLWFKSLPSQTAQEICKLLDKSWKSFYRLKESGGIENPGTPRYKKDKMPITYMQNGIQHENGSYNVRLSLPKKLKEYMAHTYDIRAAYLYLKNPVFSNMDIIKQIKIYPPANDGTSRILVIYEVEDVLPEEDNGHYLSIDLGLHNLMTCYDNVGKTFIIGREYLSLSYFYNKEIARVQSQWGRIQAAREMEDLKTSKHLQKLYRKKNDCIKDYIHKMTRYITNYCVKNDIHTVVIGDIKGIRKERNLGRKTNQKLHSLPYARIYMQLKYKLKILLSKEYMRRIIIIENSGKVNFGGGQKITLQVAEILSKTCELVFVDFAKGTRFEQMINEKFPDSSKVLLKGRSFFFPFKYLNWLLDLVVLTCLFPGNLRKIKYYVTKKTLIYVTTKKGLLYAYMMKVMYGVPFIYHAHLVENTKSIFYFLYRSCLKKAEMSLCVSKAVYDTIKLPNKILLYNPNINDKGFKGRKNKDKFVVAAMGSLIKIKGFEYYIKAADKVSEKLPVEFRLYGEGPLHDTLETLSNGKVKFMGFSENIMNELYESIDIVVVPTIIPEALPLVLVEAKSVGLPAIVTNLGGQAEIIRNGIDGFLVPVGDSLSIKQYIEMMVKDRVLYNKLAEESYQSVSLFDYDLFKSTILKIFIV

SEQ ID NO: 34502 - protein, 379 aa, unknown
  TnpB Polypeptide
LSKNLYNAGLYVIKQEFLNTGKWIRCTDLNKKMVSENNPDFRALSGSSSQQILMGLDKNLKSYFSSIKAWKRDNKKFTGCPKFPKYKDKVKGRNVFNYSYAQIRHRGEYIYFPKKEGLPPLKTKCEEGSVKQVRIIPRQGCYVIELVYESCCKKQKVDNNRIMSIDLGVNNLASVVTNVSNKPVLIDGRKLKSINQYYNKKRSFLQSKLEKVNGKKNSRRLASLTRKRNSKVRDYLHKASKKIIDICVEDNITTLIIGHNDGWKQEVNIGKRSNQNFVFIPFGDFISMLKYKSERQGLRFFVVNESHTSKCSSYDLEKVCHHNTYVGKRLKRGIFRTKDGVLLNADVNGSYNIMRKVKGDAVMPPYTGFGYNPVKKFIN

SEQ ID NO: 34503 - protein, 335 aa, Natrialba sp.
LEIPVGQELKDEYGLGYHERLRLEVRGNPKWDGKQGRLELEYDEMSDTFRAFQPVTVPDSRLDSPLASEEAALDVGANNLVACSTTTGNQYLYDGRELFGRFRETTDEIARLQSKLPERRSLSESSETSGFADVAELRSAQSRKTESSGRLREGRYSSKRIRRLYRQRTKRRDHAQNALVRDLVERLYDEGVATVYVGDLTDVLETHWSVRVNEKTHNFWAFKKFIHRLACVCEEYGISLEAESEAWTSQTCPECGDHEETVRHEDTLTCSCGFEGHADLTASETFLRENSDTEVRPMARPVRFEWDDHDWSGKPHPHESPKEVRTNPQVASVGR

SEQ ID NO: 34504 - protein, 423 aa, Natrialba sp.
LHEGCLEARRVRNEVNRLDKEGWDWNDIHDTVVDNSYHVKNTTQLLVKKALKELETYHDHKDDEWGRPYPYIHETYPLRMNHNEGYALTVDDSGDIQFRISYKPYNYVKGVLRGSPDHLEQVKTALRSDAWRVGVAELVYKHDEWRLHVSVTHKSRTVAPPDNAGTVVGVDINEDCVALAAMNRDTGDVLDSVVIEYPEIKRIRHEFFTKRKRMQKVGQTAFENVVRTEERDFVHDHLHKVSRDVTRWVSQFNDPVLVFEDLKDMRDSLDYGTRMNRRLHSLPFAALRDTVTYKTAWNGVPSDDVNPEYTSQRCPRTECLHTERANRRRKRFKCKSCGFQDHSDRKAAVCVAQEWVADHDVNVPSLKTLPRVWKVRRTASGLCEGADAHGAVFASGVTDIGTSAQDSQSRARAELKPVASTAD

SEQ ID NO: 34505 - protein, 262 aa, Bifidobacterium sp.
LSRKLGSVRIRKRDRLRYPIESLSSWTVKRENRTYYLVLLFDVDIQPKTRAESRIGIDLGVKNLLTLSTGEKIDYPNRLRRLEKDVKREQRKLSHRTKGSNNYRRQKAIVAKAYAKLRHYRDNFQHQLSHRLIEENQFIGMETLMVRNMTRKARKRLDAEGRPMRNGQSRKRAMNRSILRDGWSGLVDKLSYKAEWYGRTLVQVDRFYPSSKLCHDCGHKYKGLRLSEREWTCENCHIRHDRDVNAALNIRDEALRLSWEEA

SEQ ID NO: 34506 - protein, 328 aa, Clostridium sp.
MKKLKRAYKVEINPTDEQKCKIHRTIGVSRFVYNFYIAHNKEVYEKEGKFVSGMDFSKWLNNEYIPNNQEMKWIKEVSSKATKQVIMNGDKAFRDFFKKAKGFPRFKKKKNQDVKAYFPKNNKTDWTIERHRVKIPTLGWVRLKEFGYIPVNSLVKSGTVSQKAHRYYVSILVEERDIKTSNSNIGIKISNSNTGIKISNSNNEGLGIDLGIKEFTVCSDGIKFKNVNKTSTVKKVEKKLKREQRKLSRKYESLKIRNKNIKEGRATGQNIQKQVAKVQKLHQRLANIRTDYINKTVFSIIKQKPSYITIEDLNASINLKNAKKYKIA

SEQ ID NO: 34507 - protein, 399 aa, Clostridium sp.
MKKLKRAYKVEINPTDEQKSKIHQTIGVSRFIYNFYIARNKEIYEKEGKFVSGMDFSKWLNNEYIPNNQDKNWIKEVSSKATKQAIMNGDKAFRDFFKKAKDFPKFKKKKNQDVKAYFPKNNKTDWTLERHRVKIPTLGWVRLKEFGYIPVNLIVKSGTVSQKADRYYVSILVEEIDIKTSNSNIGIKIFNHNNEGIGIDLGIKDFAICSNGNKFKNINKTSTIKKVEKKLKREQRKLSRKYESLKIRNKKEKGGNVTRQNIQKQIVKVQKLHQRLTNIRTDYINKIVSSIIKQKPSYITIEDLNVKGMMKNKHLSKAIASQKFFEFKTKLMSKCKQNDVELRIVDRFYPSSKTCSQCGEIKKDLKLSDRVYKCSCGLVIDRDLNASINLKNAKEYKIA

SEQ ID NO: 34508 - protein, 489 aa, Streptomyces sp.
LGGKFTSTWTWLSSPLNSTSSHSKSAHTDRMISSMRLKWASVNTLCRNLVTKTKWTCITKMQCLPVLMFCISPITQVCIVAAMQLRYSFRLYPEPGQRTALARAFGCARVVFNDALRAREDARKAQQPFPKIGELSTRLITEAKRTAERSWLGEVSAVVLQQSLRDVESAYRNFFASLKGDRKGPKVGAPRFKSRKDKRQSIRFTANARWSITDSGRLNLPKIGAVKVKWSRTLPATPSSVTVINDSAGRFFASFVIDTDPATDRARMPEADRTIGIDLGLTHFAVLSTGEKIDSPRFLRRAEKKLKKAQRELSRKQKGSRNRAKARHKVARAHAKVADTRHEFHHQLSTRLITENQGIAVEDLSVAGLARTRLAKSVHDAGWTSFINMLQYKAERYGRTLVKIDRFEPTSQTCSACGVKDGPKPLNIREWTCAACGTVHDRDHNAAINVKTAAGLAATACGAPVRPGAIPAQRAETGSHGIPTGNRAA

SEQ ID NO: 34509 - protein, 459 aa, Pseudospirillum sp.
VLTGIKLRANPTSGQKLVLSQWMGCARSIWNAKVDEERYYRTFARKYYPIGTYAPIDQKTSQFKSKELTPWLYKCPSQIIRNSAVNWYQTYQKFMKGACGRPKRKPKTDRGSLYLTREVFRFDRCEDGNLRLFIGTKTNNIGYLSFKAHAKFQIPNSLYVRKERGQYYVSFCYENEKDESELLSNAEHLAFLQGSTKEYLEEYTIGVDRGVAIPAHAGSMTFDFCDNQKKHMSKSDRYIKRLQRKLARQQKGSSRRNKTKHRIATHHAKKANIRNDFAHKASRSLVDCKAKVIVFEALSTSRMTRKPKARKDEQGRYISNKAKQKAGLNKSILNVGWHMIETYTQYKAYQAGKAVFKIPAPYTSQECAKCDHTHPDNRKSQELFVCGHCGNTDNADNNASLVIKKRAINLILDTGTVLSDDGVLQLKSDSGRGGNRKTSRAKSSTSSVQRSVKKEKLAA

SEQ ID NO: 34510 - protein, 371 aa, unknown
  TnpB Polypeptide
MILAKKIRLYPTAEQEYKLWQSVGTARFIYNWALNKQEENYKNGGKFIKDNDLRKEITQLKKDELPWLNEVSNNVAKQAVKDCCNAYKNFFKGLADKPRFKSRKKSRPSFYNDTDKLKVKEKSVLIEKVGWIKTKEQIPMSVKYTNPRVSYDNKYWYISVGIEEEQPTVKLTDVSLGIDVGIKDLAVCSNGMTFKNINKTKEVKRLKKVLKRKQRQCSRKYEQNKKGKEYVKTKNIAKLEKQIKLIYRRLSNIRLNYIHQVTTKIVKTKPSRVVMEDLNIKGMMKNKHLSQAVAEQCLYNFKVIIKYKCELYGIEFVEADRYYPSSKTCSSCGSIKKDLKLKDRTYKCSCGLNINRDYNASINLSRYGLAI

SEQ ID NO: 34511 - protein, 307 aa, unknown
  TnpB Polypeptide
MDIYRIGFKFRLYPNKTQRHLLNRTLGCARFVYNHFLAVRREQWRANHVALNYVKTSALLTDLKRREEYAWLKEADSMALQEALRNLDRAYQNFFKLHAGYSRFKSKHAHSQSYRTRNQGKSIRILGNRVKLPKIGAVKIKQSRTFDGRILNAAVSRAASGKYFLSLCVEMERSARQKTKHGGEIGIDVELKAFYSDSQGHAAANPRILRRLTDKLRREQRRLSHKLPRSENRRKQRIRLARVHERITNIRKDFLHKQTTRLVRENQTIAVEHLHIKGMMKNHRVAKAISDVSWHEFFRQLTYKTEL

SEQ ID NO: 34512 - protein, 283 aa, Actinomadura sp.
VTQRVRRSFRYRFYPTPEQAEHLSRTFGCVRLVYNMALEARIRARRDGRPMTYRDSSAALTNWKRNAEFSFLNDVSCVPPQQALRHLQTAFGNHLAKRAGHPRFKSRKRARATAVEPLEPTQQAVGLDAGISALVTTSAGEKVRNPRHERSNRRRLLKAQRVLSRRRPGSANHAEARLRLARVHARIADRRRDHLHKLTTRLVRENQTVVIEDLHVGGMIRNHHLARHRGCGAVHDRDVNAARNILAAGLAERRNACGADVRPQREASLLSGPSVTKQEFSFN

SEQ ID NO: 34513 - protein, 371 aa, unknown
  TnpB Polypeptide
LNKAYKFRLYPNKEQREFFAKTFGCCRFIYNKMLEDKIKHYELTKKMLRNTPAMYKNRYEWLKEVDSLALANVQLHLEKAYKNFFRDKKVGFPKFKSKRNHHQSYTTNNQRGTIHIKDGFIKVPKLKSTIKIIQHREIGQSEQIKSATISQTPTGKYYVSILVNYHKEEKEVIEEIKEFDPSKVIGLDYSMKELYVNSRGEHAGYPRYYRQSLKQLKRAGRKLSLCKKGSNNYNKQRLRVARLHEKIADQRKDFLHKQSRQITNDYEIVVVESLDLKAMSKTLKLGMSIADNGYGRFVEYLSYKLRDEGKVLVRVDKWYASSKICSCCGKKKEELPLSERVFSCECGNTINRDVNAGINIKNEGIRLLKAQ

SEQ ID NO: 34514 - protein, 300 aa, unknown
  TnpB Polypeptide
MPLFHLADAYDRFFKKQNHFPKFKSKRKSKKSYTTNFTNNNILIGKNVIKLPKVGMVKAVIHKLPKDDWKLKSVTVSQDSVGNYFASVLFEYEQEDIPSVSKSSTNAIGLDYKSDGLYMDSNGNKAGVHKYYRESHKKLVKEQRRLSRKAGSKKNETKSSNYFKQMRKVNRIYRKIANQRLDSLHKKSTEIANQYGIVCVEDLDMKAIGNKGFGNGKATFDNGYGMFLNMLEYKLKERGKYFVKVDKWYPSSQICHCCGSVKKLDLKDRVYTCDCGYTGDRDHNAAINILTEGLRILQSL

SEQ ID NO: 34515 - protein, 372 aa, unknown
  TnpB Polypeptide
MKLSETVKLYPTKAQKALITEAMTEYICTVNRLVSDARSGHSIAKITTADVSADLPSALLNQCIRDARSILRKHYKYCHRAVLKNRKLKKSGSELRVHAPSLSVLKKPCCYINNQNYKVKERSLEFPVMINGKSKRISVLVKLTDRQKTLFSDAKLGALRIVLKNHRLVAQIVYKIPEPELKTDGTIMGVDLGIKCPAVSYCSDGSVRFYGNGRKNKYIRRHYAYLRKKLQASKQMKAVKRMDNKEQRIMRDIDHKMSHDIVETAVTHHVKTIKLEQLQNIRSSTRKSRKNNHSLHSWSFYRLAKFIGYKAKLAGISVEYVNPAYTSQTCPVCGSVHHADDRTYTCKCGLHIHRDLLGARNICNSTEFVGNR

SEQ ID NO: 34516 - protein, 397 aa, Salmonella sp.
MLRATKVRIYPTPEQAEYLNAQFGAVRFAYNKALHIKKHAYQRHGVNLNPRKDLKPLLAVAKKSRRYGWLKEYDSIALQQAVINLDEAFSNFLNPKLKARFPAFKRKHGKQSSYHCVGVKVLDGAVKIPKIPAIEARLHREITGTLKSITISRSATGKYYASLLCDDGMEAPAKPALISNVTGLDMGLTHFAIKSDGNKIANPRHLINASHNLRRKQKALSRKKKGSANRRKARIQLASVHERVANARVDFQHKLSRAIVDENQAVIVETLKAANMMKNHHLARAIGDAGWNGFISKLEYKAVEKGVHVVKLDQWFASSKTCHCCGHKMPEMPLHKRIWQCPECGVEHDRDINAAINIERKGILELQAAGLVVSAHGGQRRSVTQTVAAYEVGSLAR

SEQ ID NO: 34517 - protein, 271 aa, unknown
  TnpB Polypeptide
VRVPKVGWVRFRWSRAVPPGVKSYRVTQDQAGRWQVAFASVPEPVPAPGNGQVVGIDRGVAISAALSTGEQLHVPGLTGQERSRLRRLQRKLARARRGSNRRARVRHAIARLRARETDGRKDWAEKASTDIARRFDVIKVEDLRVGAMTRSGRGTRENPGRNVRAKAGLNRGILRSGWGLLVRRLEQKAPGRVEKINPAFTSQRCSACGQVDGKSRESQAVFRCTACGYACNADVNAARNIAAGHAVTARGGYREAGPVNREPQLLASFRT

SEQ ID NO: 34518 - protein, 362 aa, unknown
  TnpB Polypeptide
MKQHLTIKLRLRDKHAAELNRQARAVNAVWNYCNEAQRHMLRWDRWLSAFDLMNLTSHSYLELNLHSSTIQRVCARYVKCRFAVKMPYLRWRGKKSLGWVPFNTSRVSFDGKTFKFRGVCYEPMHLRDLLIPGIKIGAGSFNADNRGHWYINVPIEIDCVNVASNSKVGIDLGLKNLAVLSDGDVVEAPQFYRKNEAAIATAQRAKKGKRARATHSKIANRRKDFLHKASTRIAKEYGLIVVGNIGPSKLAKTHLAKSIHDAGWADFKRMLSYKSIRNGGSTLEVSEAFSSQVCSECGSLPTSRPRGIADLGIREWTCSDCGTVHDRDVNAARNILHRGLAMLAEGASKSGSGQSCRVEAGL

SEQ ID NO: 34519 - protein, 394 aa, Anaerolineae sp.
MIRKGFQFRLQPTREQEQQFRQYCGSVRWVWNRMLAERSEAYKETGKSPSAYRQIKQLPVLKQVEETAWLNTVQSQVLQDAVLDLDDAFKRFFSKQNGYPRFKNKHGRKQSFSYPQGVKAESGRVWLPKIGWVKFRQSREIQGVIKRATIRHRASGWHVSLLCEIEIEIPDPVEISTKNSVGIDLGSIDLVTLSDGRKVSNTRHYRSTERKLARAQRSLSRKLKGSKNRYKQKQKVARLHEHVANCRKDDLHKLSSQLIRENQAVFVEDLNVLGIAKRMGKSVGDAGWSKLIRQLEYKAAWQGKTVLKIGRYFPSSKTCSYCGYKHSDLALSERSWLCPSCSAFLDRDVNAAINIHKEGLKLVAAGYTETINACGQRIRHSPSAALVEVRISRL

SEQ ID NO: 34520 - protein, 438 aa, Haloferax sp.
MGIEEVTKTARTRLCIESGERSWLKDARFTARDISNDTLRLKQDGYNKTEIQREVDREDFLRNNKCAVVAKALQAWNSYKELLNWWYDQDDTTVGKPSPPATDKKGAYPLVMAHTEGYRLTHNDEEGRIRFRVSPKPYKKVKGHLRGRPEDLNLIKSALTEDEWSLGQAELLYRDGVYYLHVTVKTEVEVPEPEDADTLVGVDINERNIALTALNRGTMETLGTLVLDYGSVKAERQRYHTITKRCQEHGQHSIHNQLGDKEERYTEWVLHRMSRVVVEFAQQFPNPVMVFEDLSGIRDAIKYGTYMNRRLHKLPFHKFEQQVRYKATWNQIPCETVESPYNSKSCSCCGHRGYRQGRRFRCTNDSCAVHQDHADRNASVNVAWRVWAKHAGVDVESVNYRTRKTQPSVRKVSLSGSGRSVNRPSSSREIASRGVLTT

SEQ ID NO: 34521 - protein, 514 aa, Mobiluncus sp.
VKKKEPSEQTSKTIFRMLPAYIPYEINEGKKKMLLATIDKAVELYGVHVKCHLRHLYETGEVEFLPNALNYPNNGMLQMWVQDIAFQTRNPVRLWRIDIDGEVLRILKSRFSGNEYRLLARLVKFKHNFGPIRPIEFRREDIGATDESVEEAYRLVLDVTRHVRKHRRPPGSIGKYGWLNLSKNYCATLDLKSGLSTGAVLIVSTLKKRHRVSVPISIPEYTKNRGLVPTGAVQIHRTPDDKIEVKIAAEGKGRPIELVPDLKVGIDVGAAVPIATSDGDLLGRNFWQHIQKMDAKLAKCWKGVKARGKTQYSHRYNKLQRQLSGYVKNEIRRMLKGYIHRVRPSVIVVEDLGDRVFANTKGFGSKRLKRLLQRVGRREFKLALNQYCEEYGIELVYVNPCYTSKGCECGYYGNDARPNQKTFHCPKCHRKGSADVHAAKRILSRCSVQGLSRSPQEPNWYSGSRKTAQEYQACLAAEHLHFCGEHWRKAGVQAPAEILGGVAEASLQAMTPVT

SEQ ID NO: 34522 - protein, 393 aa, unknown
  TnpB Polypeptide
MEKAYRYRFYPTTEQESLLRRTMGCTRLVYNKALAARTEAWYEHQERVGYSQTSSMLTSWKQQENLDFLNDVSCVPLQQGLRHLQTAFTNFFAGRAKYPNFKKKHHGGSAEFTKSAFRWKGGQVFLAKCTEALPIRWSREIPEGCNPSTTTVKLTAAGRWFVSLLVDDYTVKPLPKIDKAIGLDVGITSLIATSDGDKIANPNHFKQLRKKLKRAQKALSRKQKGSNNRHKARLQVAKVHAAITDARKDFLHKLTTRLVRENQTIVVEDLAIKNMVKNHKLALAISDASWGELIRQLAYKCEWYGRELIKIDRWFPSSKRCGNCGHIVDKLPLNIREWECPKCGMNHDRDINAAHNILAAGLAVSVCGANVRPDRESSKGQLRETRKGKKQKT

SEQ ID NO: 34523 - protein, 483 aa, unknown
  TnpB Polypeptide
VRRANTFNVRPLSHRGRLALIELLDSSAACFNEINYDRRQAYFSAQYEADDHHTVSELKDIVRDAASQERYRNKYIQQLSSSIPQQLERKNCRTWTGFLELLDKYRDSEDDEVTDKPSPPGYWKEDDRRQLHTVIRNDTYSVELGERSRLEIPLGTELKEKYGYGHNEKLRLEVRGRPHWEGPSGRLELVYDRNAESFTAHQSVGRRHTDPVRRFSDTPALATSSGEDSGKVAAVDIGANNLAAVVTSEGDHVVFHGRPCFKRFHDFTAAIGDLQSRLPDDRYFTERIERLYRRRREQRDHAQDALVRHLARWLVERGVEELYVGKLDDVREKHWSTTVNEKTDLFWAHGRFRDRLEDVLEGEYGITVDQENEAGTSSKCSSCGGENVHRSGDHLQCLSCGFEGHSDVVGAVNFLVEQTDAERGGPMARPAARGQNSPRDAIACLEWDDHRWRHRDHSTKEEPVNRSTAHERGNLAPGGTGTA

SEQ ID NO: 34524 - protein, 428 aa, unknown
  TnpB Polypeptide
MGRVTGRCYPAHNPRVRPGREGWQAVKVRRAFMYRLYPNAAQEKALDWTLDRCRELYNACLQERRDAYRMCGVSVSHYDQQYQLPAVKDVRPEYRKIGSQVLQDVTRRVDKAFAAFFRRVKEGVKGKKVGYPRFKGNYRYNSFTLSQCGWKLPSLDSGRLYITGMGHLKVKWSRPVEGTIKTVTIKRDADQWYVTFSCEVEMPDAPPVADNPAVGIDLGLEYFATLSTGEHIENPRHYRKAQAVIATRQQAFERKKKRVKLKDGTYRYGKNRAKAGIALKKAHRHVANQRRDLHHKVANALVDTYGAVAVEALSIDNMTKRPAPIPVGDGTYAPNGAAAKAGLNKSINDAGWGNFLLILQSKAASAGVVVVRVNPAGTSQVCSGCGAKVPKALDVRWHDCPHCGLSIQRDHNAALNILSRAGLVRSVV

SEQ ID NO: 34525 - protein, 325 aa, unknown
  TnpB Polypeptide
MDMAKDIFSEMGYDYVKVVPYQIKKIAVKDCYQALVNGCRKAKKTGETFKLSFRTRKNPKQSCYIPKQALKKEGIYHTIAGKLKISERSLLNYEHRDLRLVAEYDRWYVVVPLEFGNMSLMCSENQGNGDVVAIDPGIRHFLTYFSENGYFGHICGEYSVLLKLQLKIDRLISRMSKEKDKFKKRNLKRTVGKTRLRVRDLVDELHWKAIGFLVRNFSVIILPSFETSGMVKKGKRKLRKSVVRSMQSFRFYEFSQRLEMKCKEYGVLLIRSNESYTSRTNSFNGELMNIGSREWFVYDGVTVNRDVNGARNILLRAMRDSSAKN

SEQ ID NO: 34526 - protein, 407 aa, Alphaproteobacteria sp.
MIQRKACRFRLYPTPGQRQLLVQYAGACRFIYNLALEQRRDWYRPGRKFSYASQCRELTALRQEYDWLKAVPAQALQQALKDLDHAYRNWWAGRAAAPRPRRRSGDQGFRFPDPSHLDIKRTGRRSGMLKLPKIGWIRFRGWRPLPGQIRNVTITGLADGWYAAVQCERDVDAPQVENRSAIGIDLGVAVFAAMSDGRHVAPANAGRKTLKAMKRAQRALARKRRGSINRRKAVRRVARLHRRIVNIRCDFLHKISTSIAKSHGMVVMEALQVGNMSASAKGSVSQPGRRVRQKAGLNRAILDQGWSRFKALLRYKLIDRGGELIEVRPAYTSQTCAACGVVDAGSRRSQAVFACTGCGHEDNADVNAARNILRLGLEQRRMDNALQPVEGHRPERPAEAGTTRRAA

SEQ ID NO: 34527 - protein, 351 aa, Raphidiopsis sp.
MAVTHRGFSVIRQVLQRWKGYIRSWQDWQANPSKYVDAPKIPNYKHKIKGRFPIVVYNVYQGCPTMDQPSLVQGMCQLFESLFEGDVNDSIGKVRKLVEAMIIPRNNGSYLLKFTYEVQEPTTRSTQVIAGIDLGVNNLVALTTNSSTIRPLLVNGKPLKSLNRLFNRKRDLIGSYQSESQPSRRLGGITSKYHNRVDNYLHQTSSIVINYLKSNGIKTLVVGKNDEWEKETRMGISKRHNFMPIPYSRLISMLEHKCRLAQIELITVNEAYTSKCSAWDFEPIAKHQKYLGERVHRGLFRSANGQVINADLNSSLNIIRMYSSEALTAERIGSCGVQPLKVNPLARVKQI

SEQ ID NO: 34528 - protein, 394 aa, unknown
  TnpB Polypeptide
MIRRQGYRFRLKPTPADAASLRGFVGCSRFVSNAVLAMNELRHERGEQRLGYSAMCDYLVYLKTEYSFLRDAQPLQQTLRDLDRAYQRAFDPKLAARFPRFKKKHRPQGIRFPQGFKIDGRGVYLPKVGWIGFRKSREIDGIVKNITISFDGRDWYVTMQTEREVAEPVHESESAVGIDLGVAKFAALSDGSLVEAANAFKRYQQRLAFSQRRMSHKRKFSANWRKAKTTVSRLQRKIANIRKDMLHKASTTISKNHAVVVVEDLRVANMTASAKGTVEHPGTNVRAKSGLNRRIRDQGWGEFRRQLDYKLAWNGGTLLLVDPRNTSRTCATCGHVSAENRQTQAAFRCVACGHASNADTNAAINILRRAGQARIACGDSPLRESAKQETRRVA

SEQ ID NO: 34529 - protein, 500 aa, Streptomyces sp.
VKKFQPQPGFVVQAYRFALDPNATQEHALRSHCGAARAAYNWAVGWVTASWWQRKAEETYGIAEAELTEWRPWSLPSLRKAFNQAKTTDLRFAAWWEENSKEAYSTGLANASSAFDNYAKSKQSKRHGKRMGTPRFKSKRKARLTCRFTTGTIRVDTDGRHVTLPRLGTIRVHEPPSGLLVRVKAGTARILSATVRHERGRWFVSFQTEVKRDLEPVARPDAAVGIDLGVKTLAVMADSTGEIRTVPNPGHYERAGKQLRRASRTVSRRQGPDRRTGQKPSKRWEKANAARNKMHHRVANLRADALHKLTTKVAAEYGTVVVEDLNVAGMLKNRRLARRIADAGFGEIRRQLAYKTSRRHATRIVVADRWYPSSKTCSGCGAVKAKLPLHVRTYECDACGLVLDRDDNAALNLAALAAAAVTGTGVAGGQDTAPVVSKPRGADQKTRVTRTRRKASAVRAGGATCRTSGRRKRETVLKPRPSRFGDVTDLPGRNARDAET

SEQ ID NO: 34530 - protein, 363 aa, Firmicutes sp.
MLKTYKYRIYPASGQAAIIINVLTLCRYLYNCALEHRIQAYKRAGKTVNKYEQMAELPDIKSEFPKFKDVHSQVLQEVLKKLDKTFQNFFRRIREGDARPGFPRYKAENRYHSFVYPQPNSKMLPLGGTINLPKIGIIPIRLSRPLEGTPKTCTVVHKNGKFYACYSCEAEAQILPPTGNQAGIDMGVSAFVATSYGEIFEAPNTYRKAEKRLKRVQREVSRRKKGSNRRRKAVRKLAKTHEKVANQRRDIAHKTARILVNKYDLIAHEDLQVNNMLKNHHLAKNIQDAGWNLFFNILASKAEEAGRQVVKVPPAYTSQICSDCGQIVKKNLAERTHKCPECGLILDRDVNAARNILKIALAS

SEQ ID NO: 34531 - protein, 370 aa, unknown
  TnpB Polypeptide
MNVNRNYKFRLSPKGGNATRLQETLNTCCFVYNQLLEKRNDHYKKTKKTFSHFDCCKFVKDMELKTPVHSQILQNVSARLDLAYLGFFRRLKDKTGKAGFPRFKSADRYDSFTFPQTGFKIGKKKLWMSRIGDVRINLHRKMDGKVKTLTIKREGTHWYAIFSCDVEINPEKRKWKRAVGCDVGCIDFITLSDGTTVSNPHFLKQSQEKLSNIQAKYSNLKVLPRDNKQKIKAKQQLITVHCKIKNQRKDFLHKLSKKLVSEYSHICVENIKPSQMLNDNWRSLNKSIMDSGWTAFRTMLHSKAVEAGCEVVDVDPQYTSQICSGCGTIVKKELSERQHKCPVCNLNIGRDLNAARNILRVGMDSFAKVT

SEQ ID NO: 34532 - protein, 382 aa, Escherichia sp.
MRRFAGACRFVFNRALALQNENHEAGNKYIPYGKMASWLVEWKNATETQWLKDAPSQPLQQSLKDLERAYKNFFQKRAAFPRFKKRGQNDAFRYPQGVKLDQENSRIFLPKLGWMRYRNSRQVTGVVKNVTVSQSCGKWYISIQTENEVSTPVHPSALMVGLDAGVAKLATLSDGTVFGPVNSFQKNQKTLARLQRQLSRKVKFSNNWQKQKRKIQRLHSCIANIRRDYLHKVTTTVSKNHAMIVIEDLKVSNMSKSAAGTVSQPGRNVRAKSGLNRSILDQGWYEMRRQLEYKQLWRGGQVLAVPPAYTSQRCACCGHTAKENRLSQSKFRCQACGYTANADVNGARNILAAGHAVLACGEMVQSGRPLKQEPTEMIQATA

SEQ ID NO: 34533 - protein, 396 aa, Nonomuraea sp.
VGVRRSFRFLLRPTARQAAALAACLEDHRQLYNAALEHRRTAYAKAGVTVGYGEQSGELKHIRGDDPDGQGRWSFSSQQATLRRLDNAFAAFFRRVRDGRTPGFPRFKGQGRFDTVQWPKDGDGCRWDSQPAHPTATYVRLQGIGHVRVHQHRAVKGRVKTIAVKREGRRWYVVLSCDDVPAQPLPATGAVAGIDLGVASLVTTSGGEHVANPRHLAATAERLARAQRDLARKKRGSRRRRKAVARVAAAHAKVRRQRLDGAHKAALALVRAYDMIAHEDLRIAGMTRSASGTIEAPGRNVAAKAGLNRSILDAGWGVFLTILAYKAESAGRELIAVNPANTSRTCARCGHCAKDNRLTQAEFRCVACGHAAHADVNAAANILRAGLALRQASEAA

SEQ ID NO: 34534 - protein, 418 aa, unknown
  TnpB Polypeptide
LEKISGLSTKTFLERTYFLDGRIFCQQCRKCFRRDVEKIYRKSRVGRWRQWVLKAYKYRIYPNSEQRIQIAKTFGCCRFVYNQTLAYRKEIYEKEKKSVSKTDCNNYCNRELKKDYEWLKEIDKFALTNAIYNMDAAYQKFFKEHAGYPKFKSKHDSHKSYTTNFTNGNIAVDFETGKIKLPKLKAVKARLHREYSGQIKSATVSQVSSGKYYVSILVETEHKELAYTNHNIGIDLGIKDLCITSDGKVYENLKIIKKYEKQLVKLQRQLSHKGKRSKNYYKTKKKIALCHEKIRNIRKDYLHKVSHEIISENQVIVSENLQIKNMVKNHHLAKAISDVSWYELTRQLEYKAKWNGRKYIKIDTFYASSQLCSVCGYQNPDTKDLSVRTWICPKCGAEHGRDINAAKNILTEGLRQMA

SEQ ID NO: 34535 - protein, 373 aa, unknown
  TnpB Polypeptide
VASEHFDAAVVKYLAAACWVSEQVFESKELNSNRLSRELYGKVRKKFGIPSQLTCSLFRQVTATYKTQKALGKWSLATFKRPTLPLTHKRDFGRNRKGLTILGEPAILEHKAIPTTGWKDSKLKRVGKTWFLILAHEVEVPEPKSEGCIVGVDFGIKRLMVATNSANADTFFFKGGVLNHRRTCIRRARAAIQAVGSRSAHRLLRRMSGNEAAVTNDLLHCASKSLIGYAVSNGARRVVLEDLSNVRDSSLNKGKDLRSKIHRWPYANGQFKIAYKAQACGIATEFVNPANTSRGCAKCGHVSASNRKGLSFCCQKCDHQDDADRNASVNIRLRSIVAAQVGVTMRSLQPLKSSEPLDIVAGLSVTHGSLVSV

SEQ ID NO: 34536 - protein, 248 aa, Moraxella sp.
MKTLKLRIRDKHIGQLNRLSGSVNFMWNYVNDLSYKYPQRTGKFLSAYDLNEYTKGGGELLSLHSQTIQAINETHAKSRKQFKKAKLNWRTNNPKAKRKSLGWLPFKQSAIKHIATHQTGKKGLKSTLQLSLTKGQKPVIDLWDSYNLSLYQINTCQIVQDSRNRWYACLTVKDCPKQLCGTGSLGIDLGLKDGTTTSNGKKLQIKQTLKYAKKLAIVQRAGKKKRVRAIHAKIKIQGKIYNINSPQG

SEQ ID NO: 34537 - protein, 438 aa, Blautia sp.
MYSIEPKSFIKNEWKDFFVKVQRAEKHRIKKNNKFYLLIDDFCWKSKNMYNYGNYIIRQEFISTSKLKEEGFAEHANWIQYNALYQICKSSDSYVALGSIAAQATLRKLEKNWKSFFESIKDYQIHPEKYQGRPKIPKYLDKEKGRYELGINNQRCKIKDGYVYFGWKPLRCLNGIFKSKIPDDAKLIQCRFVPKKDEYVLEVVYEISLLNINKKKSQNIAAIDLGVDNLITLTTNCGTQPIVINGKPLKAINQYYNKVISDMRSDLKLRNDMNWSHKMQKITTKRNYKVEDYIHKATKIVIDFLKDNDIDTLVCGYNTGWKQETNIGKINNQNFVYIPHSSIIEKLSYKCENEGILFKTTEEGYTSGTSFLDEEDPCEENYDKSRRKYRGLFISNNGIPINADVNGSYQIMKKVFPNAFKNGVENAILHPIVVNIPA

SEQ ID NO: 34538 - protein, 366 aa, Blautia sp.
MAYKYRLYPNVEQRIYFAKCFGCVRFIYNQMLSDKIEYYKQTKKTLHNTPAQYKKEFEWLKEVDSLALANAQLNLQTAYKNFFRSPETGFPKFKSKKTHNYSYTTNNKGGNIYVSDRYIKLPKIGLVRLKKHRDFDGLIKSVTISRKPSGKYYVSVLVKRNEIEKLPKSECEVGIDLGLKDFAILSNEEKIGNPKYLSKSESRLRKLQKDLSRCQKGSKNRNKCRIKVAKQHEKIANQRKDFLNKLSKRLICENQTICLENLKIKEMMSNKQISKSVADVSWSEFVRQLEYKAQWYGREIVKISTWFPSSQTCSCCGYVNKKIKDTSIREWTCPNCHENHDRDINAAINILNEGLRIRTAGTAEIA

SEQ ID NO: 34539 - protein, 372 aa, Enterococcus sp.
MKKAHKIRIYPNQRQQIQFQKTFGCVRFYWNFLLDQRITNYKMKKENADYQEDKTTYAALKKMDEYSWLKEVEAHPLSQVTMDLNKAYKNTFKSNFGFPKFKSKKYSKKSYRTAMGMKVNNNYFYVSKVGWVKMAANLRFNGKLMSVTVSQSKSGKYFATFLVDTENFQKEPVEESIGLDLGIAHFCITSAGEKIDNEKFYRSIEKRLVIEQRKLSRRLEVAKKHNRKLDECKNYQKQKLKVSHIHEKIFNQRSNFLHQLSSRITDENQIICIEDLNVKGMVKNHKLAKSIADVSWSEFVRQLAYKCEWKGRTLVKVDQFYPSSQICSLCGHKDGKKELNIREWTCSNCGTHHDRDINASINIKTEGLSGIA

SEQ ID NO: 34540 - protein, 387 aa, unknown
  TnpB Polypeptide
MRTLLKSFKTEINPTEEQKVKIRKTIGTCRYIYNFYLAHNKELHENGKKFMSGKRFSVWLNNEYLPKNPDKLWIKEVSSKSVKRSIENGCVAFTRFFKHQSDFPNFKKKGKSNVKMYFVKNNPKDCRCERHRINIPSLGWVRIKEKGYVPTTKDGYVIKSGHVSIKADRYYVSVLVELPDNKTADNSNEGIGIDLGLKDFAIVSNGKTYKNINKSTKLKKLEKQLIREQRSLSRKYENLKKGESTQRANIQKQKLKVQKLHHKIDNIRTDYINKTIAEIVKTKPSYITIEDLNVSGMMKNKHLSRAVASQKFYEFRIKLKAKSRENGIELRVADRWYPSSKICHCCGMIKKDLKLSDRIFRCHCGYVEDRDFNAALNLRGVKTYKIA

SEQ ID NO: 34541 - protein, 480 aa, unknown
  TnpB Polypeptide
MSQKVRIDGVKHTGASVFLGVDHCNNPYWTRNPERIMVWLCDGWRTRFNQRREQRTHNIPVKDDATGEVVDWLKEPLGGPDVAELLPDKEARLQCPWMAGIPAPILSSTDRIESIEWFAGLKRRKTVGGRIPGFKSRHRGLGFVCWRNASKTGNAIFHKTGRKSGVVAITGMNPSRWRKPGEKLHWRVIIHVRVSQPIRPYTSVHVDWTHRSLVFVNMPLPLPRTGDGAIGLDRGCVHTLASSDGTFMDMPKPSKAELKRLKYLQRRMSRQDRVNEARGGRTAKFASKRRQKTLSQFNVLQGRIVRRRNDWIEKTTTRLAKENVLVAMEDLDVQAMTKRPKPRPDPAKPGQYLHNGAKAKAGLNRSILSNNWSRLYGRLKDKMDANGGRLVIVPAAYTSQTCHKCGHVAKGNRESQAVFRCVECGYEANADTNAAMNILGRALVKTGGAPPRTWRDRNGGPMKRQPPHFHRPEVPLESGL

SEQ ID NO: 34542 - protein, 477 aa, unknown
  TnpB Polypeptide
MRGVRVPLDPTPAQEQLLRSYCGASRFAYNWTVATAKENRDTRGEERPAGTDEVDLTKSISWSAWSMTPLWNSVKDEVAPWHHDITMHAFRCGVTNASTALKNFHESKMGVRRGQPVEFPKFKNRHSKQSFTLVEFTRCGSWFSKDSRHVRLILPRFATDPRITLRRKQLQWIHTTESLCRLKKKVTSGEWTVQAMTISFTGGRWQASFSVRQLVDPAPSAIRLLGPIVAVDLGVKHLATLSVPVAGLSDASGHVENTRHLDAELGRLAKLDRQLSRCVKGSKNRAKIKRRRQLLLGRITRTRNLCQHHLTTTLVGSFETVVIEDLNVAGMVKKSEKNSTKELRRSILDAGRYELRRQLTYKAEDRGHRVVVVSQFYPSSKKCSHCGETKAKLARSERVFECSTCGITLDRDVNAARNIRDEGIRLLTSEESTVAGHQPETLNADSRDRESEPLMRGRGNRHQSRTTQPARELSPLA

SEQ ID NO: 34543 - protein, 386 aa, unknown
  TnpB Polypeptide
MRKLLKNFKTEINPTVEQKIKINKTIGTCRYVYNFYLDYNKALHDKGEKFMTGKSFSVWLNNEYIPNNPDKVWIKEAYSKAVKRSIENGCTAFTRFFKHQSAFPNFKKKGKSDVKMYFVKNNPKDCRCERHRLNIPTLGWVRIKEKGYIPTTKNGWKIKSGTVSIKAGRYYVSVLVEIPDTKIANNSNDGMGIDLGLKDFAIVSNGKTYKNINKSAKVKKLEKKLRREQRCLSRKYENLKKGESTQKNIQKQKIIVQKLYHRINNIRTDYINKAIAEIVKNKPSYITIEDLNVSGMMKNIHLSKAVASQKFYEFRTKLKTKCDEKSIELRVVNRWYPSSRICHCCGAIKKDLKLSDRIYRCDCGYVEDRDFNAALNLRDALTYEVA

SEQ ID NO: 34544 - protein, 467 aa, Nostoc sp.
MSKKKTKRHKPKKPLELIRTEVWDLVTLKSEKEQMLLTIEEYRKYLLPLVIIVNAQWLNLSDLTAKDRVNAVEKMIHKTADNPNPKHKYFQSIIKTHPSHRKFPSYLRRAAIADAMGIVSSFQTRYREWQSGVRARKDAKPPRLTTFVHTYPALYKGQQIRYNLNYQSCDIKVWSGTDWVWLSGIKVKRHGLNRHLTDGNEICSPALVVNKNKCQLSMPVKIEKKNLEDSDYVVSVDLGINNAATCAVVGKDGTVKARKFINSARDIDRRNQRRMMIARKSRQTQNITKTKREKGFCKGLYRKSSHINLEISRKVATCIVEFAHSQSVKVIVIESLAGWKAKAGKKGSLLKQKFHLWCHAKIVEIITDRWAELGGQVQAINPKYTSAYAFDGSGKVKRNKNNYSLAVFKSGKQYNCDLSASYNIGARYWYCLIQGDKTFSRVFVSKSSNDTLRTPVTLGTLRSLKAA

SEQ ID NO: 34545 - protein, 334 aa, unknown
  TnpB Polypeptide
MIDVNGPQAQYDAKERCLETAKAGVKYEYTKNVIQEIIGDNIVEPTRSNTPLDFVIKDKNTGVPVGGIEHFHVSLIYESAEGNQRKSTAKKHEEQAKELFNKHKNSSEPQELSTAFNELLLLASNSINDRRKFDYKNYIEQLRCQTEKHFRKIRTYYGNEHPNHKYLQKAEAKLKREQKKLSRKKKGSANWEKQRIKVARCHEKITNKRKDTLHKLSSTLVKENQIICVEDLNVKGMVRNHNLAKSISDASWGEFFRQLDYKSSWAGRVVVKVPTFYPSSQTCSCCGYQNKEVKNLNVRHWVCPKCNTSHDRDKNAAENILKKGMDMLAMPAAS

SEQ ID NO: 34546 - protein, 412 aa, Halopenitus sp.
MRIVFEDGTLLLENAPESVPYAEWDDRVRNIEHKRIITRPCERGRRSTVGTKRHFTNRTRLLKRLKIQRAPTAISICRLPLRSNPAITNKPPGYRKRGDRHPRSTVTWKQNGIKHDDKHGQLRLSKGWNLKDGRSDFILVEYETRPDVTVENIQQVRAVWTGDRWELHLVCETVIPVEDAPGDNTAGIDLGISNYLAIDYEDGPSELYPGNRLKQDKHYFTRDEYQIEGENGPSKRARRARRKLSRRKDHFLHTLSKHIVERCIEEEIGTIAVGDLSDIREDDDGDSRDWGQRGNKKLHGWEFDRFTRLLEYKAEAYGILVDRVDEENTSKTCSCCGQIRDANRVERGLYVCNSCATTMNADVNGAVNIRRKITQTPPTGDMSNGCLARPGVYLFDTTTGAFHPQEQADCKP

SEQ ID NO: 34547 - protein, 363 aa, unknown
  TnpB Polypeptide
VAPWWAENSKEAYSSGLDALARALKNYADSKRGRRAGQRVGFPRFKKRGRCRAACRFTTGPLRVEPDRHHVTLPRLGAIKTHESTRKLARRIEPGTARILAATISRTADRWYVSFTVEVDRQLPVGAGRARVVGVDAGIRHLAVLSTGQTVDNPRALQRSLRRLRTANRAHTRTQPDSAGRRKAAARLARLHARVANVRRDALHKLTTTLATTAGTVVVEDLNVAGMARNRRIARALADTGMAELRRQLTYKTRWYGSVLVVADRWYPSSKTCSACGLVKAKLALAERRFTCEACGLVLDRDLNAARNLAGLVQQVAGSGPETQNARGADRKTPPAGQVAAKREPRAAPAGKTGTAASQDAAD

SEQ ID NO: 34548 - protein, 399 aa, Granulicella sp.
MERQQAFKYELMPSSEQQRRMVCYAGCRRVVYNKALALQTANHAAGNKFIRYESMAKNLVAWRADEATIWLSEAPYHTLQQGLKDMEKAFKNFFARRTDFPRFKQKGQHDSFRYPDPKQIKLDKANSRIFLPKLGWLRYRNSREVLGSVRNVTVSLRNGRWFVSIQTAREVQQPIAQGGAVGIDMGVVRLATLSDGNVVPSLNHYKQHAPALRKAQQALSRRKKFSNNWKKAKARVQRIHVRIANARRDYLHKASTTISKNHAMLVVEDLQVSNMSRSAAGTVEQPGRNVRAKSGLNRSILDQGWAEFRRQLEYKVLWQGGVFLAVPPQNTSRTCPCCGLVSGDNRKSQAVFACVDCGYSENADLVGAINILRAGHARLACQVNGEVSRQQQEPSERAA

SEQ ID NO: 34549 - protein, 420 aa, unknown
  TnpB Polypeptide
MKADMGRRYRLYPTLGQAERLTGWRHTCRAMWNVALAQRQFVYAQRGTRLRAAGQCRHLTQARAELDWLADLPAQSAQQILAHLDRAYDNWWDPEHPTGPPRFKKRRDELSVPFPGQAVAVRKLNNRWAEVRLPKLGWVQFRLSRPVGGVVRNATVSRDALGWHVAFGVATGARPVVPNGLPGCGVDFGVACSAYVSTETAPRLMPPTLTEGERRRLLGLERRKARQVRWAKRYNRGSYSGRLRRTIAEIARLRARQARRRADFTHKLTTDLAKRHGWVGIEDLRVTSMIASARGTIEQPGSNVRAKAGLNRALLDNTPGERRRQLVYKAPRFGSELRLVPPQATSDTCATCGHRDSASRPGCGRVFACTGCGHQAHADANAARNIEQLAAGRAVDSTRSHPRVARPARSRMREPLGSAP

SEQ ID NO: 34550 - protein, 364 aa, unknown
  TnpB Polypeptide
MPSYLRRAAIQHALGSVSSYKTRLELWKKMDKKGGTPKLVCGNHAMPVFYRDVMYREDTEEKDGAYLKLYDGHDWKWFRVSLSHTDMEYLRKYWAGKRTAAPVLEKRHRKYFLRFSYTEEVPLTKAPVKEQIICSVDLGINTDAVCTIMRSDGTVLGRKFIDFPSEKDRMYRVLGRIRRFQREHGSVQVKSRWAYAKRLNTELGRKIAGAVAGYAEENHADVIVFEYLETKGKISGRKKQKLHLWRKRDIQIRCEHQAHRRGMRISRICAWNTSRLACDGSGTVVRDPGNHSLCTFQNGKRYNCDLSASYNIGARYFIRELLKPLPATERSLLEAKVPSVKRRISCVYADLRELFSEMELLRAA

SEQ ID NO: 34551 - protein, 394 aa, unknown
  TnpB Polypeptide
MQLTEIHIIKNNNIFFKECDDLAFKAKNVYNSALYLIRQYYFDNKKYISISESYKGLKNTSDYKSLPAKVSNQCLKLADKSFKSFFALRKKGLKANIPKYKHSLTGRQIVIYEKGAISKKEFVKNSVIALSKTEIKIKTQIKDFDLINQVRIVPCLNYYKIEIVYTKAEKNKVNSGLISACDIGLNNLATFGFNDGSTPFIINGKPLKSINQYYNKKVAKYKSKLKNNKKTSKRIQKITTKRNNKINDYLHKASRKLVNQLVSKNIEIFVIGQNKEWKQEINIGKKNNQNFVNIPHSKFIEMLSYKCQLEGITLINREEAYTSKCSFLDLEPISKHDVYMGKRIKRGLFKASDNKLINADVNGMYNIMRKEFPNVFDNGIEGFAVHPVVLTIKK

SEQ ID NO: 34552 - protein, 359 aa, unknown
  TnpB Polypeptide
MKLTKTIKASVINLTKNKKELLDNDYFNYQWWMIFGIDNGLLSCFKSHKWFKQKTIKYKEYALPLWSVLIKDWFRKRETKLTKDWIKIPCSKKKGQGLWLPLKFHQELPKEFTLKDSYLTRKQDKYYIYFAVEIEIPDSYAPKNVIGIDLGLKNPVTLVNINTKETKFLGKELKQVKGKYYYLRKKLGKEKNLKQVKKIKNKEKRKINSILHKISKSIVLNAYDSKSAIVIGKLNNLKKDKGRKFNRKLSSFSYYKLTKFIEYKSKEKGVPFYKVNEAYTSKTCSACGIIGTRTKNWFKCECGYEDNADRNAAFNIGKRGLSYMFGSGATAFAQKPNQIRQAQKHLNVVLPINVQDLKS

SEQ ID NO: 34553 - protein, 439 aa, Halorubrum sp.
MLEVHRTHRANILNHSQVEEPLDHHGWSTSKLWNVANYHSRNVWDETGEIPDHGDLKNELKTHPKYKGLHSQSSQRVLEELAESFNSWYKKRKSDDRANPPGYRKKNYYDDNDNRVHEEHPRSTVTWKQNGIKHDSKNNRVRLSKGANHKEHPKAWEYILVEYETRPGVTVENLQQVRAVYDKAKGRWELHLVCKDEIETPNAPGEETAGIDLGICNFATVAYSTEEADLYPGNRLKQDGYYFPKEIAKCDDSGGSEATRLHAKWSERRTHFFHSLAKHIVEKCVERGVGRINVGKLAGVREDDNGKSKNWGKHGNLDLHGWAFDRFSNILEYKAEVEGIEVVEVSERDTSKTCCVCGREDESQRVERGLYVCEACDAAFNADVNGAENIRLDITQSNSESVPGLGGDRSTGWLAQPGVYLYDLSRGFLPREQVVDCKP

SEQ ID NO: 34554 - protein, 291 aa, Halorubrum sp.
LKDEYGLGRQERLRLEVRGEPNWTEYDKQGRLELFYDENAQTFRAFQPVTIDNSRLVHPLADETAALDIGANNLVACTTTTGQRYLYEGRDLFERFRETTREIARLQSLLDDGRYSSHRIRSLYRRRTRRRDHAQDALARDLIERLYEDGVATVYVGALTDVLDTHWSVETNAKTHNFRAFRAFIDRLACTAEEYGISVEVRSEAWTSQECPNCGSTDRTTRHRDTLTCLCGFEGHADLTASETFLKRQTTVTRPMARPVRLKWNDHEWSESPRSCSNEERTNPQVASVGR

SEQ ID NO: 34555 - protein, 452 aa, unknown
  TnpB Polypeptide
LLTGIKFQAKPSSVQASVLRQWQGCQKFIWNAKCDEDKYLRAFARKYLPIGTYPEPDQSYSQYKDKALSPWLYDCPSQILRNGTTNWYNTYRKFIKGICGRPKHKRSSNQGSVHLTNELFKIFKENGRWVLEVGTKSKPLGRLNVKFHRAFKIPKSIYIKRNHNRWSVSFCYEDGMSNNYTREAHLKYLQGATRDQLENKVIGIDRGIKRPIQFGETKVNYTPEQIKKMRGHDRHLRQLQRKLARQQKGSKRYAKTGARIARKKSQQANIRHDFAHKASHQMVTSTKSVLVFENLKTKNMSKSAKGTAEQNGKRVAQKAGLNRSILAVGWHIIQSFTEYKAEKAGKAVFYISPHHTSQECANCGHTHSDNRKSQAHFQCVRCNHTDNADNNASAVIKKRAINLILDSGTELSDKGILKPASDIGREFSNKTHTKSKCARTKKRQKRKLSLAA

SEQ ID NO: 34556 - protein, 407 aa, Synechococcales sp.
MFTMNFRYRIYPSLEQETRMVSWLEACRGVYNYALRERKDWIESRKCFADRCDMKQCFILPADAPYPDYYKQQKALTAAKKEFPRLKDVQSQVIQEPLRRVEMAFVARKDRGHGFPRFKKFGQYRSFVFPQFKVNPVCGNEIKLPKIGLMPIVLHRPIPDEFVVKTVRVVRKHSGWYAVLCCQTGVDIPEVAPTLGHSIGIDVGLSYFLSTSDGWQVERPRFFGKLQRKLELLQRRLKRLQKGSNNRAKLIKKIGKVHEQIAASRLDWQFKLAHKLCDQARNIFIEDIDFRIMVKGFLGKHTLDAGLGQFLNQVLPWVCFKRGVYLGKVDPNGTSQTCPDCGARVKKDLSVRVHDCHECGSKKPRDVASGEVIKARGLSGIEMVCGWDLSGVALAVLPRQDRVKQKV

SEQ ID NO: 34557 - protein, 276 aa, Fischerella sp.
  misc_feature (41)..(101): Xaa can be any naturally occurring amino acid
VFTTKPACSDGTIIDDPKFLANTQQKIEQTSKKLRRKRAPXXXXXXXXXXXXXXXXXXXXXXXXXXXXXXXXXXXXXXXXXXXXXXXXXXXXXXXXXXXXXQISKLQNKVASQRQDWQHKVAAQIVSGNSLVATEKLNIKGMTRKAKKGSKGKHQKTGLNRSLLDVGIGNLISLIRYKLDECGGVFVDVPFKIAPSQTCPQCGYKKKKELSQRVHNCDNCNLIADRDVAAAMVMLNYAKGLGTSLSNADAEPLSKNPQPCGGFRKVQQLKRQKPRT

SEQ ID NO: 34558 - protein, 404 aa, unknown
  TnpB Polypeptide
MHRVHKIKLDPTQEQAIYFARACGVARFAFNWALAAWKEEYEAGGKPNEAALRKRLNAIKAEQFPWMSEVTKVAPQNAIKNVGVAFKHFFRRVKQGGQPGSPRFKRKGVRDSFRADNGPVNASCHAVECSGKTVKLPKCGVVRMREPLRFAGRTLAATVSKQADGWYVALLVDTSDCLSGPLNRGSVGVDLGIKELATLSTGEVIPSLKPHRAAHQRLVRLSRSLSRKQKGSANRAKAKTKLAKLHQRIGNLRIDALHKLTTKLATEFDSIAIEDLNVSGMLKNHCLARSIADAGFAEFRRQLTYKATMTGATIVVVDRFFPSSKTCHSCGTIHALKLSDRVMVCDCGNIMDRDLNAAINLKNKAASSAVSACGEESSGHCITVTKLSSAKQEIAGFHSNVQTL

SEQ ID NO: 34559 - protein, 575 aa, unknown
  TnpB Polypeptide
MLKKDYSTYCTHVSLDASTEAAVHDFMQSWLHYQTHRTVNLKKSGLLGKYDKADCDRYRKSQIFENKQKQVLEKFDARYSRAMDIDIQARAESSLECKAIEIESKQIKLEKLKKDVQKALEKYQNRQDITHEGNRELLHQAYNYYYRLLGKQQRLEGRIETLKKEIEAQKVKITFGGKALFHQQFKEGVDFKAWQQAWSNRGDRFECGGSKSEEFGNKKMHLTFSKDYDPSSGKRPRFDLRIMLPACLQEAHGQSITFRNIVFRYGEGIIQRNVLAHEAYRQAKSDYEKAKRRVNKLKDKEEKEQALKALGDSPKADDFGALSFAFQVLRKGKHYYLHVSIPKVPKPKITHAQNGVMGLDINHDNLSVANVSKGGQLVDSKVLRFNFGPKHSAAHREQMINQHLKALVDEALAKKKDIVLERLDFTHKKSMQTKGLDKDTNRMLHSLAYRKIKENLRRLCLDNGVGYKEVNPAYTSMLGRFLYTKRYGISTHQAAAYVIARRFLQFEERFHSKTLSFIYKDRACHLELPEGMIKEQDKLKPFQFWGKLYRWIAAEFKAPSRFYKPTLCSDSSPAC

SEQ ID NO: 34560 - protein, 352 aa, Lactobacillus sp.
MTLRAIKTRIYPQIDQQAKIINNFGCCRFVWNQLLSMQIERHNNGGSYVNEFGMNYLIKCLKQEYPFLKQAESTSLLHVSRDLHHAFQKLFKEHVGFPKFKSRKFPKQSYQSNSVNHNISQIDQHQLKIPKLGRLAFKSGRQLTGKIKNVTIRLSATGKYYAIVLVDNDVQELPKTKQAVGIDMGVADLMITSDGVKYPTIRFDKALSQKKHYWEKRLARRRLQAQKEVSWDKHNQVLEPCELNDFSNYRKARLMVAKYNEKIANQRNNYLHQLARAIAKQAWRELRTQLEYKCAWYGKQLVTVNPRKTSQICADCGYDDGKHGLAIRQWTCPKCGINHDRDINAAKNILHA

SEQ ID NO: 34561 - protein, 379 aa, Lactobacillus sp.
MTLRAIKTRIYPQINQQEKIINNFGCCRFVWNQLLSMQIERHNNGGSYVNEFGMNYLIKCLKQEYPFLKQAESTSLLHVSRDLHHAFQKLFKTHVGFPKFKSRKFPKQSYQSNAVNHNVIQINQHYIKLPKLGRIVFKSGRQLTGKIKNVTIRLSATGKYYAVLLVDNDVRELPKTKQAVGIDMGVTDLMITSDGVKYPTIRFDKALSQKKHYWEKRLARRRLQAMREIAWDKHNQVLEPRELNDFSNYRKARLMVAKYNEKIANRRNNYLHQLTKKLVMLYDVIKIEDLKTKNLLRNHKLARAIANQAWRELRTQLEYKCAWYGKQLVTVNPRKTSQICADCGYDDGKHGLAIRQWTCPKCGINHDRDINAAKNILHA

SEQ ID NO: 34562 - protein, 418 aa, Lactobacillus sp.
MSKTMAQLPYHYGVKVRVFPATEQKRLIKHNSDASRFIYNEMNGMNRELLMLRQVKIPITMVQQRIQTLEQRLKSPATGISNIHGWLNDHDLDSLMKANAIKNYRAAWNLFRKVHQSGTPVFHKKQTEQKYQTSCLYASKVGNPGMANGSVRLLDQQHIQLPKLGTLRFKGMPTKLLNRQDDVRIGTTTISMDATGRYYISMQLASERPFVSEVKNKTAIAIGIDLNIDNFLTDSNGNIVANPHYYRSIKGKLAKAQRKLSRRALRAKKEHRPLRNAKNYQKQRAIVATIQRKVANRRKNFLHLVSTTLIKNHDLVVAEELRSKNMLRNHALAMSIADVGWRTFLGMLSYKADLYGQKFITVNPRNTTQTCADCGYLMHGDEKLTLADREWTCPQCGVHHIRDWNAAKNILAKGSTSA

SEQ ID NO: 34563 - protein, 455 aa, Streptomyces sp.
VSTATERVKREVLGIPEPRKYRGAAPRALTGRAPEPGTQQRVYRYRFYPTETQTRQLIQTFGACRWVYNEGLALRANAWRDHHVSVGFAETSRALTGWRRAAGTSWLRDVSSTVLQQSLRHLDSAFTRFFRGTAKYPKPKRKSRSRDAATYVRTGFRYREDPERPGTGSIALAKQSDPLDVRWSRPIPAGLTPVKLTVTRDRAGRFFLHVLVEERIAPLPAALVPGADAPKAAGLDLGLAALVTLDDGSTVQHPRLLRKYEKRLARLQRELHRKQKGSCNRRKVRGKIAGLYALISDVRGDGLDQLTTRLVRENQVLVVEDLAVAHLMRSASGVGRRRKARLSESIADAAWGELLRMLRYKCAWYGRTLVIVDRFFPSTRRCSACHAKGERLPLSTRSWTCAECAVTHDRDVNAAVNLRDEGLRLYREVAMALPPGRLPPAVIRASKPAKGAAAV

SEQ ID NO: 34564 - protein, 406 aa, unknown
  TnpB Polypeptide
MGEVRRTVIIKLDVDDSDATLLHKTVEEYLWACNYVVQDAWQDDYKPTSKPKLHDRTYSDVREQTRLQANLVQSARNRAAEAIKGVVARWKNDKKASQPHFTTASVRYDKRSATFHDDYVSLSTVNGRIEVEYVLPPEGDNPHTRYLRNDEYEVTGATLQYRDATDTFFLHIGTKAEMESEMPDDSEGDAENSTVLGVDLGIEQIAVTSTGQFWSGDYLNHRRQEYERVRGDLQRTGTESAHRTIEQMGDRETRWVEDYLHRISAAIVQEAISHECDRIAFEELTDIRERMPGAKKFHAWAFRRLYDYTAYKAETEGIDATQVDPAYTSKRCSKCGTTLDENRPSQAKFCCQKCGYKVNADYNAAKNIGFRLLRAGQKSPHGGATRHLALKSGTLNVNGGYLPASE

SEQ ID NO: 34565 - protein, 601 aa, Actinomadura sp.
VFVMLQSATGHEGGAVGVAPPAAQTAIEPAAEPGAGAGARRFRGKNKGPAWRRPDDGAVTVVRLRLVPDLAARHRLEQLYAAAWSLKRALRRDARSRAVAYRAGYRRRRTPADAKRWRARLGLSREALERAAYRHLDASGHLKHHLSKAVAMHLADEVWTGVERHLFPDASGKRHGLPKAGSWWDFTRIPGRARSHTRARKWETFRLHGTLSGHLAAYPSSGLPADITPGRAAALPPGTSVLVQSRTPQAPEPPRSRGRGKRVWWEHDGPLAVVFAGGPDGRRGDLVVPVRLPQGAGQWPHLVHTLGDPEAWHKVDLVRRRAPSEPGGWTYEAHLMVLKAAFVPDSTAARRAAAPAGRRGGVDGNVSNLAVVSVSTNSGTVPPADLAGVVSSRVVLPEGERVRIERRERKRRGRRRALERSRRATNTTQYQLGKRQAERERRRRAAGLLPKQVQVPGGPRLARADGKPSRSHRRDTLSTTYIRLRAADAAAGQRAAQSRATRARQIAGQLVGVHGPDLVVEDCDITAWFRLWGRACARFTPGMLITALAAECAATGGRLLRASTRTTALSQHLPWRTPPPPNPGRPHPPLPGRGRRLRPGR

SEQ ID NO: 34566 - protein, 406 aa, Natronolimnobius sp.
VADDDFLRRTAITRLLLSDHQRQILEQTLREWQMACNISSRIGWNAGESRKMQLQQLAYEDVREQTRLGSQHAVLATHQAAAALSGIEEIESLDEEYDTSRPTFTSDTLVYDSRSMTVFDDDSVSLATVENRIRCDLSLPDDSDGYQRRYLESEEWELTESTMSKRDGDWYLHLGFRKPNPQPKLETNDGNRTVLGVDLGIVNIATTSTAYFASGRELRHRHREFDRIRSNLQRIGTQSAHRTLEQISGRESRYLRETLHIVANDILEEAITHGCEYIVFENLKHIRERAPPVKEFHQWAHRQLVDLVEYKAEAEGVRVEFVSPEYTSRRCPECGHTCAENRVRQAVFECVECSATANADYVGAKNVGWRFVRRGLQSSRRTGDGQLALKSGTVKPVQGFVPARSG

SEQ ID NO: 34567 - protein, 454 aa, unknown
  TnpB Polypeptide
MLYGVTGVLRSYSLEYDCGEQLEPLLLAYRDAVNSVLEELWGNIEWEKRKVKGKRQWRLLPKYKVDLHSKEYKKKLRDSLLEGWPYAAHWVDSAIKTAYSILKSWRKNYVKGDRRRRRPTARRLFARAKQTLIKLEGEKLRVTVKPGEHVYLDLSARYFKLPSEVSSAGLGEPVITLEKVHLPVHYEEDAQNSNPSVAWDFNLLSLDGYSPETGWVRIDTSKLASIHISSFEKRRSVQRRASRSKKARRVLSKYSKRERNRARRHQLEIARVIQSLCGPVGLEELKKQGMYTRSRIWNRRISRSDWRGIAKILEGRLGEARVVELDPYGSSSYCSRCGWENKDLNGADIFVCGGCGLRINRQLNAAVNLYMRMMFGYTEKWVGGKKRVELRMEGAPQRDWWDRVVLPSLVGGCVLTGAELKGINEPVRSLYDALKPKLCYAYDRYADAYLRIPT

SEQ ID NO: 34568 - protein, 374 aa, unknown
  TnpB Polypeptide
MEYSYKFRIYPNAEQQTLIQKTFGCARFVYNYFLHFRKKTYEENGETLTYVKTSALLTQLKKEITWLKEVDSIPLQESLRNLDFAYQRFFRHVKNGEKPGFPRFKRKRDMRKSYKTKQHINNGKVTIWTNSEYVRLPKLGLVKCRVSKEVKGRIVSATVSQNPSGKYFVALCCTDVEMVPLPSTGAVVGLDMGIKSYAITSDGVEYSNPKYLSKSLCKLARLQRQLSRKSRGSNRREKARVKVALLHEKVTNQRNDTLHKLSTSLVRDYDLIAIEDLAPKNMVRNHKLARSISDVSWGEFRRQLEYKAKWYGKALVTVDRFYPSSQLCSSCGTQWPGTKDLSVREWTCPACGAVHDRDHNAAQNILKEGLRLLA

SEQ ID NO: 34569 - protein, 415 aa, unknown
  TnpB Polypeptide
LDGSSSPSSLDYLAGKFSYVWAWPLLATKAVRQKYQASPELLKLLDEFRRMVNVCVMIGIEQNISSLKALASRTYPCLSRDILAYYRLGAISAATGIIHNHRKANKKSPRTKLPCAKKLMLSIWYGFKIQNGHLRLPLKPREYAYVKLNGYTLQALSGLNVRSVTLTSDSLSISYSKEATEIAPEGYVGIDRNLNNVTTASIDKMVRRYDLSKVTDTKSTYRYVKSRFKRNDARIRTRVFSKYGEKQRNRVQPLLHSVSKRIVEDAKTRRYGIVMEKLTGIRRLYRRGNGQSRNRRARMNGWSYGELQRQIEYKARWEGVKVVYVPARDTSKRCSICGYKTLESTQRRLWCPHCGTILDRDENAARNIAARGLRFSPNGPPDEAVKGNPTTTVILGVDGGKLSQQATTTIHPTKT

SEQ ID NO: 34570 - protein, 369 aa, unknown
  TnpB Polypeptide
MIVKQAFRYELDPTNEQQGLLVRAAGTARFAYNWGLDVCRAYLDQHLLIPSAMALHRLWNAYKREHAPWAYAVSKCAGQEALRDLRTAFDNFFASRSGKRRGPKMGFPRYRKKGRDDSFRLTGAIHVGPKGVQLPRLGWVRTKEPTNKFRGRILSATVRREADRWYVSLTVEVERPDPQPRSGGVVGVDLGLMAFATLSDGTVIRPSRFLARAQRALRRKQKALSRKQKGSHRRHKAALAVARLHRKVRNRRRDFHHKLSTTLARTKSVVVIEDLAVKGLVRNRHLARSISDAGWSEFRRMLEYKTAWYGSHLVVADRFFPSSKMCSRCGTVRAELSLSERVFRCEACGLEMDRDRNAAINLERLGTAV

SEQ ID NO: 34571 - protein, 486 aa, Bifidobacterium sp.
MSRKYKITRVEITGATPYLGHDRNGAPIRTKDPEQVMAWLCGAWRFRFNQHRSNRCRYLIGTTGSTGLLEPIGSMDRRSNADTRHDHDWIGAVPDLILTSTWMMERKEWAAAVERRRTNREHGRKPGRMPGFKRLRQGRRFTCMSNRGKGYRVVKYSRKHAEAIIGGTDPRGWRDDGARYQIHIHFRLSRPVPESTSIHVDWTHRTISFTAPIEPHHHQPTGAMVGVDVGVVHEAALSDGRLLDLPGKRLRHIENRINGLQRAQARCVRESPYDNTRDYLRKGPSNRYLRLRKQINRLNACKTRIITDWQHKTSRRLVDDHDLIVMEALQPANMSRKPRPQADPDRPDHWLPNGRNAKRALNRGMREASLGRFRTMVEYKSHAAGITFLAVNPAYTSQTCHKCGHVAAENRESQAVFHCHACHWEGNADVNAAINILDKGLRLNDPSGRDTSETRNRSVGPCGGQTDRTAAPSRRGAIIMPGGSRQ

SEQ ID NO: 34572 - protein, 516 aa, unknown
  TnpB Polypeptide
MIRVSSVNCAYPRRPYACFDEDGKGIDIHDVLEEIRHEATECARQAVKHLTWKNMVRVADYKGLKPCVAGSKMGIRLPPGKRSRGRSRFERMVCEYAVSQLRSWNERFLAYRGESTKYVSAGWRRTANVLPPRTLAPRLSLSTTDSQYHSISVDGGTTVLRMVVTGRWVSLYFKTPSRFLENGVRPIAPDITVDDRGRVMFNWFAEIPVERAEFSDRYVIGVDVGRNSAAFSAVVDVTTGDVVEASGGNRRIKTLENRISRTEKQIRSLHKMGRHDEAAQHRKGLANRRNELAVLVGQDVADLSFRYDNALVTVEDLSGIRNTMSHGRWVRGQMVQRATDVVESDGGRVMKVNPAYTSQRCHVCSTQMDMRDSRRPRCMVCKVTWDRDENAAVNIARRAPHSKACATRRKIASTRRRRNSKGSVTPLKHPLSKGRPTPKAPQNRPVSHELEHSRRARYEKRKEGAADSTTCAVGWSLVVKTDVSVPTVGSSCEDVQTTSRTTTPCSDTACCRENKV

SEQ ID NO: 34573 - protein, 659 aa, unknown
  TnpB Polypeptide
MMLTGWARRAGIHPRTSRRWFHRGILPVPTRQLPTGTILVDARPEANGAGAALYARVSSWDQKNDLDRQVTRLSAWTTWTTCHGLIVVRAEVEVGSGLNGRRRRLMRLLADPTISTIVVEHRDRLARFGVEYLEGPGPARGRHRSWGNYRRPGAGHGGRPHRVLRAPVWPPIGADPDVTRGDRHEGGPPVPPTSAPGLVRASGPGRAPIMQRTYETRLPSDLARDPILDAYAALYGRAERTLFARLRAGEPLAALKRECLVRFGLTARQFNALAADLQGKISSVRKRRPGLMRSLERRIARAREVLRDIPRGTDTYHQKRRRLTRLAQRLQTLRADEASGRIRLCFGSRKLFRAQFTLSATGYASHEAWRRVWRSARSHQFSVLGSKDETAGCQGCVATVETDGSITLRLRLLTRSPHGKYVLIPGLRFRYGRDCRHLSPTKEDWQAILWRFVRDRRGWRVLVTVSVTPGEWSSVDGGGVVPVDLNATHVAVTELDRFGNPIAAVRVPCATRGKTFPQVRAAIGEAVSQVVTSACLGWKPIVADRLDFEKKKAELDQRGARDARLLSGFAYATFHAMLSARCYDAGIALQRVNPAYNSVIGTYTFADRSGLSRHQAAATSIGWDASLSPAREPPALLLGSCVWTVRKRPESQERCTAPG

SEQ ID NO: 34574 - protein, 388 aa, unknown
  TnpB Polypeptide
MRPTARQHIALAACVESHRELYNAALAERRDGWAHSKTRINYKDQSAQLSEIRAVRPDVAVWSFSSQQATLRRLNKAFAGFFRRVKTAKPGVKPGYPRFKGMSRFDSVEWPKDGDGARWLPEQRRVYLQGIGQVKVHVHRRVQGRVKTIQIKRCGRSWLLVLSCDDVPANPLPATGRQAGIDVGIASFATTSDGEHIDNPRWGRAAADKLAAAQQRLQRAKRRSKNRDRKRETVAARHRKIANQRKDFHHKQARALVARYDLLVVEDLNIANMLRRAKPVPDRDNPGQYLANGARAKSGLSRSISDASWGGFVSRLRAKAEEAGRIWIEVDPRHTSDRCEKCGYAAAENRVTQAVFRCTACGHGPTQADEHAARNLLRAGLALHAQAA

SEQ ID NO: 34575 - protein, 378 aa, unknown
  TnpB Polypeptide
MRKTFKYRLFPSPAQRTAMQNSLNACCWVYNKSLEVRKEAWEQRQENVSRYDTINMIPGWKREYPFLKDAFSQSLQETCIRLDIAFRAFFRRVQAGEKPGYPRFKSICRFDSFTYPQRGFELLDNRRLRLSKIGDVKIKLHRPLDCECKTLTICRDSVGNWYACFSCVVEPKPLPSTDKVVGIDLGLTTFAVLSNGEKIKRQRWAKQDAKDIARLQRKKDKLPKGSVARQKVVRSLQHAYKRQTNRRNNFAHQESRKLINEYQFIAFENLDIANMQSRGNAVINRGIADVAWGKFVRFSQSKAEEAGRTVVLVNPRGTTQECSGCGKIVPKDLSVRKHNCPHCGLSISRDYNAALNILARGLTSLGESPKNSFVHDGE

SEQ ID NO: 34576 - protein, 438 aa, unknown
  TnpB Polypeptide
MKQTMLLKLAPTTEQHQALLETMHAFNEAANSVASVAWAEKTANKFALQKLVYGELRTTYKLPAQLAIRCISKASEAYKRDKSIQPHFRPEGAMVYDPRVMSFKSLATVSLLTLSGRVLVPFLFGTYQQARMGAMQGQADLLYRKGVFYLAVTLEVSTPELQESSDTLGVDLGIVNLATDSEGETFSGEAVEKTRKRHHALRQRLQKRGTKSAKRHLKKLSGKQARFRKNSNHVISKRIVQKAKATGQGIAIEELRHIRTRTEARLKRSQRSKHSSWAFAQLRSFLSYKAALAGVPLSVVDPAYTSRTCSQCGHCEKANRKSQALFQCIQCDFRCHADWNAAVNISRASVMVPIAAGRAWLQAPVIHAGVHDISQRCRSSTGLTRHDHDLYTGDQERSPTCIVSSKGSSIHDDSIQSASDLPDLDWPHSRSGSLSPAD

SEQ ID NO: 34577 - protein, 393 aa, Parageobacillus sp.
  misc_feature (338)..(368): Xaa can be any naturally occurring amino acid
MKIVSHDESQLRSLDELMRVFCSAKRYAFNRLLEGRNAKDIIKHLPHQFRLNKRFAEDAVLLAQSLISSQRELLPIRLEDVRAKIEKTEKKIDDYQHGRKTLKNVDLPTCLDGLHRRLEKWKSKEAELKHHLDQGTIPGVIFGGKENFYKRLKGNITNEEWKDLRSNQLYARGDKSKKGNLNIRLTYDDKTYQCYVEIANPLEQQKGKHAPRLRLPVLVPEKYEEEIIDLIMGEPVGVNAKGKPIIEYQPYTVEIQRKNGEYYIHLIYEEEVYGRELTDDEPIQAERIAGMDINMDRIAVSIVSKHGNFLKSKVFYCHELEYVRANKRNNIVGETVRXXXXXXXXXXXXXXXXXXXXXXXXXXXXXXXGGSGHRKHPTKTAARYGQTIQSFHP

SEQ ID NO: 34578 - protein, 371 aa, unknown
  TnpB Polypeptide
MMEYCQKFRIYPTASQSQQIQKTFGCCRFVWNYYLAKRKELYETDGQTLNYNKCSADMTQLKKSLEWLREVDVTALRNSLRDLDAAYQNFFRRVKNGEKPGFPRFKSKHNHRQSYRSQCSNGNIKVFDKSIQLPKLGKVKCRVSKQVKGRILSATVSQNPSGKYFVAICCTDVEMEQLPKTGATVGLDMGIKSFAVTPDGIEYLNHKYLAKSEKKLVKLQRQLSRKTKGSNRWNKSRIKVARAHEHVANQRQDTMQKLSTQLIRENDVICIEDLAPKNMVRNHHLAKAISDAGWGEFRVQLQYKADWYGKKVVAIDRFYPSSQLCSCCGTQWVGTKDLSVRNWVCPVCGARHDRDVNAAQNILNEGLRLLA

SEQ ID NO: 34579 - protein, 473 aa, Lactobacillus sp.
MSKERPTMAEMPYHFGIKMRCYPSTKQMQMIQKGIDASRFTYNEMVARNQDAYDCMRLSEASLDPWFLFRTKDRLWEFWRHRGQLNDVNHRGEWEDMPLYATTLTRLVKLPLMKTYYKNCVKTQRVIKKSYDWLQDKMIHSSTLSMAMKSYSSAWNLWRKANKGKIGTPRFKRKDWFGAGTMQLSNSYASNQPIDMYSGSVKVLDNKHVQLPKLGQIRVSHLAHFMNSHDGNIIRIGTVTVSKDNLGQHWVSFQLGSMIPFVKEMKKNDSKIGIDLNTDNFLTDSNGERVENPRYYRNAEKYLKHAKRVMSRRQLRAMKEKRSLRDSKNYLKQRLLVAKKMKRISNRRNSFLDNLSLTLIKNHDLVVAENLKSKNMLKNHALAKSIADVGWRTFIQKLTYKSELYGKKFITVDPKDTTQMCHDCGYIMGSDKRSKKLTLNNREWTCPNCGVHHMRDHNAAMNILTKGQLALAK

SEQ ID NO: 34580 - protein, 445 aa, unknown
  TnpB Polypeptide
MRKKMKTFSTVLEEENAKEIIAYFDETVADYNVLKRTALHILRNNPDIVKNVLNTLLQEKFGITKRTANSAIIEAQGVIASVLALIPLNIEKLENRIEDKEKVIEKKKKEIAIIHASRKTNTKRIAKLKLHIYNIYNLINKLEQKIKSFKKQLENRKPNICFGGKKLSKKDSKLFMEHRDSQMNYVGAAGEQQRNQNFQFRYVKKGNFFVMKVRRDFGKWKEDRSHERFVYGKCYFKYGGADLRDVLCGEYTPISTSIIKRNSRYYLYVTVTLTIESDAIATRKEYGVIGIDFNKGFINICETDEKGNIVYNEKIKYPFGKSGVTKAGLHKAIGIVKQRAIETGKSIVAEDISLEKKKRKSKKAITATEKKKARVLHSMPYSIYLRILVDITFNSKIELIKINPAYTSKIAEQKFCGRMKLNIHDGAAYTIARRGMGIKDKFIAS

SEQ ID NO: 34581 - protein, 416 aa, unknown
  TnpB Polypeptide
MVIEVTRTYVGSIQNHRQVCDGLDSLGDSASKIWNVARWTADRIWNQTGEIPDEGALKSYMKNQSCWKDLNAQSSQKVIEELSDAFQSWFDLRHKDDKANPPGYRKHGDERPHSTVTFKSDGFKHDPENNRVRLSKGSNLKDYWSDFVLCEYQTRPDVDLSAVNKMQNVRAVWSGDEWELHFVCKVNPETQDSGGDDVAGVDTGIKNIATVAFPDEYVLYPGNSLKQDKHYFAREEYDTEGENGPSEQSMWARRKLTERETHLYHALTDAIITECVERDVGTLAVGWPEDVRNSDWGKTGNKKLHSWAFDRIYQYLEYKGEIRGVEVLKENEWNTSKTCSRCGDDTRTNRVERGLYVCSSCGLVGNADCNGAENMRQKITLSPHGADRSNGCVAQPSTYLFDRESGMFHTREQVVS

SEQ ID NO: 34582 - protein, 253 aa, unknown
  TnpB Polypeptide
MPTTRRTYVCGIQNHSQVAGAFDRHGWSASKLWNVALYYARQQWDETGEIPDEGEFKHELKTHAKYKELHSHSSQKVLEELSEAFSSWFGSDGDRDNPPGYRKCNYYDSDGNRVHEEHPRSTVTWEKGIRHDTKHDRIRLSKGKAHRDGREFILCEYETPPAVELENIQQVRAVSNSIKSRLELHVVCETEITAESPGENTAGVDLGICNPAAVAFPDDALLYPGDTLREDKHYFQREEYQTEGPQSESTVGT

SEQ ID NO: 34583 - protein, 415 aa, unknown
  TnpB Polypeptide
LLRELLDASASLWNELTYERRQNFFDDESVWDTADYRKQYVGTLGSATAQQIIRKNKSAWQSFFSLREDGEDASPPGYWGNEDNGRELQTLIRNDQYTLETGERSRVEIPVGQDLKDKYGLGYHDRLRLEVVGDPKWDGEQGRLEIQYDEIDDTFRAFQPVTVPDSRQDSPLAEESAALDVGANNLVACTTTTGQQSLYEGRDLFTDFRETTEEIARLQSKLREGRYSSQRIRRLYRKRTRRRNHAQDALVRDLVERLHQEGVATVHVGDLTDVLETHWHPEVNEKIHQFWAHRSFVDRLEDTAEEYGMSVHEASEAFTTATCVECGEQMKTERRGDVFRCSCGYEGHADLDASQTFLKRETGTEFETGLMARPVRLNWDDHSWSESPHSPERASPNEERTNQSTNDGKVASVGR

SEQ ID NO: 34584 - protein, 419 aa, unknown
  TnpB Polypeptide
MRYTYRFRAYSARTGVTAELDRHIDIHRQAYNHTHYEYNRLDTDEDNIGSTYQHQKRLTEWKDEWPVFSEVHSKALQKTVERFYTNLLTLSKKKQNGHNVGRLKRKSPREYQSMTYSQSGFELKNTSGRYATLWLSKIGEIPIRYHRPVLEDALIKEVTVKKEKTGEWYVTFGLELEDAALPEKPDPKKLNAQDCVGIDLGIQNYVYTSKGDSVDWLDLSEEYERLRREQRSLSRKEHSSSNWEKQRRKVATVKRRIKRKVEDFQHKLSTWLVTTYDAVFVEDLNVSELLQSEGNARNKQDAAWRQFIEMLEYKGDLYGTHVVQVNPAGTTKECADCGVERVKPLWVREHSCPSCGFEANRDENAAYNALSRGLQKLGVGHAEVTPAETATAVGEDSVQESVSASCVVETGSLGVVRKT

SEQ ID NO: 34585 - protein, 197 aa, unknown
  TnpB Polypeptide
  misc_feature (175)..(192): Xaa can be any naturally occurring amino acid
VTWKQNGIKHDIKNNRVRLSKGTNHKKHPKAWEYTLVEYETRPGIEVKNLQQVRAVHDESKGRWELHLVWKHEIETPNPPGNESAGVDLGICNFAAVAYSTEDADLYPGNRLKQDGYYFPKEIVKCDDSGGSEATRLHHKWSERRTHFFHSLAKHIVEKCIGRGVGRINVGKLKXXXXXXXXXXXXXXXXXXVDCKP

SEQ ID NO: 34586 - protein, 418 aa, unknown
  TnpB Polypeptide
VAVVRNIQVKLDVPEDAHTVLDETFEQFRYAAQYVADYGWADDPTEIVTNKGNLNAATYDDVRSNTDLHSNHVQSARSLAAEALDNCQDRLFEAGETASKPTFKRTVVVYGTRTITYNDDHCTLATVDGRVRAEYVTPEDDEGTPFAEYWNSDEWERKEATLHKRDSDYYLHIAVEKQPDTDTSTVENGAVLGVDLNVDGYLAVTSTGAFLGNADYLNHRRDEYEQRRGRLQQTGTRPAHLTINSIGSRFARWSEDYLHRVSKAIVQEARHHDCSAISFENLENIRERISNASKFQQWAFRTIQEYTEYKAEEYGILVDIVQPAYTSQQCSHGECGFTHEDNRDGDEFKCLKCRTELHADYNAARNIGWRLVQYWLKSGAGRANCQVALKSGTLNANGEFTPATSRGQSGSPLTSPPL

SEQ ID NO: 34587 - protein, 402 aa, Escherichia sp.
VKRLQAFKFQLRPGGQQECEMRRFAGACRFVFNRALALQNENHEAGNKYIPYGKMASWLVEWKNATETQWLKDSPSQPLQQSLKDLERAYKNFFQNRAAFPRFKKRGQNDAFRYPQGVKLDQENSRIFLPKLGWMRYRNSRQVTGVVKNVTVSQSCGKWYISIQTESEVSTPVHPSASMVGLDAGVAKLATLSDGTVFEPVNSFQKNQKKLARLQRQLSRRVKFSNNWQKQKRKIQRLHSCIANIRRDYLHKVTTTVSKNHAMIVIEDLKVSNMSKSAAGTVSQPGRNVRAKSGLNRSILDQGWYEMRRQLEYKQLWRGGQVLAVPPAYTSQRCACCGHTAKENRLSQSQFRCQVCGYTANADVNGARNILAAGHAVLACGEMVQSGRSLKQEPTEMIQATA

SEQ ID NO: 34588 - protein, 427 aa, Escherichia sp.
MHQENTMLPRRISVSLFIDQSIIWPVKRLQAFKFQLRPGGQQEREMRRFAGACRFVFNRALALQNENHEAGNKYIPYGKMASWLVEWKNATETQWLKDSPSQPLQQSLKGLERAYKNFFQKRAAFPRFKKRGQNDAFRYPQGVKLDQENSRIFLPKLGWMRYRNSRQVTGVVKNVTVSQSCGKWYISIQTESEVSTPAHPSASMVGLDAGVAKLATLSDGTVFEPVNSFQKNQKTPARLQRQLSRKVKFSNNWQKQKRKIQRLHSCIANIRRDYLHKVTTAVSKNHAMIVIEDLKVSNMSKSAAGTVSQPGRNVRAKSGLNRSILDQGWYEMRRQLEYKQLWRGGQVLAVPPAYTSQRCAYCGHTAKENRLTQSKFRCQVCGYTANADVNGARNILAAGHAVLACGEMVQSGRPLKQEPTEMIQATA

SEQ ID NO: 34589 - protein, 417 aa, unknown
  TnpB Polypeptide
MGTSVAVDRMRVGQRPIRSKACLGASSIISAVEMLISFLDIVHDMELTQKFKLMKLNRGKRELLDAAIERFKSCVNEWLRAIEELGEYPTRGNVHAFAYKRVRARFGDLHSNVVQEAMNRAIETYRAWLRNPNRGKKPIFNAEIISFKAVDVKIEKNFINVPLLNKQRVWLPMYVPPKLKRFLKLTHGRVQISRFEKDYYVFISFEVNEPKPYEPKGWIGVDIGINHIAVVSDMKGKINKFYDNAISWKRMVEFKRADMQRTKDTETKKGAWRVLKRISHKIRNKMSYINHKIAKEIVEIAKHRRYGIAIEGLKGLKRRKVGKRHRKRLHKWAYHDLISKIEYKAKLNGVPVKFINPKNTSRTCSKCGYVRSRVVGRRCKCSKCGFQLDRDLNAARNIAKRAFLPALKGEASSPQGV

SEQ ID NO: 34590 - protein, 343 aa, unknown
  TnpB Polypeptide
MYFQHLVSAFEVAAGALKNHRRRSMKGVACGIPFVRRLMMKAENQAYKLDRDAGVIDLPIRAGCHVELELIVSQYHRKYLDDSTLSLGSLTVFPDRVIVAFRKEAPKPYVPGSALSLDTNERSLDGVFVDRNSTSIVKADFNDVAVIQQRHHDRRKRLQKKMAHDRRTGRCLCRREGTREHRRIEYRLHQVANAVLSFADKQHSAVVLENLTGFKPKRSKDLNRRLSMWPRRKLHKIIEYKAQWRGIPIFNIDPRYSSRKCPICGRIQDSRMGTEFSCECGWHLDRHINDSINLLQTAISKGMAGGLRFDPGAFQHDVMMTLYEPAMAARSEPNGTSCVNGVT

SEQ ID NO: 34591 - protein, 400 aa, Lechevalieria sp.
LWTVNGQVKRAFRYRFYPTGAQAAELLRTFGCVRKVYNLALEARTQAWTLRRERIGYEATSALLTAWKRTEELAFLRDVSSVPLQQGLRHLQMAYTNFFAKRARYPRFKSRKKSRASAEYTRSAFRWRDGELTLAKMAEPLNIRWSRPLPENAAPSTVTVSRDSAGRWYVSLLCEDSSVTPLPAADSVVGIDVGLDHLLVLSTGEKIDNPRHERRDRAALAKAQRALCRKQKGSNNRAKARVEVARVHARIADRRADFLHKITTRLVRENQTLVIEDLMVSNMVGHRRLARAIGDAGWRQFRQLLEYKAAWYGRDLIIADRWFPSSKLCSACGALTSAMPLHLRTWTCGCGATHDRDVNAARNILAAGLAVTVCGAGARPQRNPPGGQSATKQKTLRREL

SEQ ID NO: 34592 - protein, 269 aa, Snowella sp.
RQIYLAKSDEPLDIRWSRQLPKGCEPTSVTVRLHPSGRWHISIRFDDPTIKPLPANDNAIGIDFGVTSLIATSNGYKVSNPKQFKKHYKRLRRAQKALSRKKKDSKNREKARVKVAKIHLKISDSRKDFLHKLTTRLVRENQTIAVESLAVKNMVKNRKLSLAISDSGWGELIRQLEYKCRWYGRKLVKIDQWFPSSKRCSACGHIVDKMPLNIRDWTCPECGCHYDRDVNASKNILAAGLAVSVCGATVRPEQSKSVKAGAKKQKPKS

SEQ ID NO: 34593 - protein, 423 aa, Haloterrigena sp.
MDDAPRRTVPIKLDVPEERRGDLHQTKAQFLHCANRTSEWAWRYDDYCITSKSKAENALYGELREETDLTANLVQKGIRRAIEAVTGGVGKLKQGEKTSQPEFDSWSVVYDKRSATFNDDHATLSTPNGRVTCEYVLPPEDERESTPFGRYYERDDWNASSATLQYDEQDDTFYLHVTLKNPDYVVDGTERQEASHDDETPENGVVLGVDLNVTGAFAVTSTGAFLGSADHLNHKRDQYEQRRGRLQQVGTRSAHLTIQSIGSRFSNWSLDWLQNRANNLIEEAQDANVDGIIFENLNHIRENIANGSKFQQWAYAKFMKLVEYKIESTELFVDTVNPAYTSQRCSHCGFTHEDNRDDKQFACQSCGYEVNADYNAAKNIANRYCGYIHRGQKSRGGWATSQLALKSGALNVNGDYTPTELLG

SEQ ID NO: 34594 - protein, 426 aa, Haloterrigena sp.
MAEQVVTRTYTASIRNQPQVQDGLESLGFAASKLWNVGRWTISRVWDEINYIPEHDELTAYLKSHERYDDLHSQSSQRVLQELAEAFNGWYGKRRNEDQRANPPGYRKHGDDHPRSTVTFKQKGFKLDTQYNRVRLSKGSNLKEYWSDFVLCEYQTRPDVDLSTVESVQQVRAVWTGEEWELHFVCKVEIEVAAAPGEKTVGVDLGINNFAALAYEDGHSELYPLNCLKQDDYYFSKRLARCDDSDSEQATRLNQKKSARRTHYFHTLSKHIVQRCVDEEVGTIVVGDLSGIREDEENGESKNWGKHGNLDLHSWAFDRFTDLLEYKAEMEGISVEEVSERDTSKSCSCCGRKRDSNRVERGLYVCDECGMVANADVNGAENIRQKVSPSPATDGGDRSNGWLAQPSTYLFDKEAGAFEPQEQVTS

SEQ ID NO: 34595 - protein, 437 aa, Haloterrigena sp.
MLEVHCTHRAKIRNHSQVAESLDQHGWSASKLWNVANYHSRQVWEETGEIPDHEELKDELKTHPKYKGLHSQSSQRVLEELAEAFNSWYGSDDERDNPPGYRKENYYDSEGRRVHEEHPRSTVTWKQNGIRHDTNNNRVRLSKGANHKEHPRAWEYILVEYETRPDVTVENLQQVRAVYDNAKERWELHLVCKDEIEMPDAPGNETAGIDLGISNFAAVAYSTEVADLYPGNRLKQDSYYFPKEIAKCDDSGGERATLLQHKWSERRTHFFHSLAKHIVQRCVEKGVGRINVGDLEGVREDENGDSKNWGKHGNLDLHGWAFDRFTSILTYKAKVEGIEVEVVSEKGTSKTCCVCGREDDSQRVERGLYVCKACDAAFNADVNGAENIRLNLNESNSESAPDLGGDRSTGWLAQPGVYLHDLSRGFQPRVEVVDCKP

SEQ ID NO: 34596 - protein, 413 aa, Haloterrigena sp.
IEHSHRYRAYPTKDVAEGLDHQVDVHRQLYNHVRWDYENSPEDDKPSEYDQNNKLPEWKRKWLLFAETHSKAAQATVARFHRNLSNLRKKKEKGYNVGRLKRQPPADYRSVTYNQSGFDLDDKRGRDGYAYVRFSKVGWIKIRYHRPLPEHTTTKEATFKKERTGEWYVTFSLETDDTDLPEKPALESLDTSNSVGIDLGIQNYIHTSDGKTVDWLDLDDEYERLRREQRKLSRKEHGSQNYKKQRRTVAKAKRKIRRTVLDYQHKLTTWLAKEYDAIFVEDLNVAGMLQDDRNARNKQDAAWRQFITLLEYKGNLYGTHVVQVEPEGTTKECAKCGGETLKRIWMREHSCPACGFETDRDANAAMNVLQRGFFELGQGWPESTPVETVTATDTAQFESMSASHVIETGTPNP

SEQ ID NO: 34597 - protein, 445 aa, Haloterrigena sp.
MKRTNRFAVRPLSDTGEQLLRDLLDASAALWNEVNYQRLMRYNEENGFEGGVWDADTGRLEGKYKGVVGASTSQQVIRKNSEAWRGFFRLKEQYHDKSNTSVTDHPEPPGFRGNEDDGRRLKTVIRNTSYTAEWGDRSRLEILVGKELKDRYDHTGRLRLEIAGNPSWPEYNKQGRLDLWYDETDSTFRASQPVTVSDDARTTPLAAEKAALDIGANNLVACTTTTGGQYLYEGRNLFQRFRDTTREIARLQSKLEDGRYSSERIRRLYRKRTRRRDHAQEALCRDLIERLYDDGVEAVYIGGLTDVLETHWSVETNAKTHNFWAFKQFTEQLACTAEEYGISIEVRSEAWTSQECPQCGGTDRTTRYQDTLTCLCGFEGHADLTASKTFLEQQTSNTVRPMARPVRFQWDDHDWSESSRSHRPNEQRTDPSTIQRDGNVASGET

SEQ ID NO: 34598 - protein, 414 aa, Haloterrigena sp.
MYYAYKYRLKPSDAHRKELDRHRDICRQLYNHTRYRLNEYQNEHGELPSMTTLRSELPDLKEWWDDLSDIYSKVLQTVVERLFDNLKGLSKLKENGYGVGQLKWKPPREFRSFTYSQSGFKLDKKGGQTVLSLSKLADIPIRLHRPILDGAKLKQVTLKKEPTGDWFATFGVEMDREPPEPPENPEKCVGIDVGILKYAHDTDGTAVESVDFSDERERLEREQRKLSPKQHGSNNCEKQRRRVAECHADLQRKRRDFMHKLSNYYAREYDLVAVEDLNVKGMMESPSNSRNTASAAWRTFLSLLEYKCEREGTHFVAVEPAGTTKECAACGISTDKPLWVREHSCPSCGFTADRDWNAAWNILSRGIKRVGEGHSESMPVETALPTGTTTVPAKRVLEAGSPTLKERAAPAASE

SEQ ID NO: 34599 - protein, 449 aa, unknown
  TnpB Polypeptide
MSNKLVSNYKIQYIALKIKLYPTEEQKIYFNKTFGCARSFYNHLKAEKDKFYQENNLENIADKNERNRIWKTFKSTTPKEYKEKFPYCKEADSQAFNTAEMDFKTACKNMYEDIAKAKSGILNWDKVRITKFHSKKSEKQSYKTCMMKQNCLDWNEHTITIPKIKKVRFKNNQAPKWYKYRTKTRSITISRNASMEYFASILFEVRLPDTKRYNQWDKDESKVIGLDFDCNDMYIDSNGKSALKDFGFKKQKQNSKQLKHRQRQLARKCKNSKRREKARIKLAQSEAHVANARKDWSLKHSIYLARNYEVIAVEDLNIKEMMKGSRNAKNYQDISWSTFIGNLQQQSRKYNCQVIKTNKWYASSQICHICGFKNVMVQKRHLEEYFCPNCMTRHQRDENAAINIKNESIRVLREAEEKREKGSVKRRITCQKDHASSLSTKKLTNLPLT

SEQ ID NO: 34600 - protein, 221 aa, unknown
  TnpB Polypeptide
VTGELKEKLALKYGDKIKNFRLCKQQGKRFYAIFCIERLDVKVKEVKNWIAIDPNHKNLFMAVDSDGVAYEFNKLSQIKYWDKVIDEIKSKRDVCLKKAKKISRENGSAYYITSRRWQRLNKALDNAYNSRREQIKSACFSISNWVARNYDYVAFGDYTPTKNTAVEDNMHRSMLNQMVIGSLRKIMEWVMRRSGKTFSIVDEKDTTDTCCICGNKGKEGS

SEQ ID NO: 34601 - protein, 441 aa, Acidimicrobiaceae sp.
LSPKYTPPEGQIIQAFTFALDLTPEQAASVARFFGARRFAFNWTLAQIKADLEHYRVTGESTDAPSFYSLRKRWNAEKSNVCVTDTGEVWWSDVSKEVFADGVKGATDAYWRWQKSRAGQLVGRRVGFPRFKKRGKDRDRFSFSTAVMRLEADRRHLTLPVLGTLRTHENTRRLERLIALERAKVLSVTVSRYGDRIIAAVRVAVIRPQQARVTQPDSMIGIDVGVRRLATVATRDGVIGELANPRALERRLSELRRLQRQRCRRTRGSRQYKETASKITRLHAEVANQRQHTIHVFTTNLAKTHGVLVVEGLDAASLLQQKGLPGARSRRRGLSDAALGEIRRQLRYKCPWYGSTLIEADRFFPSSKTCHDCGHVQHIGSSEHWTCEECSSSHQRDDNAAINLARWASLGSVGAPVKRGVEHQTESHSAAGDDTRKGSPT

SEQ ID NO: 34602 - protein, 502 aa, Streptomyces sp.
VELVLVPHWGVCVKKFTPRQGSAVSAYRLALDPNVTAMGRLHSHAGAARAAYNWVIAHVTAVWRQRQAEVSYGIAEDGLTAWRSWSLPSLRKAFNEDKHTDPRFSGWWDENSKEAYNTGLANASAAFDTYAKSRNGKRKGARVGVPRFKSKRKARLTCRFTTGVIRIEADGRHVTLPRIGKIRLHEPRPDLHARIDSGTIRILSATVRLDRGRWFVSFQVEQRSELVRVARPDAAVGIDLGIKTLAALADSDGTVTEVTNPRHLDRAQKQLRRASRVVSRRRGPDRRTGQQPSRRWRKANCARNRVHHRVGNLREDSLHKLTTRLTAEYGTLVIEDLNVAGMSRNRRLSRQVADASFGAIRRQLTYKTRRHGTRLVVASRWFPSSKTCSRCGAVKAKLPLAVRVFECDACGLVMDRDENAGRNLLALATTSTTSSTGTGVAGDLGPTIAVGPKPRGADRKTRTTLPGRKAGRGRAGGTIPSPRAGTETGDRQQDIRTQLALW

SEQ ID NO: 34603 - protein, 387 aa, Streptomyces sp.
VKIVAQVKLLPVSAYDADALAATLRACNRAANAASEVAFTEDLKRRNVLQDAVYHRLRTDFDLGAQAAVRTITKVCDAYTTLKANIKAGNLGREDSKRRARAESRPIGFREGAAQPYDDRMLTWNLDTRTVSIWTVAGRLKRIPFVCSPEAMRLLASRKGESDLVARDGMFFLVATIDVPEPELSEPDGFLGVDLGIVNIATTSDGEILAGRRLNRYRKRHRDLRQKLQKKRTKSAKRVLKRVRRREARHAANTNHIIAKTLVATAERTSRGIGLEDLSGIRARVTAKKDQRAKLHSWAFAQLGAFVAYKARRAGVPVVHVDPRNTSRQCSECWHTHRANRVSQARFECRSCGVITHADHNGSRNIAHRAMSVWQRGAVNRPSPTAR

SEQ ID NO: 34604 - protein, 399 aa, unknown
  TnpB Polypeptide
MLKGIKVQIYPSKAQEKYLASLFGSYRFVYNKCLEHKIKEYTENKKSVHLKELGKLFHGELRKNNEWLKEHNSKVLKQSIMNMLEAYKRFFVNHTGFPKFRSKNARQSVRFPAEAISRNAFKNNKVNLTKEVKNLKFRCSKEYRDLLENNIKNIKSCTLSKNKAGKYFCSFLVEVEHTPVEKTNKSVGIDLGIKTFLVSSEGEEIANPKFTRNNEKKLKTLHKRLSKKQKGSMNRKKARLALAKFWYKINCKKQDFLHKLSTKIVKDYDIIGIEDLSVKDMLKNPTLAKSIQELSLFEFTRQLTYKADWNNKLVVKVGKYFASSKTCSGCGWINNNLTLADRVFICKSCELEIDRDFNASTNIKNEALKLIGSRPSDFKPVETETLVSSVKQESNLTFL

SEQ ID NO: 34605 - protein, 375 aa, unknown
  TnpB Polypeptide
VILLEKAFKYRIYPNKKQQELLQKTFGCCRYVYNYFLDKKITEYKENKKSLSFYDTSKMLTQLKKEKEWLREVDAHSLQFSLKILDEMYQRFFKNYNGFPKFKKKKNYNSYSTKNNSSSLRNKLSIEFENKHIKLPKLGFVKVRDKQIPQGRILNATISQEPNGHYYCSLCCTDIEFPQYSKTNKNVGIDLGIVDFAILSDGIKIKNPRFYEKSEKKLAKLQRELSRKTIGGSNWNKARIKVANLQKHISNQRKDFLQKLTTNLVKQYDIICIEDLDVQSMKETDSSVRNKHVFDVSWSEFRRMLTYKSTWYGKTLSVIDRYFPSSQICHCCGVNGGKKSVEIRYWICSNCGSKLDRDNNASINILNEGLRNLSV

SEQ ID NO: 34606 - protein, 295 aa, unknown
  TnpB Polypeptide
MLCKKTLKNLDNAYQKFFKEHTGYPKFKSKKNRHQSYTTSCSNNNIRFENKHIKLPKLGCVKIRDKQIPQGRILNATISQEPNGHYYCSLCCTDIEFSQYSKTNKNVGIDLGIVDFAILSDGIKIKNPRFYEKSEKKLAKLQRKLSRKTIGGSNWNKARIKIANLQKHISNQRKDFLQKLTTNIVKQYDIICIEDLDVKSMKETESNVRNKHVIDVSWSEFRRMLTYKSTWYGKILSVIDRYFPSSQICHCCGHKDGKKSVEIRYWICSNCGSKLDRDNNASINILNEGLRILSV

SEQ ID NO: 34607 - protein, 407 aa, Oscillatoriales sp.
VQHKATKIRIYPTPSQEQQLAQVFGCSRWWYNFALNKSIETYKETGKSLGQIALNALLPQLKKQEETAWLGDCYSQVLQATTLNLVTAYKNFFAGRARFPRFKSRKGKQSVQYPQNVKVLANTIKIPGGIGEVKAKIHRPIEGTVKTVTISKTPTGKYLASILTETEGDHPTVSTEGKVIGIDLGIKDFCVTHNGSKTSKYANPKHLAKHEKNLKRKQQKLARKKDGSNSRQRAKKLAAKVYERVSNARQDFLHKLSHKLVNENQVVAVENLNVKGMVRNHNLAKAISDCGWGMFTNFLAYKLECKGGKLVEINRWFPSSKLCSNCFYQVDEMPLDIREWTCPHCGTHHDRDGNAAANIRAEGIRMLQTDGTAVSAVGGDVRPKGGRKSVLRHSPLSTEAPSSQMSA

SEQ ID NO: 34608 - protein, 419 aa, Campylobacter sp.
LRSAIKYRIYPNVKQKELIHKHFGCFRVVYNHFLDYRQKQFALGIKETYFTMQKQLTILKAQQDYQYLNECNSQSLQMALRQLVSAFDNFFAKRAQYPRFKSKKHSKQSFAIPQNIILDPLTKRVIIPKFKEGIKTRIHRKLPNGAVIKQAFISCVADEYYISLSYETNEPIPKSKIIKNAVGLDMGLESLLIRSDGVVYQTQKFLKDKEAKLIKYQRRLSKKKKGSNNQKKAVKKVAKVHLEILRAREDYLHKISDEITNQYDFIGLETLNVKGMIRNKHLSKSIANVAWGKLISMLIYKAEKKGKTLMQVDKFFPSSQICSYCGTNTGKKPLHIRSFTCPQCHTKHNRDLNAAINIRNYALGIIDDRYKIKLDKSRVGITRSYACGDSTSGVSKYGNIIDTSYLSQKQEAQVSLALG

SEQ ID NO: 34609 - protein, 231 aa, Lactobacillus sp.
MEISLTIKAHIKAPSSDAAKALADSMEIYRQGCNFVSQYVFEHDFELRQAKLNKALYSDLRQKFSLRSQMAQSVLKTVIARYKSVQTQLGQKPYKIHDINAPQGEGCYAVQRDLDWLWKPIFFKRPQLDEVRGRDYSFKQNGKIVSVNTLDGRIECEIAMPGFEQYLNDEWTFGTARILKSGKHWFMHISATKSFPDYEIGQTRHVVGIDRGLRQIAACYDEKGKTLFISG

SEQ ID NO: 34610 - protein, 387 aa, Thiodictyon sp.
MLIANKIELRPTPEQATYLNQSCGARRHCYNQLLAHFSQPGVKWSKAAAYQHYMAVLRVEFPWYSEVSSRVTRNAIDDLDRAYQHFFRRVKAKAKHPGYPQFKKKDVNDSFAMREPSKFSVDIKERRIERLKTKIAMRQPLRFTGSAKQATISKKAGKFFVSVLIETDDYDPHAPSAPSVGVDFGITSLAVLSTGEVIPANHALKRNIKHLKRRQRNLSRKVKGSRRRAKAKLKVAKLHERISNQRRAVLHELSDQLTRTYQVITIEDLNVSGMVSNRRLARSIADAGFGELRRQIEYKAAWRGVTVVVADRFFPSSKMCHACGQIHDMPLDQRTMECDCGSVMDRDLNAAKNLDRYGLDRLDALKPDVKRTQEPGKTVSAARALTA

SEQ ID NO: 34611 - protein, 536 aa, unknown
  TnpB Polypeptide
MFHSKDITRQKYDELYDFAVLIKKHKNIVSQYINENVLHYLEYNKFQFSKVMRERFKGAIPSSFDKQLYTQVFTCYQNKFEAIQRRLVFEPSKFKGFEFYKRDTKKHKKGDLKRVIVEKKQTPLSNCLTYLARYGNEGTIAYIKSNLDKCDTNKRDFYNNIIRCCDRFGFERLYALALSKRKRIVSVFANNPIVFRSLTFSGRCRKKRIIAYNHRFSSVINSFISLSGISRKSFDIPVTFNKRWHGNMKDYRKKNPDYEYTITFDEKKHQVNVNLCKDGERYIPEPSGKTIGIDVNCKHNLFSLSDETTYDYDRNLVNDFCKLSIEIDKLKGDRTYIIGKRKQWKLDKLKEKIIKNEQQTIATICKTLQSQGVGHIVMENLDNGFGRCYVKDGDNEDINYNRKVSFLGLSSLKQEVEHIARKYDIAVSTVQASYTSKMCPICGCIDDCNRPNQESFECVECGHKDNADFNAAKNIRNRVLVTVLRETLLKQLDNGAFKPRMLNRDKVKEVLLSFRRSLPLVDSECIESSMTTFEYV

SEQ ID NO: 34612 - protein, 431 aa, unknown
  TnpB Polypeptide
MILRKAYQFKLKPDGATGRKLSRFCGCARFVYNKALAWNRDQRSSDPNFKISYAKLCEQLPEWKSAEETKWLSECHSQVLQQSLKDLMRAFTNFFEGRTDFPKFHKKFRNEDSIRYPQGFKVDEARRQIFLPSIGWVKYRRSRFIEGIPKNVTVSRKVDGWYVSVQTEREVPDPVHPKAGTEAGIDMGVVRLYTCSDGTFKEGVRCLRDKLEKLAKEQRRLKRMVKFSKNWIKQQQRIARLHKKVADSRRDLLRKAANRLCQNHAVLYREDLKIRNMTASAKGTVEEPGKNVKQKRGLNRAILDQGWGMFFSFLNAKMTELGGLVFAVPPQNTSRTCPVCGCVSKENRRTQAKFRCTSCGYEGNADAVAAVNILGRGQRLRACGELVPVNAAQVSRPSRKRSVVQQQEPVEATVGGSADNGTVGNHRPSGR

SEQ ID NO: 34613 - protein, 448 aa, Moorea sp.
LKAPTKIIRTDKWRLNPTTEQRLLLNETVKVYRRACRYLVGIIYTHWSQLGELTADQLTPAVERLMHQTAKRPNVKYPQFNKTFYKFPSYLRRAAIAFSAGQVSSFVTRYREWQSGDRKRKDAKPPKLNADTGCYPSLYKGQCYKLYGYDQVEIKVFNGSDWIWATVQITGLRERHLVATNKMMSPSLVLNERGCHLSVPFTCKPEKRKPEANVTAVDLGINTTATIAVVTHSGTVIHREFIHPGTDIDRRDKRLKSVSMRGSKTMGKGGKLHKGFCSKTYEKCRRINHQIGHLVSKRIVEIAEQFNSEAIVFENLKGWKPKGGKKRSNLRQRFHGWLKAKIRNFTQMKWAELGGKVIEVVAAYTSKLAYDGSGTVRRNSKNYALATFPSGKRFNADLNGAYNIGARGVFKLVRRNSNEGRSSKRSGRPPRSWACLCDLWTSGSSRLA

SEQ ID NO: 34614 - protein, 385 aa, Streptomyces sp.
MKLVVQVRLLPTPEEASALQRTLHACNAAANRASAVAYSTGKRSRNDLQKEVYAELKADFGLSAQAAVRSVKKTVDAYTTLRANVRAGNLGPQGAKRRVRAESKPIDFRQDAAQPYDDRILSWQHDTRTVSIWTINGRLKGLRYVGHPRQVALLVKFRKGESDLVHRDGKWLLVAVCEVPEPTATEPNGWIGLDRGIANLATTSDGTNYQGRRLGRYRRWQARKRAELQARQTRSASRRAKRMARREARHAAHANHRISKEIVAVAQRTGRGVAVEDLGGIRDRARPSRDQRAALSSWPFHRLGEYLAYKCRLAGVAFLEVDASYTSQRCPRCGHTERGNRPTRDRFRCRRCGLAGPSDHVAGVNVRERARLAWGFVSSPALQET

SEQ ID NO: 34615 - protein, 436 aa, unknown
  TnpB Polypeptide
LRRSRWRSTRRHGRNDSWSPMPVRRGSSTTRDSLMSRTCSNAAINPNGRTTPCAGGGTKPRTHSPWTRPREKHGGGRTARRHTTAASNHWPTPEELLQVPQGRRKGRRMGFPRFKSKDKAVPGFAYTTGSFGLIDCDPYALRLPKIGRVHCMENASKRANGAKVLRMSVSKRGGRWQASLTVERADLPIPSPPKGGSVGIDLGVKELATLSDGTVIHNPHALKSNLGRLKKAQRNLSRKRKGSNRRRKAGARVARLYARVANLRSDVLNKTTAMLAHTYADISIEDLNVAGMVGNHGLAQSIQDAAFAEFRRLLTYKTARTGARLHVIDRWYPSSKTCSNCGTVKAKLPLSERVYHCGKCGLDMDRDLNAAINIQVVGSAPETLNARGGSVRQAHPKGGNNAASGEARTKRRRESRESWSWSRQRGHADDFALATS

SEQ ID NO: 34616 - protein, 456 aa, unknown
  TnpB Polypeptide
MRLYNSAFRYAYNRFLDNYSKNEVYHLVRQVFKDLPSWYVNSAIEGAVEKLKSIKSQGINPRKVVFGGKKNFEKLCKHHLVEREWHERRKGRLVSIGNPNMKFVLENDGIYLQITSTRKRKPIKVRVKRKVKSEKDKWITFISMLLEGKKFPYTVELKKINGKIYGFVSFQIPTPEVKITRENGVIGIDINAKPFHLAIAEINKDGNLISYKRIKLGYLNNFSKNRKEYEEWLIAHKIINLAKEKNKAIVIENIENLPKGKRGDGKKKLRKVLGRFSYERILNKIERLCKLNGIEIIKVNPAWTSVQGKLKYSPQLNIDKDIAGAYVIGRRGLRLLKDKRFLNYLELSLKQRQKELEKKLKKETNKYKQNPIKIEINKIKRDLKLIKSLQSEPEGLLGAYGRNSGNHKNLWQTLEVALTTLLPEKRCFSPLKPILVEGKWERVVGRLGPFCLGGPK

SEQ ID NO: 34617 - protein, 390 aa, unknown
  TnpB Polypeptide
VNVLELIITAKVKLLPTPDQMVLLDTTLDTIRDGLNFASKVAYANNLLSAFKKLQKLVYADLRTKYNLKSQMACNICSVVAGSYASMKANNESTLAVYKKPKLQYSYNRDYSFTKDGLVSIGTVDNRIKIPFLKNGLENYFNGTWKFGTGTLVKKKEKYFLHISVKKQIETCQDDQITNVIGADVGMNFLITAADSKDHMLFINGKQVKTKKAQFQRTRKSLQQRQTPSSRRRLKQIGSRENRWQHDLNHCAAKALVNFAGKNSLIVLEDLTGIRSATERVRHKNRYYSVSWGFLDLRNKVEYKAKLAGIQTLAVDPRYTSQKCPKCGHTERANRNKKQHTFTCKSCGYSSNDDRIGALNLRQMGIEYRYAVSSQTGICLEQDAVSHPTM

SEQ ID NO: 34618 - protein, 391 aa, unknown
  TnpB Polypeptide
MKQAVTAKVKLPHREELQKTVETYSQALQFCIDKAWEEDITVRSNLHDECYYEVREKFDMPAQLTCNILQHAIEAVKESGSKPEVKDEYSPRYNFPRSASVNEEWTELSLLTTDGRITLEIQVPEYYKKYLDCEVKESTLMKKNDEFYFCFVFAKEVSIQSSCRDSQVLGVDLGVNKTAVTSDNRFYGTGIKEKRKERDRKVAEIQSKGTHEAHNRLKEMGRRWTRFTDWQNHNISRKIVDSVEKGDVIVLENLKHIRKSSSADTEWVHKWSFADLQNKIEYKAHLKGAKVEYIDPQNTSNKCSECRHVSEDNRKKGFFECEKCGFSLDADLNASRNIAQRYMRNNEQAGSPVNLPNDNNCLKDSGNNESDVARTFEDENTRKPLPPEVKA

SEQ ID NO: 34619 - protein, 463 aa, unknown
  TnpB Polypeptide
MCVCLYCNLTFFHLIFINNLLYPWYNNIAVCEVMSMKYTCSYKVKIINEFKTVNQTVRIYQRAVKYIIDVSLDEYENIKSLSSMQSMNYIERLIHSTSARRAKYHSFDKRFYKMPSYLRRSAVTTANAIVKSHKSQLKHWLNNGCRGKKPKLNRNQLPMPCLYKGNMFSLNDDGTCSIKVFKDNDWKWIIVKLRASDLAYITKRFDINSSSAPVIQKINHRYYLRFVFQDKVELPQASDVICAVDLGINHDAVCSIISRDGTVKARRFINFAKDKDYLNRLRKQIREAQSRGNRHPNKLWRLHNSRNRQLSIQIARAVAVFAVEHRCDCIVFEHLDLKRVKSNQKITLWRKREVQRITESLAHKNGLRLARVCAWNTSKLAYDGSGEVKRNKDNYSLCTFSNGKQYNCDLSASYNIGARYFIKDIMNGLSSKIKSQVEAKVPELGKRTTCTLNSLINLNAVLQ

SEQ ID NO: 34620 - protein, 428 aa, unknown
  TnpB Polypeptide
VDDELLCLNCGQGLSRDYRAVHSSAEYAGMTTHRKVYRFQVKATPAQAEQFYQMAGAKRYVFNWALARRKDHYAEHKEGLSAKVLSADLTALKKQPDAEWLKAVDSQLLQQALKDVDRAFQNFFDKRARFPRFKCRKRETPSFRIPQRVKVENGKVYVPKIGWVKVRQSQPVDCPTKSATFKRDAAGRWYVTLTAEFEMPDVPLPLAKAEQVIGIDVGLKDFAVLSTLERVAPPKHYRLLERRLAKAQRRLSRRQKGSQNRDKARQAVAKVHLKIRNQRNDFLHKLTTSLVREHDGLCIEDLSLKGMAKTKLAKSVLDAALGEFRRQLEYKSVWNRKHLAVIDRWYPSSKLHMDCGALNDALTLSDRTWLCGCGETVDRDLNAAQNIRAEGLRMLEAAGHADSLNACGAGVRPRYLGQSALKQESPRF

SEQ ID NO: 34621 - protein, 383 aa, Alicyclobacillus sp.
LASTPQLDALARSAGNLYSTVVVDFWRTVRKHGIWLKPSAMMRWHTSNQLHAHSADAVVQSFYAALKSWRKRRKTDPQAKPPYRRRRYFRVQWKSSAIRVRDGKLILSNGRGNAPLVVPWLWETPVLVELGWADSAYELRAVYSRPQVEPVTEGGVVGTDLGEVHLAVVHDGERTTIYNGRELRAKRQYQNKLKARLASKLSRLQKGSRRWRKLQRSMRKQLRKLDHQIWDILHKQTTTLVSTLHSSRVQTVVIGDVRDLRRRVDYGPAVNQRIHQMVSGKVRWLITYKAERLGMRVVLQDEAYTSQACPRCGCRHKPKGRVYTCPACEFRFHRDGVGAINIRRKYLGLGPVVGVMASPTGVRWNPHLRARVARDERERIPAL

SEQ ID NO: 34622 - protein, 395 aa, unknown
  TnpB Polypeptide
MRLVEKHIVKDNRFEDICLKPGLLYNYVLFNVRQGIFEGNYLKEYEFSTKLCKENQIDFRNLPTAVSQQVIAQVFSSIRSWIRLKKEYEKNPSKFISRPKLPKYKKGKKQNMVVFTTSACRLKSDGYINFIKNIIPPIKTNIGDNKLCQVRVIPQATCYVVEVIYEKEEHDLNLDKNNVLSIDLGLNNLCTCISNVGVKPFIVNGKIIKSFNQWYNKKRARLMSYIGDKGTSRRLRQLNNYRNFWIEDKIHKVSRYIVNHCIDNNIGSLVIGLNKGWKNGINLGKRINQKFVEIPFSKLIDKISYKCKLVGIILQVHEESYTSKVDHLAFEKLCKHDVYLGKRKKRGLFQNSIGKLINADINGAIGIGRKVFGDSYVSKIIDSGLAFNPVRVNIL

SEQ ID NO: 34623 - protein, 418 aa, unknown
  TnpB Polypeptide
MIVLETKLKGTEEQYERLDEAIRTAQFVRNSCIRYWMDNKGIGKGDLSKLCAQLAKDFEWANKLNSMARQASAERAWQSIARFYSNCKKKKPGKKGYPRFKKNTRSAEYKTSGWKLSNDRKSITFTDGFAAGSFEMWGTRDLNFYQISQIKRVRVVRRADGYYAQFCVDVEREIKHEYTGKIVGIDLGLEYFYTDSDGQTVANPRRLRKSEKRLKRLQKKVSRRNKGGKNRRKAINRMARQHLKISRQRKDHAVKTAGALVASHDLITYENLQVRNMVRNHKLAKSISDASWSMFIEWVEYFAQLHKIVTVAVPPQYTSQDCSGCGERVQKTLSVRTHQCLKCGLLMHRDHNAAQNILVKGLEVLGHKHSTDGQSGTYTPGDENHLWLVEGNFGWLSGLVESGNPGRESMESPVKLTL

SEQ ID NO: 34624 - protein, 315 aa, Clostridium sp.
KNTKGYKWLYEVSNATLKESIRDLDKAYKNFFNGSGFPNFKSKKKSKPKFYSRYDRIHFTEGFVHFEKIGKVKCKVEYNIDLTTIKKFNNPRIYFNGRVWVLSVGIEIPVEKTKLNDFSLGIDLGITQLAITNIDNLYAPNINKTYRVKKLNKRLKKLQRQCSRKYEKNRKGGSYQKTKNIAKLEKKIKKLHSKIKNIRLNHIHQSTSKMVKAKPFRVVMEDLKVSNMMKNRHLSKAIAEQGFNIFINTMKYKCEQYGIEFIQVPTFYPSSKTCSHCGRIKKDLKISDRIYKCSCGFICDRDKNASYNLANYGLV

SEQ ID NO: 34625 - protein, 381 aa, unknown
  TnpB Polypeptide
MLRAIKVRLYPNKTQEQTLNKVLGCYRFVYNHMLALKQNTYNENKASLGLGELSKYFHGQLLKDEQYVWLKEQNTKVLNQAIRQMLTAYDKFFKQHNGFPKFKTKKDKQSALFPLGAISKRNEFNDRKITLTQPLKDIKFRCSDLYFKRLQRYKERIRSATLSKTKSGNYFLSILIDLPQEELIKFRQTNKHVGIDLGIKDFVITSDGEVFENKHFFKKQENKISRLQRQLSKKQKDSNNRNKQRVRIAKAFERLTNKKDAYIHSVVNKLLTYYDTVFMEDLNVKGMLKNHHIAQAINEVGFYKFKEILTNKALVNNKEVVFVDRFYPSSKICSNCGSKKQDLKLMDREWVCPNCGTYLDRDMNAAMNILLEGERIISQKH

SEQ ID NO: 34626 - protein, 278 aa, unknown
  TnpB Polypeptide
MLRAVKVRIYPNKEQRVQLNKTLGAYRFVYNYMLDLKQKEYKESKKDLSRFDLTSVLTKLRKDENCLWLSEVNISVLRQSIRQMLVAYKNFFKEHRGFPKFKSRNNVQTALFPIDAISKKNTFERKTITLTKNLKDIRFRCSEEFYSRLKKYKDGLKGATLTKSKSNKYYLSILIEIDDSEINLLPHTKKDVGIDLGVKDFVITSDGEFFENKNFLTKEEKLLKKLNRQLSKKKNGSNNKNKQRLKIAKLHDKIANKKDYYIHEVVNKLLSNYDNVYM

SEQ ID NO: 34627 - protein, 348 aa, unknown
  TnpB Polypeptide
VQAFDRLAQQLPNALERAYANFFAGRADFPRFKRKGQGDSFRFPQGFRLDQGNSRIFLPKLGWLRYRNSRDVLGELRNVTVSQSGGKWFVSIQTQREVEQPLPTASTAIGIDVGIARFATMSDEGFIEPLNSFKKHRQRLARYQRRMCRKVKFSQNWKKEKARVQKIHTAIANARKDFLHKASTAISQNHALVCIEDLQVRNMSRSAKGSSEQHGKRVRQKSGLNRAILDQGWGEFRRQLAYKLEWQGATLLAVPPHHTSQTCPCCGHVSKDNRLTQARFLCISCGYGNHADVVGAINVLERGYRLLACGEEGAGPGRKTQVKPASVKQEPAEATRAKALAQQESPFL

SEQ ID NO: 34628 - protein, 455 aa, Bacterium sp.
MQTMRNPVKVSASGHRRLDQVFRMCAELYNANLESWKGTYQWWKEHHPDTDDKFPSEWNLSLYDRMQMFTKVRSDHPEWERLSVKVGRGVLVRFNRTITSFYKRCQEEGKKPGYPRFKPVRRWKSIELPDPTPSMLQAPGTPKNQSVKWWKLSVKGLPRLRYRDKGHRLEKALGMGAAVKELRVVRTPLRTELHVVLKHPDRELPEKPVTNPVGIDTGIADRLILSDGTHIEARKPDHRGIIRKQKALSKADQAHRQREKAAGKRLPYSHTREKKRIALARAWRRETERADQADFRLCHDLVTNFDGIAIEDSPVGAWTRSRRFGKKLFDQRLSSITPKAGDKAAKAGIPFKKVDPAYTSTDCSQCGHRRKMPLKVRVYECGSCGMVMCRDCNSAITISARAFGRIPGSGGKPRCSRAIEDVDGRPASPPGKSGGLTGCGTVPENDSLTVVNYSI

SEQ ID NO: 34629 - protein, 321 aa, Frankia sp.
VHAGLHDDAGLHFGFGLHALGPDRRSRSGISTWSAKACPVRIVSSGVAWTLPATARRVNTLPRIGRVKAHEPMGALTGRLADGRARLLGATVSRTAGRWYVSFTVEADREIPAQPGRGGAVGVDLGVRHLAVLSTGEQIPNPKHARRSERRLRMASRAYARSKPGSAGRRTRVTALGRIHARVAHQRRDGLHTLTTRLAKDHDVIVVEDLHVAGMVRNRRLARAISDVAMAEVRRQLDYKTRWYGSTLVVADRWYPSSKTCSSRPRPERRGQPVSPRRRQYIGDGKRPWSRPEDPARGAGGCEAETGHGHGRSDPGCPTER

SEQ ID NO: 34630 - protein, 266 aa, unknown
  TnpB Polypeptide
VGAAPENGRQDRWHRPLEGQIKTLRINKKAGQWYAAFSCLMDDPAPCAPTGENVGIDVGLTHLLTMSSGETVENPHWYRMEQATLWVIQRRIARRTKGGGNRKKAIAQVQRQHERIANRRKDYLHKLVKQMVRSYDTIALEDLRITTMVKNHHLSKSIMDAGWTYFAAHLISKAESAGRQVCFVDPAYTSKTCAGCGERFAHEITLAVRWVICRRCGLSLDRDHNAAINILKRAQGACGSRPAGTPPLGANVAGVPACVAQEAAPL

SEQ ID NO: 34631 - protein, 403 aa, Campylobacter sp.
MSKTKNIYSTIRSAKFVLKPNSKQKEMLESFFGLSRAIYNISLCNIKNSKFGIYEIQNGKNKGNIVPRIPTEFDLNNSLPKLKDVYNYLSLLPATYAQSVMKNLSRGFDNFYRTLNYPKFKAKKNNIQSFNCYAGAKTEGDYIILIKPRGSSYTKDDLKIRFKRHKIKYNFDKVTGFTISKENNKYYISFAFHCNIESKEISGAVGIDLGIKDFAICSDGVVYENKRFFEKSLRKLKISQRKLSKKQKGSNNREKQRLKVSKLHRKVKNQRNDYQHKVSRELSDKFKVICLETLKVKNMVKNKKKLAKAISDAGWGSFIEKLSYKVAENQGCLIKIDTYYPSSKTCSNCGCIKESLKLSERTYHCNECGFSIDRDLNASINILNLGLKNVVAAVTTTGTTLKN

SEQ ID NO: 34632 - protein, 336 aa, Streptomyces sp.
VRYGQQSAQLKAVRAFAPERQGRWSFSSQQATLRRLDKAFAAFFRRVKAGEKPGYPRFRSVSRFDTVDFPKDGDGCRWDAAPHDPVTRVRFQGVGHVRVHQHRPVVGKVKTVSVKREGKRWYVVLIAERAQPKPIPATGSVVGIDMGLAHFLADSDGGFVPNPRHGRKAAAKLGAAQRALSRCKRGSKRRRKAVQVVARLHRKVRRQRLDHAHKTALDLIREHDVIAYEDLTIRNMSKTPTPKPVPGKPDAFLPDGASAKTGLNRSIADAGWGVRWPVAKLNRLSEKPPNVYRVEESQLSEVPMVSGAVLAAGGALHGHGRGRGERVRNPQRTRTR

SEQ ID NO: 34633 - protein, 560 aa, Thermocrinis sp.
MSSPFTRGLPYQPLKYIYYFNTFHLLCQVLLRLFEKILQAVLSSYNKSLMYVSVQFKLQLNSPDREKLLELMRKQSSAIRSAYKLLKTKNFHNQIYQKLRQLFLDLPTRYIDSAIYKAKQYPTDKKVVFGGKALFEKLCKNRDEKSREKLKRKWKEQRQGTLISVGSKADKGNRLMRFESINGELLLRITVSERKFIYAKVLREPSNAEDKWNTFLTMLQTSWQSKVYFPYTVELKLRDGEIYGNVSFEIPTLEVWLTKEYGVIAIDTNASPLHLALAEVSPDGNLLSYQTISLHEFISFPKNRKDYEEWLLAHKIVEIAKEKGKAIAIENLKKVNKGFRGNGKANLRKRLHHWNFKSLLSKIERTAKLNGVEVIKVNPAFTSVIGALKYAPQLGIDKDIAGAYVIGRKALGFKEEIPENYLKLLSDKEYLEYAICTYEEKEKELKEQLKKETNQYKRNAINSELKQVQKAKDLLLEKLKSLQDEPSSCEAVNGRNPKRGETKKVSQSAWQVLRVAFLFPVLGKVLSRDLSPLKPVLVEGAWDRVRRRLVPLEVGGGTSQ

SEQ ID NO: 34634 - protein, 511 aa, Thermocrinis sp.
MYVGVQFKLQLNSSDRKKLLELMRKQSSAIRSAYKLLKDKNSHNQIYQKLRQLFPDLPTKYIDSAIYKAKQYPTDKKVVFGGKALFEKLCKNRDKKSREKLKRMWKELRQGTLISVGSKADKGNRLLRFESINGELLLRITVGERKFIYAKVLREPSNAKDKWNTFLTMLQTSWQSKVYFPYTVELKLRDGEIYGSVSFEVPTPEVWLTKEYGVIAIDTNASPLHLALAEVSPDGNLLSYQNISLHELIGLSKNKKEYQEWLIAHKVVEIAKEKGKAIAIENLKKINRGYRGDGKAKLRKRLHHWNFKSLLSKIERTAKLSGIEVIKVNPAFTSVIGALKYAPQFGIDKDIASAYVIGRRALGFKEEVPENYLKLLSDREYLEYAIYTYQEKEKELKEQFKKETNQYKRNAINSELKQVQKAKDLLLEKLKSLQGEPSSCEAVNGRNPKQGEVAKTTSQSAWQVLKSAFLFPVLGKVLPRDLSPLKPLLVEGAWNRVRRRLVPLEVGGTPR

SEQ ID NO: 34635 - protein, 234 aa, unknown
  TnpB Polypeptide
MIGSLNLLLSLKIVSVTILLPFFSNMNRKTFHLFPNQVQMLLDLTINPMDFIWTVMGIKREFINTIEKVIRSLLKSKEDFHEKAGSKKNETKSSNYFKQMRKVNRIYRKIANQRLDSLHKKSTEIANQYGIVCVEDLDMKAIGNKGFGNGKATFDNGYGMFLNMLDYKLKERGKYFVKVDKWYPSSQICHCCGSVKKLDLKDRVYTCDCGYTGDRDHNAAINILTEGLRILQSL

SEQ ID NO: 34636 - protein, 525 aa, unknown
  TnpB Polypeptide
MFTSKYHNRIKETNIKHLLHTASNIKNQLSQYIYDHRHLLLSSSGIKELKENYKTATSNILLAWNIQKEHYLLVDLYYNSLKKHMQKLNIKLQDKMIIQYYSKDSKHHKKGDTKLFKLTYRSNDLTKFVKYLIYLDHTKNLKDQLKHSEVIYALYEYYESKGLIDRITALAYSKQQRLLSKLKLIQFKEYSSLILDCSINKARIDYMPDNKFYQYWFVFRMRKGGIEYRLPLQHNDSYHENKKLIAREFYINLSPKNNSKINIATTCEADKPHFNPFNKVVGMDLNLKNNFAKLSDGYTLDYDRDYMQNTVKALKELDKIGYQNLTNGQLQKLKKIHRQLEWYASLLIHKLITYLESHSITDIVIEELLLSGKFGINEEFDIKYTRLSKLLHLSKVKDLLKRQAEKHGIRVHITQSHYTSQTCPKCGYISKDNRKTQESFKCVNCGYESNADSNAAYNLELRYTSDVLRSKLHNIDEYGRLVPKKLNRYQIKAVLNSYYASLPTAAPRCGQDTEQAEGNFVKGDE

SEQ ID NO: 34637 - protein, 306 aa, Pseudoalteromonas sp.
MPTFKKKGEVNSFNFPQGFKIDKNGKRIFLPKIGWVNVRKSQAILGKAKNVTVSQKGKHWFVSIQVEQEVAPPKHPSNAMIGGDLGVKRLITLSDGSFVEPIDTSKQTIRIKRLQKQLARKVKFSSNWKKLKAKITTFHTKVANIRHDKLHKISTQLSKSHAIIVLEDLKIRNMTKNSKGSSEQHGKMVKQKSGLNRVILNQGWGMFKEMLKYKQDWLGGQVIFVDPKHTSQTCPACGHQSKDNRLTQSKFECAKCGYQDNADHVGALNILARGHRVLACGEIDISQLVEAGTCLMSDHKAPMVLN

SEQ ID NO: 34638 - protein, 235 aa, Pseudoalteromonas sp.
LKLLQNAQRLVGVVHASLLVDDGVEAPVLLHTISKVTGIDLGLSHFAIQSNGRKTANPRFVKRAEKNLRRKQRQLSRKAKGSANRAKARLLVAKCHEKVANARADFQHKLSRTLVDENQAVIVETLKSANMMKNRKLAKHIADASWHGFVVKLEYKLKEQGKHLVKLDQWYASSKTCHCCGHKMDEIPLSVRKWDCPSCGTTGIDRDLNAALNIRDKGILELKAAGQSSLLMEAA

SEQ ID NO: 34639 - protein, 583 aa, Streptomyces sp.
MGGLRDVVEPFVASGPAGVVIRTRIKQLTPQDETVLRLVGAHLGALASKDLKARCADGLEHSTETWAVRKRVLTPVASSRWAGAITKASHDQWALARRGQLAHIQSLEAGVAMITDRLAQPVGQKGSKNTPGGYRSRQEWFAKSRRLHVLQDQLQRARSDRQAGSVHVVRGGKRLARTRHHLEAAQLTEATWRERWECERWFLQADGESGKRYGNETLRVTPEGRLSIKLPAPLKDLANAPHGRYVLTGTVRFAHRGTEWADRIEVNRAVAYRIHYDTGRNRWYVTAAWQSPPARIIPLESALAGGVIAVDTNADHLAAWRLDVHGNPVGNPRRFFYDLSGTAGHRDAQVRHALTRLLHWAKACGVAAIAVEDLDFTAEKTREKHGRRKRFRQLISGMPTGRLRARLSSMADAIGIAVIAVDPAYTSKWGAQHWKSPSPARTAPPHATTRPPWRSAGAPWDTGSGDGRHRPHSTGVVRWGIGPSRPHPAFPGVRDPAPAFPDHGHDPLAPGAERTWGTRTPSTVRGVRLSMGPGSRTHSRSVSRNGVVYTVSERGRPRDRGRTARRLRRGHWGRRRAAQRHGK

SEQ ID NO: 34640 - protein, 463 aa, unknown
  TnpB Polypeptide
VQLTYQTRIYPTEEHANKLIEAMTIVGKFYHFCFNNFWFDKELSYAELKSKSFCSQYQLGTKQANSLAREAKAKVELYRGMCNYTENTLTSKWRTLNKETEKFIRLADKIELLKGKFPKQRKPKSEANPFKWTYEYYLTCDKAGRKQFYRQLKSSIWHNKRRLAKLQKKLKKLQNPSITFGSKDNQRKLTKGKISVETWREIRHNFIFGIGESDISFGNNVIKVLNQEQIQVEILNLEKLILNCRLRNKHYQKVLGECEATGTKRAARLLRRGNKFYLQSILDYSQEESQIKQDVDAIAPSERHYCGIDLNDGFFSVYSPSVWQNYHYDAQFKDYNSNQREQNLRQLIKQMFKDIKQDNIHVVRIEDLNFMKKKHQNLGKGMNKMLHELPYGQFRQIIESECFRHHMVVEYINPAYSSQKALKLGLDRHLGAAKIIAEGNIGVFEFKKSLKNEQKNEEKQLTT

SEQ ID NO: 34641 - protein, 397 aa, unknown
  TnpB Polypeptide
MKTIHRTYKFELRPAQEQKVLLDKHFGCVRFVYNYFLNERKEQYQKNKKSDNYYTQAKTLTDLKKKEETIWLKEVNSQALQFVLRSLDTAYLNFFRGNAKFPRFKSKKKKNSFTVPQHTNLIDGKVYVPKFKEGIKCIVHREVKGEVGKMTFFKTPTDRYFVSILTEEQYQPKKKTGAVCGADLGLKDFLITSDGNKFKSNRYTKRYEKELAKAQKHLSRKQKGSNSFEKQRRKVAKVHEKIFNTRQDVLHKVSHQLVSDYDIICLEDLNVKGMMSNRKLSKYIADASWSTFVRFLEYKADWNDKKVVKINRFYPSSKICHVCGWINQDLNLSMREWTCKNGHCLDRDLNASINILNEGLKIIGAELSDYTSGELSKTSFGKHGSTKPEAHLSLANG

SEQ ID NO: 34642 - protein, 191 aa, unknown
  TnpB Polypeptide
MLIRKVGIQRQDWMHQVSSNIVRSNSLIATEKLNIKGMTHKAKKGSKRKAQKTGLNRNMLDVGIGMLKYAIDYKVNESGGSYTEIPTQKVKPSQTCPMCGRVQKKELSERVHSCPCGCIEDRDVAAAKVMLNWVLYGSTVFGTSIVKRGELSSTPIPTYCGGLQQLDSKKRKKHSLLDGNLETPSSRSRVG

SEQ ID NO: 34643 - protein, 220 aa, unknown
  TnpB Polypeptide
MVTRRTAFRLYPNSAQEKMLYEWRRMHCYLYNSALADRRDSYQHENKSVTYFDQQNRLPEFKKVWVEYKALGSQALQATLKRVDFAYQRFFTKKGGYPKFKSIRHYSGWTYPASSGWKALTDGVNGYLDLSNLGRIQMRGSARQWGNPSTCTILNRNGKWYASITLNCELVRVAGDGAIGLDFGVHHAIAMSDGTIIDAPKFLAKAAKDIKKANKEKRRK

SEQ ID NO: 34644 - protein, 523 aa, unknown
  TnpB Polypeptide
MESLRLACDRDKRSQHEGDHPRDERGEGRQGQTDDYHLSHHQRQGSQLHGGLAAIPRQGPEQAGIRAGAQGARGYMQLTVLIQSGAMNRCESSRWGSRNRSRLLDCMSVVPLWRTQLMRISRAHRFELKPNNLQRTHFVKCAGVARFAWNWALDERQRLFREKQGDERFTNAIEQHRRLNVLKKTDFPWMYEVSKCIPQEPLRNLDNAYALYRKGRKVGRKTRLPRFKKKGKERDAFAFTTGAIRAEGTHVVLPRIGRVRVKESAVLDGRILRAAVTRDADRWFVSFMVVQDSVNPQPPTGHAVGVDLGVSHMATLSDGRVIDSPRPLQSRLRKLRGLAKELHRRNKGSNNRKKSADRLAKAYWRIGNIRRDALHKATTHLAKNHGEIIIEGLNVQGMAGSRYLARAISDVGFGEFRRQLEYKCRWYGSRLTVAPRFYPSTKRCSLCGHIKKEMPLSERTYKCESCGLVLDRDLNAALNLVAVSSTETLNACGDLASTVPARVLRAGPLKQEVNAAILHGIGG

SEQ ID NO: 34645 - protein, 268 aa, unknown
  TnpB Polypeptide
MQAANTVCDSLSAWAWENQTFGQYPLHKAQYAAQRASSGLTAQVVVRAIGKVADAYKLDRHTERTFQPTGAIAFDDRILTWYVDKGYVSIWSVDGRLKLPFACGEYQRGLLAFRQGEADLAFVDGNFYLMATVSIPDPPLMVMDGLLGVDLGIVQIATDSEGNQCSGEEVKSCRSRSRAHRSGLQRTGTKRARRTLKKMRRKASRFCKHVNHVISKKLVQLALSSRKALCLENLTSIRDRANDFSREMRWQMGNWAFFQLASLAIAYR

SEQ ID NO: 34646 - protein, 312 aa, Escherichia sp.
VKRLQAFKFQLRPGGQQEREMRRFAGACRFVFNRALARQNENHEAGNKYIPYGKMASWLVEWKNATETQWLKDAPSQPLQQSLKDLERAYKNFFQNRAAFPRFKKRGQNDVFRYPQGVKLDQENSRIFLPKLGWMRYRNSRQVTGVVKNVTVSQSCGKWYISIQTESEVSTPVHPSASMVGLDAGVAKLATLSDGTVFEPVNSFQKNQKTPARLQRQLSRKVKFSNNWQKQKRKIQRLHSCIANIRRDYLHKVTTTVSKNHAMIVIEDLKVSNMSKSAAGTVSQPGRNVRAKSGLNRSILDQGWYEMRRQLA

SEQ ID NO: 34647 - protein, 423 aa, unknown
  TnpB Polypeptide
MQLVERHLIKLGHELYRTLDDLTFKAKNLYNHGLYLYRQSYFEYKKNPDKPVLSWVDIDKSLWRQGHEDVRALPSKVANAVLKNLGEAITSYWKLVRLKREGGLGQKPKLPNYLHKTEGRYPVSFNYQTFGSKRGSNQELILCPRGINLPIPTKVEHPKQVRIVPNRHNFIIEVIYNVEEQELKSTSRYAGIDLGVDNFATVTFSTKNKPLIVKGLELKSINQGYNRLISKAQSLLPETQRTSRSIHRLWSRRSWILRTRIHQVTAFLATLFDEMQIEKVFIGKNINWKQNLPFGKAIKQRFAYLPYETFIEQLRYKCQLRGISVIVQEESYTSKASFLDNDDIPVHGETGNPRFSGRRIKRGLYQSGNGQLINADVNGSYNILRKGLMNNHLSFNVDNPLTHPLVVRGIGKEPNKKLVKLYM

SEQ ID NO: 34648 - protein, 386 aa, unknown
  TnpB Polypeptide
MFKHAYTFRLYPTRKQQERLQWTLDRARELYNAALQERKDAYRMAGKSITYYDQANQLPEIKQIRPEYNDIHSQVLQDVLRRVKKAFDNFFRRVKQGEDPGYPRFQGRNRYESFTYPQGGYSLTADNRVCLSKIGSIKVKMHRPMKGTIKTCTIKREGDQWYIVFACEVESVPLEANHEAIGIDLGLLHFATLSEGRTIENPRHYRRAEKHLKKLQESLSRKKRGSHRRKKAVKGVAKAHRKVANQRRDFLHKESRKLVNAYGTLVFEELQPANMSKRPKPKQAEDGTYLPNGAAAKGGLNKSINDAGWSQFQQFCTYKAERAGRAVLFVDPRYTSQICSGCGAIKKKTLDERWHSCACGTELDRDHNSAITILALGRRVQAAQAS

SEQ ID NO: 34649 - protein, 470 aa, Mycobacterium sp.
  misc_feature (97)..(130): Xaa can be any naturally occurring amino acid
  misc_feature (354)..(462): Xaa can be any naturally occurring amino acid
MARLKVPEGWCVQAFRFTLNPTQTQAASLARHFGARRKAFNWTVTALKADIKAWRADGTESAKPSLRVLRKRWNTVKDQVCVNAQTGQVWWPECSKXXXXXXXXXXXXXXXXXXXXXXXXXXXXXXXXXXFKKKGRDADRVCFTTGAMRVEPDRRHLTLPVIGTIRTYENTRRVERLIAKGRARVLAITVRRNGTRLDASVRVLVQRPQQRRVALPDSRVGVDVGVRRLATVADAEGTVLEQVPNPRPLDAALRGLRRVSRARSRCTKGSRRYCERTTELSRLHRRVNDVRTHHLHVLTTRLAKTHGRIVVEGLDAAGMLRQKGLPGARARRRALSDAALATPRRHLSYKTGWXXXXXXXXXXXXXXXXXXXXXXXXXXXXXXXXXXXXXXXXXXXXXXXXXXXXXXXXXXXXXXXXXXXXXXXXXXXXXXXXXXXXXXXXXXXXXXXXXXXXXXXXXXXXXKDHSLATV

SEQ ID NO: 34650 - protein, 437 aa, Halosimplex sp.
MSVVVRRTNTFAVRPRSEQDEQLLRDLLDASASLWNELNYERRQQFFNGDSVWDTADYRKQYVGVLGSATAQQVIRKNSEAWRSFFAAREDGEDTAPPGYWGNEDDGRELRTYIRNDQYTLETGERSRLEIPVGQDLKDEYGLGYHDRLRLEVAGDSKWKGEQGRLALYYDEVSDTFRAIQPVTVPASRQDSPLADEAAALDVGANNLVACTTTTGQQYLYKGCDLFARFRETTEEIARLQSNLCEGRYSSHRIRRLYRKRTRRRDHAQGALVRDLMERLYDEGVATVYVGDLTDVLSEHWSAEVNEKTHQFWAYRSFIGRLATTVEEYGITVEVKSEAYTTVECPACGERENTKRNGDVFRCPCGYKGHADLDASRTFLERQASELGVGSMARPVRLTWDDHNWSELSRSPERASPNEERTNRSTGDGKLASVDAA

SEQ ID NO: 34651 - protein, 277 aa, unknown
  TnpB Polypeptide
MYFVKNNPKDCFCERHRIHIPTLGWVRLKEKGYLPTTKDGWRIRSGAVSKRAGRYYVSVLVDVPDLPVKQKNDQTEGIGIDLGLKEFAILSNGKIYKNINKTGRIKKLEKQLRRAQRCLSRKYENLKKMRKGEPTQRANIQKQKLKVQKLHQRINQIRTDYINQTIATIVKTKPSYIMIEDLNVKGMMKNRHLSKAVASQKFYEFREKLMMKCHMEGIELRIVSRWYPSSKKCHCCGCIKKDLKLSDRIYRCSCGYIEDRDINAALNLKDAGTYEIA

SEQ ID NO: 34652 - protein, 408 aa, unknown
  TnpB Polypeptide
VSEILILCERHIVKPNNPLFSECDNLSFLAKNLYNSTLYYQRQSFFESDFQNYYAVNREFTHTNQPDYRALPAKVSKQVQMLVDKNFKSYFALVKKKTTEGYSSKINLPNYLDKTEGRCTVPYPKDALSLKVEGYVKLSKTSITVKTNIPKEDIQGARIVPKGNHYVIEILYRVVSKPLRSELPKGVAFIDPGLNNLMTITSNCFNPILVNGRPLKSMNQLANKEIAKLKSKLSARGLYTSPLLQSVYNKRARRITDMLHKITTQLVNHLDSHNIDTVIFGHNIGQKQDINLGKVTNQNFVQIPFTQLIAQLQYKCQLKGIKFILIDESHTSKCSFLDEESVEHHEKYKGKRVKRGLFKTSSGILINADVNGSLNIGRKYLTKLGLYTNELHQTLVQFMVNPQLVKLL

SEQ ID NO: 34653 - protein, 262 aa, unknown
  TnpB Polypeptide
MTEHTVSSIRTLRLKVKSEAYTWLSAAAIEVNTVWNFANETSYRAARPFAGPSRWLSALDLGLEAIVTTSDGEKLEAGRFYRNIEQKIAQAQRRGHKRQAKRLHRIAARRRKDALHKFSRRMVDRYQTIVVGDVSSLKLAKTRMAKSALDAGWGMLKAQVQYKGQQAGRCVLIVNERNTTRTCSSCRALSGPSGLDMLVVRTWICHECGVTHDRDVNAARNIPSAERCPPSVRGNEPPGSVAEPSQPYWRCEAGIPALTAAA

SEQ ID NO: 34654 - protein, 262 aa, unknown; identical to SEQ ID NO: 34653
  TnpB Polypeptide

SEQ ID NO: 34655 - protein, 186 aa, unknown
  TnpB Polypeptide
LKRFKISHRRISRKKFLSHNWFKVKTRLARAYEHLKNLREDIYMKLGKYFAKHYDVVVMEDIQVKQLVDKSDKELRMRLYDVAFHELKDIIWYQMEKYGKKLTLVNPAYTSKTCARCGYVKNLTLADRVFICPSCDWVADRDYNATLNILKRSGWEPPLVPVELRPLPVAKGYGQGGALKQEASAL

SEQ ID NO: 34656 - protein, 373 aa, unknown
  TnpB Polypeptide
LLIAYKYRMYPNKEQEVFFSKSFGCARFIYNKMLGDKIEYYNEYKENLNNTPAQYKEEFPWLKEVDSLALANAQMNLQAAYNNFFRNPEVGFPNFKKKYVNRFSYTTNNQKGSVAVTERHIKLPKIGLVRIKKHRVFDGLIKSVTVSREPSGKHFVSVLVEQADIEQLIPDGSTIGVDLGITDFAITSNGDKTENPRCLIKSENKLKQLQRSLSRKKKKSSNRNKARIKVARQHEKIRNQRNDFLHKESKKLIDENQVICLEDLNVKGLVKNHKLAKHISDVSWSKFKTYLEYKAKWYGSKIIYVDRFFPSSQICSNCGHNGGKKLLDIRQWKCPKCGAAHDRDINAARNILAEGMRIQTAGTAGLACGVLSS

SEQ ID NO: 34657 - protein, 384 aa, unknown
  TnpB Polypeptide
MKKAYKFRIYPNKEQVDVLNKTLSLCCNLYNACLEQRIIAHRLGRKVSYFTQQNELPELKEQFVEYKEVYSQVLQDVVQRIDKAFMNFFLRLKNRNGKAGFPRYKSFNRFRSITYPQSGFRILPNGHLELSKIGVIRMFKHREIEGNIKTCTIKKDSAGDWYAIFTVEILDVPKHEPKTAIGVDVGLRNFVTLSTGESIPSPKFLKSSEDKIRRIHREVSRKKIGSKNRKKCVRKLARAYRKIERQRDDFIHKVSRYLSRKADVIVFEDLNINRMVQNSHLSKSIYDACWGKLMQYTAYKVEETGGYVYFVNPAGTSTTCSRCGEMLQKSLSERLVCPICKFSLDRDWNASLNILGRLHTDRVELLKNACRDRTSTVSDCKFGR

SEQ ID NO: 34658 - protein, 265 aa, Clostridium sp.
MKKLKRSYKMEINPTDEQKSKIHRTIGVSRFIYNFYIAYNKEIYEREGKFVSGIDFSKWLNNEYIPNNQDKKWIKEVSSKATKQAIMNGYKAFRDFFKGAKGFPRFKKKKNQDVKAYFPKNNKTDWTIERHRVKIPTLGWVRLKEFGYIQTNSIVKSGTVSQKADRYYVSILVEERDIKTSNSNIGIKIANTNNEGLGIDLGIKEFALCSDGIKFKNINKTSTVKKVEKKLKREQRKLSRKYESLKIRNKKKKEEMLLVKIFKNK

SEQ ID NO: 34659 - protein, 405 aa, unknown
  TnpB Polypeptide
MISCWGDATGQVTRAFKTELDLTQAQSEACLRHAGAARWAWNWALARKKSVYETEGRVLSVFDLHKELKTVKKSIAPWLYEVSSAPPLQAIWDLGEAYKNFFEKRARYPRFKSRKRARKAFRMQGDIKIMEKGIKLRTLGVLRVKEHGYLPVGAHVLNATISEGAGRWYISVCVEDTAAVAPSNGGPVVGVDLGISSLATISDGTVVANPKALARFERRLIRQQRQVSRKRRDSNNRNKAIERLRRTYARIVTMRTDAIHKATTMLTRTKSVIVVEDLRVELMMRKGPLAKSLADASMREFIRQLEYKGRWNGAQILVAPEFFPSSKTCSRCGNIKSDLALSDRVYVCEICGFEADRDLNAAINLEMVAPSLRETLNACQRKEVAGRSRRTDQCLPMKQETHHAS

SEQ ID NO: 34660 - protein, 372 aa, Clostridioides sp.
VVVVEKAYKFRMYPNKKQQELINKTFGCCRFVYNKYLAKRIDVYKNDKETFTYKQCSSDLTNLKKELKWLKEPDKFSLQNALKDLDNAYEKFFKEKAGFPKFKSKKTNRFSYKTNFTNGNIMYCGQHIKLPKLGMVKIRDKQVLQGRILNATISKEPSGRYYVSLCCTDVDIEAFENTNNQIGLDLGIKEFCISSCGDFIENPKYLKKSLNKLAKLQRELSRKTIGSLNRNKARLKVARLQEHIANQRNDFLQKLSTKLIKENDIICIEDLQVKNMIRNRKLSRLISDVSWSEFVRQLEYKANWHGRQIVKVGKFFASSQICNKCGYKNEEVKNLNIREWICPSCNETHDRDINASINILKEGLRLITIQNK

SEQ ID NO: 34661 - protein, 372 aa, Clostridioides sp.
VVVVKKAYKFRMYPNKKQQELIKKTFGCCRFVYNKYLAKRIDVYKNDKETFTYKQCSSDLTNLKKELKWLKEPDKFSLQNALKDLENAYEKFFKEKAGFPKFKSKKTNRFSYKTNFANGNIMYFGQHIKLPKLGMVKIRDKQVPQGRILNATISKESSGRYYVSLCCTDVDIEVFENTNNQIGLDLGIKEFCISSCGEFIENPKYLKKSLNKLAKLQRELSRKTIGSLNRNKARLKVARLQEHIANQRNDFLQKLSTKLIKENDIICIEDLQVKNMIRNHKLSRLISDVSWSEFIRQLEYKANWHGRQIVKVGKFFASSQICNKCGYKNEEIKNLNIREWICPSCNETHDRDINASMNILKEGLRLITIQNK

SEQ ID NO: 34662 - protein, 401 aa, Burkholderia sp.
MSWFVLIGQMYNGPMQRLQAFKFELMPSGEQQRQMRRYAGSCRFVYNKALALQKENYDAGGKFIGYVAMAKHLTAWRNGPQTPWLKDSPVHTLQHALKDMERSYKNFFAKRAAFPKFKKKGQRDSFRYPDPKQIKLDQANSRIFLPKLGWLRYRNSRDVLGAVRNATVSQSGGKWFVSIQTEREVEQPIPQGTSAIGIDVGIARFATMSDGTYFAALNSFKRHETRLRRAQRAMSRKTKFSSNWKKAKARIQRIHARIGNARRDYLHKATTTISQNHAMVCIEDLQVRNMSKSAAGNTETPGKNVRAKSGLNKSILDQGWFEFRRQLDYKLAWNGGWLIAVPPANTSRRCPVCGCVNAENRLTQAQFSCVECGFEENADVVGAINVLARGHRVAACGEAAQ

SEQ ID NO: 34663 - protein, 514 aa, Scytonema sp.
MSRWLVTLRKHRNYALRERETGYSTNNQDIDAPVVYAWGSWCDISSKIEYGSCCPLTCPVIKHGVVPVELTMGLKTSKEKVNPKTGEIVKPSIVSWDSASGIQSKVTTQLRHERNNFAEIDSDVLQRNLAKLDTAYNNFFKHGRGFPNYLRILNSFEYKPGRIKLVEIKDNYGIIYLPGIGNVKFHNSRDFSQVIDTRTCTVKRKGGYWFISILVEMPGELPEVKPLEDVKSVVGIDIGVNKLLAFTDGSFAENIRPTTNKRTARRLRMRQRAISRKVKGSKNRRKAVERLSRIQHKLEQKRDGYNWQVASITVKKADAVAREDLKIKNMVKRAKPKHDGKGGYKKNGASRKTGLNKIILDCGWGDLFNKIAWLALKAGKPVIIVNPKHSSQECPACGHTDKSNRDGEKFICTACGYTAHADTKASRTIASRTGLVFPKNQKREVGGVGFRPAKLRKKTLPADGGKVTPSSYQSVRVETRNHAYDQIGVQLTLFNLEQYHSGDSRKTKKYGRKS

SEQ ID NO: 34664 - protein, 580 aa, Scytonema sp.
VAGVAKLAKTEPTKTYTDQIDFWHWGELFAISNLIDSARHHCLEMILAEKSQLDCNKELQLLFKINKRYSNSIYTEVQGIVTNVNKNRLDRIKTLEGQIKSLKSDIKKRSKQIKDFAKQENKRSSKTSKANKGFKTSKTKIKKACSVYAKQRQTTQLQDAKFGLHQKKRRLHLLQSQLSHLKSTQPKYELPDVANSFVLVGSKDESSGNQLAQFDYIEKTDSFVLSIRTPYALEERLGGDYIRIDGLNFKHGFHEIVESISERCYKVKTKDGTEKWAIGYNAITLRFYWKDDCWYIAATTDITLPEITSEYLSGYVGVDLNADSVGWAVCDAQGNLLEYGDYKLDLHSKTSNQREAILCDAATFVVSKAKQYNFPIASEQLDFWAKKKQLKEKGKNYARMLSSFAYSQWHEALDNACQKHGIYHKKVNPAYSSLVGLTKFMSMYGMNSASSAAFVIARRGRRFSERLPKNHSLLPSKSAYTDKVKHVWSHWSKVARSVKDTPRHKYFTSRFNRARKVTLNCQPTYSIGGSGLLSNPIQLELFEVGAIPTGNDTVTVAVSRSRKSRKRSQSTCTQISLDFN

SEQ ID NO: 34665 - protein, 452 aa, Sutterella sp.
MHQKVERYMIRKSNANWQACHRLCSLSRKLGNCAVYLLRHRYFDKEPVFTRQELDAELKRQYFNDYRAMPSAASAQRQGQVIAKQFKGFAKATSEYFKHPEKFRGKPQLPGYKRKYRVFYVGRNGYRIRNHQLMITGGEAVGFTPINVPCCENQEFNAKAPEAMAGDLRIIPMGNTFIVELTYRVKKEEKQTSESVSLNSNEALFCDLGIDNFATFVSTKPGIKPFLIKGKVLKSLNQNYNKQVSELRSKGHCEHIRIKGAKRYRQMHDLMHKASHLVIHFCLAHDLGHIVIGVNKDWKKGVHIGKRNNQNFVMLPHGRFVDMIRYKAEEYGIEVTVREESYTSQASAMDMDAIPNFDPKETKAKTVFSGKRIKRGLYRTKEGFLINADVNGAANIGRKELGDEWLKKLLELDGGVLVNTPTVVRNLHARADVRQLLEMGVRSYETVRVSAR

SEQ ID NO: 34666 - protein, 413 aa, unknown
  TnpB Polypeptide
MEHSHRYHAYPTQEVAVRLEHHLDVHRQLYNHVRWDYENSPEDDKPSEYDQNNKLPEWKRKWSVFSELHSKAAQATVARFHRNLSNLWKKKEKGFNVGRLKRQAPSEYRSVTYNQSGFDLDDKRGRDRFAYVRFSKMGWVKIRYHRPIPDHATIKEVTFKKETTGEWFVSFGLETNDANLPEKPDVDSLDTSNSVGIDLGIQNYIHTSDGKTVDWLDLEDEYERLQREQRKLSRKEKGSNNYEKQRWEVAKGKRHIKRKVLDYQHKITTWLVCEYDAVFVEDLNVKGMLEQSRNARNKQDAAWRQFITLLDYKADLYGCHVVQVEARGTTKECALCGVETAKPIWAREHSCPSCGFKTDRDANAAINVLQRGFAELGLGWPEDTPVETVTATDAPDFQHVSASHVVETGSLGA

SEQ ID NO: 34667 - protein, 663 aa, Streptomyces sp.
MSRRVPLGEGETARTACARGVLRTGVDEKTSALLPAAALVERVGWCADLVSGMVSALLAEHWNGPDVDVLASGEDAGCRKLPSNAWMALRRLGWTVAPSEGIRANDRIVRMAQEQAGRALRSAKWRADLTAGVLAAWPADPARRAPDEWDAVREAVPGGQHLPGSAIKSRTRQIAVFAGKYGRLPVDVFELEAAPRTARMLLLSACDGQQATVERHESDPGRALLRVQLPTRPDPRSYRDWTWVACPIMLPPTIPPSAVLHLPTLRIHQGRVRADLAFAHPVPRTRRTGHTVALGVDWGLTTLLSAGAARLHDDGRITGLGAGGMFRAAGVLAKQHRLRRLSEHLHAKANHYQRLTGGIAEHPLSAKRQLLTDEIRRVGDRRSNLNDALAGAAARWTVDQAIAVGATVIYAEDLRSMEARGMGRTMNTRLSQTVRGQIVDRMRHLAAEAGIAVVTVPARNTSQHCPQCLVPLRHRKAPDRPTTPGWKWAVCGSCGWQGDRDQGAWMRVAARGLTHQAKTVTERAGGGMVIRAVVDTLEAKAVVIPNTAKTSRARSKTGPTRRQTERPAPRRRRAPSPTGPSGLAGKRPEGHAHTGRTRLPRAADRHQDVTTISKHTTDRPHRPRGAVLGAGFHLHAHATRPRWEDPEPDTLRLAWGRSADQRR

SEQ ID NO: 34668 - protein, 291 aa, Lactobacillus sp.
VAPNQSFRRPQLDLVRRRDWAIRKDGSFSLNTLEGRLTVWPVLNHWRDYFDGTWKLGTAKVLTSGGKWYLHISATKEVPDYTRDQTTHVVGVNRGLRFLATAFDETGRTTYWSGTRALNKRQRYKYLRAKLQAKGTKSAKRVLKRIRQRENRWMSNENHRAAKALADCYGANTLFVLEDLTDVRCATAKVAQDRRYEQVSWPFYQLEQFLIYKAAAQGSRVLKVPASYTSQRCPQCGVIKKQQRDHERHEYVCVCGFHANDDQSAAMNIQQLGNQWLAGIVKPCYAHKQTG

SEQ ID NO: 34669 - protein, 334 aa, unknown
  TnpB Polypeptide
MHICIRMMISYKYPIFPSNTTQWKLAENLDACRWLYNRLLEDLNDANEKGIKLKTYDTQNMIPYLKLENPKLNLVYSKVLQMVNYTLWSNFKGLATAKMNGRKIGHEAIGLDVGLNSFVVDSVGNEIENPRCAEQSEDKLAGLQRKLARAVKGSKNYGVIEGKIAKLHKRINCQRDDFLHKLSRMYVNSFDIICVEDLDVKGLKEKGHNNGMHRSIHDASWSKFIFMLSYKAQSAGRKLIKIDPRNTTQRCSACGGIVKKDLSVRVHDCPYCGFLCDRDYNASRNILITGMEQPVAPIKSKPLHHISVRQVLAMKWEAAPFRMRWFTKAINRLK

SEQ ID NO: 34670 - protein, 412 aa, Calderihabitans sp.
MKRVRLVRQSKLWQQAQKEPDRKQKKSLFREARSKYGFTDAAMQHYAVEIRRSCWIKEHLDVHVAQKLGTRAYRAAGRVLFGEARRVRFKGKNQMDTVEGKSNAAGIRWRNNCVAWKGLILPAIIDLKDPIIRHALSCRIKYVRLVRRKINGRNRFYAQLVCEGVPYQKPQNALGEGVVGIDIGPSTIARVNGTEAHLDRFCEELADKEAEIRRLQRKLDRSRRANNPENYNPDGTVKKGPKKWRESKTYLKTRARLAEVQRRLADHRKSLHGRMVNETLRMGNVFKFEKLSYRSLQKVFGRSVNTRAPGKFIRELTRKAESAGGKVLEFSTRLGLSSRCHCGVRKRKTLSERWHVCSCGVRCQRDLYSAYLARFVEKVKDSEFELDAGAAARQWPGAGPLLQAASGRIPNP

SEQ ID NO: 34671 - protein, 470 aa, unknown
  TnpB Polypeptide
MPIMHRASRYRLYPNQTQARQFVQLCGAGRFVYNELLAEQKREYARFEGGERERPGFSEFDFARRYARLKAQEGHEWLRELSSVVVRGTGAFPLGAAFAHFSRRIREGKKGKQAGFPRFKVKGRSRESFTIPEDVKVRNKRLWVPKVGWIRMNRKAASRTRGADPWDGGEAKVAVVYRELDKWYVSVLWEVPDPDWRWHGGVCGLDRNSENLAADWIGGQKLIQIPYERIKKYEARTRHCQWRASRREWIELMNDAGEPVCTKSGKPVKVASNRRRQLQQRAAKAKRKAAEIRKDFSHQCSADLARLFGHIVLEELDVQAMRRSARGTREKPGKCVKAKSALNRKMAQFSCMGMVDRFLQYKAMDLIRVPARNTSRACAECGHVDKDNRKEQARFICLACGHTDNADANAARNILNLGLEKLLAGGAPVTGRGEDNEAGAFFMECLVDTVNDPSTMQWNYRDRPEFHTIS

SEQ ID NO: 34672 - protein, 371 aa, unknown
  TnpB Polypeptide
MKLTLQIKLLPTKEQILSLLATLKASNLACNKISGVAWEKREFNQFRLHHLVYRQIKDSLNLSAQMVVRCISKVVDAYKRDKKAKRIFKPLGAITYDIRILSYKENSVSIWSVDGRLKVPFVCHNSKYFPYIKGEADLVHEKGKFYLFQTVEVPEEDIKEIEEFIGVDFGIVNLATTSDGEFFSGEMVDTVRKKMTKIKKALQKRGSKSAKRHLKKLSGKERRFKKHTNHTIAKKIVQIAKDTNKGIALENLKGFKVSVRKSQREQFGKWSFDELRKFIDYKAQLAGVPVAFVNPRNTSKMCSECGHISRGNRKSQSEFVCQCCGFSCHVDLNGAINIASIAAINRRIAVHSESVKSLSLGTAMPHSSTVG

SEQ ID NO: 34673 - protein, 433 aa, unknown
  TnpB Polypeptide
MQVVKTVKIPVHYATTKRKLDVLNRLTARLTYGVGLWSRIIETNDVCTRTGLRRREFEQEVREQTGLSVGFIQCCADTALWMWKSYRGLHREWRQKVARAQRVGDERWLRKLMKREPQPPFSNGLQHKIPIWFDYRIGSLEEAETIKLSPRVVRISTLKKGERITVLLNPAKYHLNLLERGEIKSFQIVKRGKKFYVHVKVEHEVQDQPMRAVRGVDLGIRRSAATVLLRPNQPLRRGDFSVICDGEKTHRLNELNRRVAKLRQLKKWRALKRMRNKRRHVAEYYDRLTAKRIAGISNGCAVAIGYPKGIKYENYRGNGKPKLRRLMARWAYGRVIRYTIEECAERGIEAVASDERWSSRTCHRCGSRNTVRPTQSIIHCYECGLTYNADFNGAINVGSSILAGPWNRWVEVDPAPTSDESLEERDEAGSPRF

SEQ ID NO: 34674 - protein, 417 aa, Leptolyngbya sp.
MRTAYQYRLRLTRQQQATIDQWLELCRRQYNYRLAERFNWYEQNRCDVDACPLVCHLPELKDRPDFYSQKRDLVNSKKLFPEYAGMPSHTLQDVVKRVEKPFERWLNGDCNGKRSGKPRFKGVGRYRSLGFPDPIKPEHIQGKFVQLPKLGRLKLILHRPLPEGFAIKTAAITKKIDGYYITLSLQDSSVPELSPDLPTVDNTIGIDMGLKSFLVDSNGDEVEIPQHYRKAEKRLKRLQRFLSRKKKGSNNRRKAIKRVARQHIKVAIGLRPAKGVQRKDFHYKTAKKLLSKGKNIGHESLNIKGLAKTRMAKSINDAGWGTFLQILSVKAANAGLMTIVVNPNGTSQDCSNCGVKVPKTLADRWHSCPECGCELDRDHNAAINIRNRAVGHSVLKASGVRRNSGTMKEEARALSVG

SEQ ID NO: 34675 - protein, 407 aa, Streptomyces sp.
MQLRYNFRVYPEPAQRDALARAFGCARVVFNDGLRARRDAHAAGLAYIKDTDLQKQVITAAKRTGERVWLSEVSSVVLVQSLRDLHTAYRNFFSCVTGRRKGSRVAPPRFKSRRDYRQSIRLTANGFCLRGNSRLYVAKVGDLRVRWSRPLPAVPTSVTVTMDAAGRYWASFVVDTDPEFLPQTHAETGVDLGLSAFAVLSDGQKIASPRFLRRAEKKLKRLQKDLSRKAKGSKNRAKARIKVARQHARAADRRRDWHHKTSTKIIRETQAVYVEDLAVSGLARTRLAKSVHDAGWSAFVNMLEYKAARHGRYFGRIGRFEPTSQVCSACGIKDGPKPLHVREWTCQACGTVHDRDVNAARNILAAGRADRLNACGARVRRAHVPAQRGEAGSHQKGQTAQAGIPVF

SEQ ID NO: 34676 - protein, 400 aa, Cupriavidus sp.
MQRLQAFKYELMPNGEQQRDMRRFAGSCRFVFNKALALQKENYESGGKFIGYVEMAKRLTEWRNGTETPWLKDSPVHPLQHALKNLERAYKNFFGKRAAFPCFKKKGQRDSFRYPDSKQIKLDQANGRIFLPKLGWLRYRNCRDVLGTVKNATVSQSGGKWFVSVQTEREVEQPVPQANSAIGIDMGIARFATLSDGTYLAPLNSFKRHEAALRRAQQAMSRKTKFRNNWKKAKARVQRIHARIGNARRDYLHKATTTISKNHAMVCIEDLQVKNMSKSAAGSTEAPGKNVRAKSGLNRAILDQGWFEFRRQLDYKLAWNGGWLIAVPPQNTSRTCPCCGHVSPENRRTQAEFACEACSFEENADVVGAINVLARGHRVAACGEPVQSGRSVKQEPTEAI

SEQ ID NO: 34677 - protein, 414 aa, Microcystis sp.
MYATQKNQLRQLNQQEFNALTALCRLSKNLFNVALYECRQYFFAERKRLTYESNYHICKSNENYRLLNTDIAQQTMKVVDRSMRSFLGLLKAISIGRCDQRPQLPQYLSKEGYFPLIIPRIKLKDGMLAIPMSREFKKEYGEVKIQLPERLKDKNIKEVRIHPKYSARWFEIEYIYEDEAIETSVDSEKAIAIDLGVDNLAACFDTEGHQFLIDGKRLKSINQWYNKRNAELQSAKDKQGIKELTNQQAQLNQWRNDSIRDYLNKSARIIINHCLNHQIGKLVVGYNPSIKQEINIGRSNNQNFVQIPFWQLRQKLKALCSRYGIEYCEQEESYSSKASFYDQDEIPIYNADNPIKQNFSGRRVKRGLYQTKNRHLVSADINGSANILVKSKHRLNFERVSSGFLANPLRIYVS

SEQ ID NO: 34678 - protein, 391 aa, unknown
  TnpB Polypeptide
MSDLPKMTNLPNVKANRLTVYVHLKVNDWDAQDRLLEYYNAYLRVCNIASKVSFQLNTVSAKKIMTRIKGDTAKLESIYPGIRDRAIYTVIQDYKADHVQNKSIKKPRTYNLDRIPVRYRSDYDFYRLGNGAYKIRLYRSDLADGTHDTEQFLAEWLNLPAGYPYTKNMNQATLSYDKAVGWLLKYDIATVTNKVVGIDLGTRFLAVSYDGKESKFYRAWNTPLQTYMEQYSARRERLKAKNTRSSRKRLKALSDEMQAHLQEGIDKTVKAILDGAEPHTVFALEDIQASVHLRERFSRDDMGKLPTVVFDKFSRALREESQKRGHIFVHVSTVSTSTTCPKCGMIEKRNRNHHLHLYSCACGFRSNDDRTAAMNIRKRGIARLTSRMNWR

SEQ ID NO: 34679 - protein, 508 aa, unknown
  TnpB Polypeptide
MAELASEVRNLSAYATYTVRNDEVLGAELSPATATAPAEVGRQAGVTMPDFLVPDKKGEDGNPLTDKNGEPIKLKTGRSRKERLFRHRVVTEYRAWQERIAAASGESSKYVSQGWKRTVNASAPSYGDGDFINLGAVDKRYAVIENNPLIDGEIVLKLVIQGKWYRLIFSFDDKRFTEGKVTLPVIKIENNQPVFIFTVVTDNPVVQFSGDYTIGVDVGINDYATVVVRNSTTGRIVQRTTLSQRAHSLWNSVRASERQVRALNKKADKHLYDRQAHMSAVDEGQLHREAASRKKRELAILAAQEIAYLSHAYGNAVVAVEDLSWIRNTMQNGRWNRGTFTQWLTHYVAQNGGWVVAVNAANTSQLCHVCGEKVAHPEHKVSICPEHGAMDRDVNAAANIAARAVSRVGKARKTRAKNRNLQSQAPLKTPVARETLKYPGRDRTKNVPTQKRKNHPRVVREVTLPISPARVVMTSVLADCGAYGAVETCKAAINQGNVICKCRLYSLN

SEQ ID NO: 34680 - protein, 410 aa, unknown
  TnpB Polypeptide
MSIVSGHEYGSHVQLRYNYRLYSDGSQREALARAFGCARVVFKDALAARRAAYAAGEPYIPDAAMSARLTAAKQRPERAWLGEVSSVVLQQALADLNTAYRNFLASVTGKRKGPKVAPPRFRSRKDRRQSVRFTANSRFRVLGNGRLRLPKIGDIEVRWSRGLPAAPTSVTVIRDAAGRYFASFALEASRAQLPETGRECGIDLGLTHFAVLDDGTKIAAPRFLRRAEKKLKRAQRDLSRKQEGSGNRGKARVRVARAHARVSDARRDFHHKLSTQIIRDSQAVYVEDLPVLGLARTRLAKSVHDAGWSAFVSMLEYKAKLHGRDFRRIGRWEPTSQVCSACGVKDGPKPLNVRAWTCGQCGAVHDRDVNAARNILALGRRERLNARGGQVRPPLAVAPAGEAGSRRSAA

SEQ ID NO: 34681 - protein, 486 aa, unknown
  TnpB Polypeptide
MSTDFNKRCKNYLMKIDGFKTQSIKAYYTKDLHNTLIRLSFYCREVYNHFCNSVKNPSDLQNNKIFNHLKSNSLQHIRKFEQSSLVSSYVYSNIFRDIRGNAVTAKQLKQQEPGYIFAMRYSRKAFTLIDKYTISLHTGKNQSNITVNLQHPVPECKITDLVVYQNKNTNEIFLNFHIPYSIEISENIEKIFVDCGRIDLITTDKGYKETAPEIIPYLDRSNKKIKHLKTLLKTKNNHKYLSNSKKRDLAIRIDKLERKVKRYLKRKYEEKIHSFLQHNPEGQIFVGNKNMVMPSKDLFLRTFKTLAEREGRTVYFVDEYKTSQICSCCGAEQKQKLNERVYKCSNCGMEEDRNVNSARNLKNRMLCAATCGNTVKEEIPRSKEKSETYPCGDARTGVIETIAPSVEKTLPLTPEQEELYQKHYTPHIISEEIIVKPRKKRKPYKTRKARKKASPYKNFIGYGRMFKYSEDLTTLHLVPITEEILL

SEQ ID NO: 34682 - protein, 321 aa, unknown
  TnpB Polypeptide
VVTAVPVQKLNRAIKYRAYPTSEQQVLFAKTFGCVRFIWNHMLIDAQQFLDEAGTFFVPTPAKYKKEFPFLKEVDSLALANTQLDLKDANKRHLESPKAVGVPRLKSKHRSGMSYTTNNKKTQSKDGKIKNTVYVVGNLVHLPKVGNVKVKVHRQPDADWVLKGATVSCTRSGKYFVSLLYEFEKDIQPIVPTKEKSLGLDYSSHDFYVDSNGKVANYPQFYRQSEEKLAKEQRKLSRMEAGSKNYNEQLHKIQLLHEHIANQRKNFCHTVSAAIAKQYDAVFVEDINLRGLAGSLKLGKSTNDNGFGMFRTMLEYKLTSQ

SEQ ID NO: 34683 - protein, 415 aa, Bacillus sp.
MAKISSPSFVLSLELKKNPLLFSVAFDELEICRAMYNTILSQYLKLEKQMKREKRYKKLIRQLKAVSKKLEKDEQNKALIKDKKQIKDDLKTLREKYHLTEYSSHVWVKPIREHFGNRVNAAVAQKIATRAWNTFSRKLFGKAKKVRFIRKDEMDSFEGKTNKTGWRYIDGNIVYKDLQSPLILKKKDQYALEIIRHLEKKTEFSFKVTSKGETKTVQDFYRVKYVRIVKKEIRGKVRLFADLVIAGYPPSKNRKLGKGKVGLDIGISTVAVSALTKVSLVNLAEQVKEISREITLTQRKMDRSKRTTNPQNFHVDGTIKKGKKYWVFSTRYKKLRAKLKEFHRKQAVIRTLSHRTLANRLLELGDTFYIETMNFKALQKRKKETEVSVKTGKYKRKKRFGKSLGHRAPAKRCCW

SEQ ID NO: 34684 - protein, 244 aa, unknown
  TnpB Polypeptide
LIYDHKLHRKPKENGNIISVTISKENDKYYASILFRYEEEADKKVVDKEKVIGLDYSSSGLYVDSNSHKCDMPHYYRENQSKLIKAQKRLSRKIGSKKNETKSKNYLKQLNKVNKIYTSIANQRKDFLHKKSRELANTYDVVVVEDIDMKNISQGLKLGKATMDNGFGYFRNLLKYKLERNGGILVKVDKWFPSTKTCSCCGNKVKSIPLGQRVYICDKCGMVIDRDYNAALNIKNEGIRILGL

SEQ ID NO: 34685 - protein, 369 aa, unknown
  TnpB Polypeptide
MLKSFKYRLYPNKTQEIQIQKTFGCCRFVYNQTLAYRKNLYETEKESMNKMGCNNYVNQVLKKEYEWLKEVDKFALTNSVYNMDSAYQKFFKEHSGYPKFKSKKNNCKSYSTNSTNNNIEVDFENNKIKLPKLKWIKAKVHREFVGIVKSATISQTSSDKYFVSVLVDCENFQMKSTDAMVGIDLGIKDLVITFDGEKFHNSKTLYKYEKKLAKEQRKLAKKTKDSNNRNKQRIKIARLYEKITNIRIDNLHKISHKLIQENQLIVSEDLKISNMVKNHNLAKSISDCSWYELTRQLQYKAEWNGRQYIKVDTYFPSSQTCNVCGYVNKETKDLSVREWVCPCCNTHHDRDINAAMNILNEGLRLIKSA

SEQ ID NO: 34686 - protein, 425 aa, unknown
  TnpB Polypeptide
MRTAIAVRKAYKFRLYPNKQQEAKLLWTLDLCRELYNAALQERRDAYEMHVKRHPGYYDEETRKQLTRELTTGYYEQKRDLPEIKELRPEYNDIYSQVLQDVLLRLKRAFDGFFKRVKRGEKPGYPRFQGRNRYTSFTYPQAGFELAENRLILSKIGTLKLKLHREIEGTIKTCTIKYEVGQWYVIFSCEVKQPEPLPVSYEDIGIDLGITHFAALSNGEFIESPRLYRRTEKHLKKLQQALSRKKRGSHRRKQAVRAVARAHRKVHNQRRDFLHKAARKLVNRYQVVVLEDLQTSNLVKRPKPKQDEETGQYLPNGATAKGGLNKSITDASWSMFTELLRVKAAWAGRTVILVDPKYTSQICPGCGAIHKKTLEERWHSCECGCELDRDTAAAQIILDIGYQQLRAGSAPQINLHGESVKVLPL

SEQ ID NO: 34687 - protein, 416 aa, unknown
  TnpB Polypeptide
MFGCQQNLISPTKDLKAILEFLCSESSKLTNCGIYYARQMYFKTGKIPSRAQLHKVLGTENHNLHYKAFYSDTAQQILTTVAESFKSYIGLLKGIGKGTVTQRPRLPNYRQGGLALVTYTGRSVRIKDGLLRFPLGSKVKTWFGLDAFYLPMPTNLDYKAIREYRIIPRNGSFYLELIYKSKDVQVEVDQSNALMIDHGMNNWLTCISNVGTSLIIDGLHLKSINQGYNKRVAFLMKGKANGYWSKRLERLTENRNRTMRDAVNKAARKIINHCLLNKIGTVVFGWNAGMKNGINLGSKTNQNFVQIPTGRLKSRISQLCEQYGIRFVETEESYTSKASFVDLDWLPKFCEKPEGWQPSGQRVKRGLYRTLEGLLINADCNGAGNIGRKVAATLGICLKEVSRGTLITPLKVPLWS

SEQ ID NO: 34688 - protein, 372 aa, Lachnospiraceae sp.
MANKAYVYRIYPDQMQEQLMQKTFGCCRFVYNSLLTLQEERYRSGEKHLSKTEVNTYCNKVLKDAYPFLREVDKFALTNAIFHLEEGYRRFFLRLGKHPRYKSRHKAKWSYTTNFTNHNIEIGERYIKLPKLGKVKAVIHRFPQEGWQVKTATVTRNRDNSYQVSVLFFYEDQQISIPVSCGKSIGLDYKSDGLYTDSNGHFCDMPHYYRKSAPILAKAQRKLRHKIAGSRNYDKQQRRIARIHRHIANQRKDYLHQESTAIAKRYDIVCVEDLNMRAMANRGFGNGKATLDNGYGMFLNMLEYKLQDQGKCFIKVGKHFPSSQLCHRCGRIHPEMKDLRIRIMDCTCGCKVDRDYNAALNIKTEGLKMIAA

SEQ ID NO: 34689 - protein, 442 aa, Lachnospiraceae sp.
MVLTEEHRIKKCGNRALYQEIDTYCYLAKNLTNAVQYLISQCFRIHRKLKEGEILDSWEKGLIYPINCAIWKYNNGRKGKKLKYIDEQNGFIADAYFLSWYMKTLDVYKNMPYATCSQICIQEKCREWKSFYQALSAYRKDRHRFMGRPRKPRYLDPMTGRGRLVITSQNFTIDEDGYIRMPKFLEGIRLRARHSGIRQIRIRTEKTEILIQIMYEQKEQSLIKDGNVMGIDLGVGNLATISLASENHPVIINGRPLKSINRYYNKKKAMLQKQAKKSNHRYTTNRMERLTQKRNRKIKDYLHKTSRKVIEIALQTKTGQIVIGNNRGCKQHVALGNRTNQTFVSIPYKTLIDMICYKARLAGIDVRVVNESYTSGTSYLDGEKPDKQCYNNARRISRGMFRSNNGKLINADVNAAYQIIKAAGINNLEVKENETVTRVNVA

SEQ ID NO: 34690 - protein, 384 aa, unknown
  TnpB Polypeptide
MLGGGFNPQIGKEPHLETTTRKSIPLTICPTAEQSHILAEHVEMYHFARNKFLAIIQQHKTFNPHEILQIAELDTYSQTPAIQHLLKNALDEAISTSSNLDGEYPAQEYVARFTYNHDYSIDSAGNVALTTLHGKITIPTKWEGTPTHYRYLTHHNIRLKPQGKGWKIYFTIDTVTRSQATWDTVGIDLGRRFLAVTYDGDKTFFYKGNHEISSRRIRYSRTQDSLLKKKSRAARRKMQSIKRKHWAMMEKYIQNVVQQIVSRQEKPTVFFVEDIHPSEEAQQNAQRRSPYHGHSVEYIFPYFLKMLHSEAERYGHHVRIVHIENTSRECPKCGIISKGNRKNASHKLQCVECGYQTNDDRAAAMNIRNAGIIGYDKGAFESRV

SEQ ID NO: 34691 - protein, 334 aa, unknown
  TnpB Polypeptide
MWSKHLNCAKLQSHIAKLRKRNSFWQSVGSQAVQDICQRIEKAYQLFFKHHKKGVRPPGFKKVKKYKSFTLKQAGYKFLGGNRIKIGSRVYQFWQSREIEGKIKTLTIKRTALGELFMVVVIDDESESGIKSTTGKIAGFDFGLKTFLTGSDGTSIDSPQFLKQSLNAIKKASRNHSKKQKGSHNRERARKNLVRKYEDVCNRRSDWFWKIAQKLTDKFDVLCFETLNLKGMQRLWGRKISDLAFGEFLQILEWVAKKKKKQVVYIDQWYPSSKTCSHCGHILEKLDLSVRQWRCPSCNSVNGRDENAAINIQMVGASTIGLGDVRLATPAIAV

SEQ ID NO: 34692 - protein, 231 aa, unknown
  TnpB Polypeptide
MLILSCDGVPTRPLEPTRAAVGIDLGIASFATTSDGEHLSNPGFGRLAAARLATSQQAMARKRQGSNHHRRARESLAARHRKVANQRRNLHHHAARTLVVRYDLLVVEDLKIRNLVRRSAPRPDPDQPGRFLPNRAAAKTGLNRSIHDVGWAQFVSILRAKAEEAGRVVIDVDARHTSDRCEACGHTAKENRASQAVFSCRGCGHTVNADEHAARNILRAGLARLAANSAA

SEQ ID NO: 34693 - protein, 331 aa, unknown
  TnpB Polypeptide
LQTLCFHASIWPAQAVSREQGRVVLPMGRGRASLVLSVDLPEHSGACTLVWNHGFELHVCVEAPQREQAPGDVHATVDLGEIHLAAVTTNTGKALVVSGRGIRTLKRQRLQRVGKIARKQKRCKTGSKRWRTLQRAKNKACRRSERRVRDLRHKATRQVLDFCVQEQVGSLFIGNPHGVRNKNCGRRHNQRMALWEYGKDIDYLTHKAKAARIMSFTGSERGTSSRCPACGHKHKPRNREWHCKQCGFSGHRDVVGSVNMHTLAFGESVMFPRSVTYRRPGLVRRRRRADVPLTSLDACCLSEARVQPPVADRVSMEAGFPRAVVQKLLPF

SEQ ID NO: 34694 - protein, 396 aa, unknown
  TnpB Polypeptide
MIVLEFKLMGAAGQYAAVDEAIRTTQFVRNKCVRKWMDERGVKPYDLNKYCAILAKEYDFAGKLNAQARQVAAERAGAAILRFYQKCRAKTPGKKGYPQFQKERRSVEYKQTGWTLDAARTRLTLTNGFKAGTFRLRGTRDLMGYALNQIKRVRVVRKADGYYSQFCIDADRRVLVEATGRTVGIDLGLAHFYTDSEGATVENPRHLRRSEQALTRLHRRVSSKVNGSKNWAKARGKLARKHLKVRRQRRDFAVKTARALVMSNDVIAYEDLKVSNMVKNRRLATSISDAGWRAFVTWLGYLAQVYGKVVVAVPPAYTSQDCSGCGERVKTALSERTHVCLHCTMILDRDHNAARNILALGWRPLEETTAGHAGSHAWGQSALYPMQATVSDTAAG

SEQ ID NO: 34695 - protein, 426 aa, unknown
  TnpB Polypeptide
MPSKTLTRTVAVNCFGNKQTRRILRSAEDAYRRMVEEMAEYAVRHNASQATLHKVFYAKFRREYPWLPTRLIKGAYRDAARRVKSFRDAKKRGRAYTETPEVRNATLVFADAQDWKLEGGALKLRIGGRWTELRYSGHKQLHRYLYGGWGLAEELKLKRRGKHWVAYLTFKRDFNVDPDPRNVVAVDVNENNVTAAVFVGGSLKEVWRLETGLSHMVVAYAERRRKIMEGRHPSDREVRTKLKKFRERRRKLDVARKAAKFIEQLAEEHNAVVAVGRITHRAKEKMEEDKGRKLRHRIHQWNVRTVVKLLEEKPIQVVEVSETGTSSRTPSGVCITFSPLVIRTAVRGASGRIRPVKMRLRVGRAGDEVWERDVLGAVNIGLRYLQMGGFVASAPTGAHAARAMLMNPRLGPTPLAEISTIIARYR

SEQ ID NO: 34696 - protein, 434 aa, unknown
  TnpB Polypeptide
MMLEAVKVALDPTPMQERLLLSHAGAARFAFNAGLAHVKKAIEAGEKPEWSFYSLVRWWNSSKDTLAVGADGTPWWAENSKEAANTGLRSLAAALSNWSKSRRGERRGRKVGFPKFKAKSKAALRFAYTTGAFGLIQGDPKALRLPKVGRVHCMEDVAERVGDARVLRMTVSRRAGRWYASLTVEREEPAVRCAPKGGAVGVDLGIKTLATLSDGTVIENPRCLASSERRLKRAQKALSRKAMGSKRRAKARAKVARINAHVANQRQDAMHKATTWLAQTYSDISVEDLNTAGMVKNHHLAKAVSDAAFGEFRRQLEYKTARTGATLHVVDRWYPSSKTCSGCGRVKAKLSLSERVYRCDACGLVMDRDLNAAININVAGSAPETVNAHRETVKRGDLSDRATLDSVKCEPSERPSAARLGAGVRKDTLQTATK

SEQ ID NO: 34697 - protein, 371 aa, unknown
  TnpB Polypeptide
MLRTYELRLRPNQAQRAAFEEILRDSQETYNAGLQERIEAWKLQRKSIGLYEQFTELTELRKDERFAKIACDIQREPLRRLDRAFKAFFRRVKANQKPGFPRFRSRHRYDSFLFNLPAVRDGKIKVPNLGWFKFKASQPLDGTPRTATVKRLGKKWRIRLVCDIGPAPGKRAVSNAVGIDVGIAKFITLSDGHSIDNPRWTRKHETRIAAANRRLALKQRRSKNRLKAREVLRRAHQRAADARKNFTHHVSKWLVSNYDLIAFEKLNIKGMAQSRLAKSILDAAWAQLIWQITYKAEKAGRWAVPVNPRGTSIRCSGCGELVPKTLADRQHICGRCGLSLNRDHNAARNILALGNSAAGLRPSKCIEATTR

SEQ ID NO: 34698 - protein, 305 aa, Okeania sp.
MKSIRTKLKLNNKQKTLMAQHAGYSRWCYNWGLSLWNASYKDGYKPNARKLREVFTNHTKPLIPWMKKLSSRVYQYAFPTECCANINLGEAFKRFFSCGMLRKQGLGKYPRFKKKGKHDSFPSECYANTIENQWKTNRTKRMESQITIYWYCEPIEATTKKITISRQAGDWYLSCSYEFHPTTTPKKTDLVGVDLGVKTLATLSDGKVFESVRAYQKFEAKLSREQYLNRHKEVGSANGRAAQLKIARLLRKVANIRKDALHKLTTYLAKNHNPPPSPTGRGARGVGEDLNVRGMLSNHKLAKIS

SEQ ID NO: 34699 - protein, 634 aa, Streptomyces sp.
VIEQTGEVLSAAALAERVDWAAALASDMATDLLASHWNAADVDALASGVDAAGRALPSNAWMALRRLGWTVAPAEGIRVNDRIARMVQEHAGRTLRSVKWRADLTAGVIETWPAEAGRRTPGEWDAVRAAVPDGRHLPSSVITSRTRQIAAFARRHGRLPVDVFELEAAPSAARMLLLSACDAQQASIARGDDPGRALLRVQLPVRPDPRSYRDWAWVACPLTLPPTVPPGAVLHLPTLRVHQGTVRADLAYTHAVPTARRTGHKIALGVDWGLNTLLSAGAVRLQGDGKITAGGAGGMFRAAGVLAKQHRLRRTSEHLHAKIDHYEHLIDGADGHPLTGKHAVLAEEVRHVSNRRSNLNDALACSSARWAVDQAIAAGASVIYVEDLRSMEARGMGRTLNTRLSQQVRGQIVDRMRHLAAEVGIAVVTVPARNTSRHCPQCLVPLRHRKAPDRRTTRGWKWALCPNAECGWQGDRDTGAWQRIAARGLTHQTKTVTDRASGAMVIRSVVDTFEAEAMVTPTTTNNSRKDRSKTGPTRRRTTRPAPRRRRAPSPTRPLGPAGKRPEGHAPPGRRRLPRAAHRHQGVTTISTPTTGRHRPHGAALGAGFHLHAHATPPRWAQPMPGIMPCMESLS

SEQ ID NO: 34700 - protein, 405 aa, unknown
  TnpB Polypeptide
MNLTEKEIIYSTDKRFDLIKHLCHLSKNLYNASLYDVRQYYFETKLYRTWQSQAPIFTKDNNTDYYALHSCLAQQVLMQVGRQFISFFNNKSNKKKRIPKYKNKNGYNIVTFPKKTISKQIEFDEAKNIYTYTLCEKSYNLKIKSTKSNVKMVRFVYDEVNNLIKCFKIYEVEAPKLKKDNSRYFSIDPGLNNIVSIYNNIGIRPLLYNGRPIKSINQYYNKTKAKLQSELPTNVKSSKRLKQLSIKRNNKIDYEMHKISTHIINEAVRNNISKIIIGNNIGWKNEINIGRRNNQNFVNIPHTKLFNQLLYKGLLNGIEVIFTEESYTSKASFFDKDELPIYGQNDNHKFSGRRITRGLYKDSKGNLWNADLNGGGNIMRKVSDKAYKNIRKTKELMKRPILITL

SEQ ID NO: 34701 - protein, 467 aa, unknown
  TnpB Polypeptide
MKILTSYSVRIQGYGSVLDDTVAMYRKAVDFFIAVMMEHWALFEGLGQKDAQRECEKLCIRTTKRPIVPHDFSVDFYKFPSYLRRAAINAAFGAVSSYKTRLAQWQVNPQGKEPGLPKAGRIFPAFYKGQQFVREGRYCARIKVFIRNTWDWVTVPLRKTDVDYISLYCAARDELCPAIRKRGKVWSLDFSYEEKVDLNETNIEDQVIIAVDLGINVAATAVVMRSDGTVMERHFLRLSREKDSLERALGRIGNAQRHGAKRMPRLWGRAKGINDDIARKTAAFILDIAIKAGAHVVVMEHLDLKGRKRGSKRWRLHHWRAQYVQEMVESKAHRAKMRVSRVCAWGTSRLAFDGSGRVKRDENNYSLCTFATGKRYHADLNASLNLGARYFIRERLKSLPETVRQALSAKVPEVLHRSTCTLCSLFRFCAELGTQGHPVSELNPHRAKAVPRTTNGGSRIHSDGFAG

SEQ ID NO: 34702 - protein, 392 aa, unknown
  TnpB Polypeptide
MISYKFRLYPSKEQQDRLELSLDICRRTYNELLSELNSGFTKLELSNYLLDLKACYPEMKNVYSKSLQVENDNLFRNLKGLSESKKNGNKVGRLRFKGKEWKKTFTLNQSGFRLDEEQNKLKLSKIGEIKVKNHRLIKGKIKQIVIKKEINNWFAIIQTDETIKRKHGENEIGLDFGLIDFITDNNGNKVKLPKEWSLQENKIKIHNKKLSRTKKGSNNRKKTVKLLQKSYNKLNNQKNDFFHKLSTKLVTENKVIYLEDLDVKEMMMKSYNAKGFQKSAWSRFVNNYLINKAESADCQIIFCDRFASTSQECSSCGRIQKIKLSERIYNCSCGLILDRDENAARNILKSAKSTFGIPKSSEKIFSIIKYERLGISLNGEETNTQSNEQCLL

SEQ ID NO: 34703 - protein, 428 aa, Mycobacterium sp.
IEPTPAAQPVVGKLRARKRPKGAPTHVRSWPLRPNPWQCRDMRTRFFTGVRVYNAVLGEFIARSRAVKSDLAWQAARQLPSRTPAQRSARRAAFNAVAQAHGFAADAAQSFGSGLRKSWVREHLPAQETQSVGARAFDAVNQWHLGKKGKPRFKSTKRGLRSLATKDGNGALRPKTDAAGRLVGLQWGAGFVIGIAAPASTGRRGKEQQAELAEIEALIAAGKVLFTRIVRTVIAGRDTYRMQLVCDGHPTRRHSVGEGRVSFDLGPSQIAVSVARSDGTWTGWIEPLADRLRLNTMRLRRRQRHLDRQHRAGSPDCFHSDGTHKTGGCHWRQRSHAAKRASTGAAEEHRRLAEHRKTLHGGLANRLLSHGADLACEKLDYVAWQKNFPRSVRDRAPGLLVAMMRRKAESAGGERLYEFNTTTTALSQ

SEQ ID NO: 34704 - protein, 553 aa, Mycobacterium sp.
MGDGYRIEPTPAAQPVVGKLRARKRPKGAPTHVRSWPLRPNPWQCRDMRTRFFTGVRVYNAVLGEFIARSRAVKSDLAWQAARQLPSRTPAQRSARRAAFNAVAQAHGFAADAAQSFGSGLRKSWVREHLPAQETQSVGARAFDAVNQWHLGKKGKPRFKSTKRGLRSLATKDGNGALRPKTDAAGRLVGLQWGAGFVIGIAAPASTGRRGKEQQAELAEIEALIAAGKVLFTRIVRTVIAGRDTYRMQLVCDGHPTRRHSVGEGRVSFDLGPSQIAVSVARSDGTWTGWIEPLADRLRLNTMRLRRRQRHLDRQHRAGSPDCFHSDGTHKTGGCHWRQRSHAAKRASTGAAEEHRRLAEHRKTLHGGLANRLLSHGADLACEKLDYVAWQKNFPRSVRDRAPGLLVAMMRRKAESAGGERLYEFNTTTTALSQTCLCGIKKKKPLSQRVHRCECGIKEDRDLFSAYLGLHVHPGADGLDRLDLEAANNGWLLRRHDVDGRRSPAVAVSKRRGRRHPPSRRSAARIKARRALKKRQSRSTRTSPADQPTAIAA

SEQ ID NO: 34705 - protein, 389 aa, Lachnospiraceae sp.
LLKSYKTEINPTQEQILVIHKTIGVCRYVYNLYLAHNKEEYEKEKEFVSGMEFSKWLNNVYLKENPDKEWIKEVSSKSVKQSIMNAEKAFRWFFKHQSGFPKFKKKGKSDVKMYFVKTDVKAIIKCERHRIKIPTLGWVGIKEKGYIPTTKSGKVIKSGTISCKAGRYYVSVLVEEEEPKKPRLNDSGLGIDLGIKEFAVMSNGVIKKNINKTAKVKKLEKKLKREQRRLSRKYENYKKRSKKKGEATRQNIQKQTIKVQRLHQRIDNIRTDYVNKCVNEIAKAKPSYVTIEDLNVSGMMKNRHLSKAVGSQSFYDFRTKLKNKCEENGIELRIVDSFYPSSKLCHCCGNIKKDLKLSDRTYKCKCGYVADRDYNASLNLRDAKTYNIA

SEQ ID NO: 34706 - protein, 485 aa, Serpentinicella sp.
VKAIKTTVKGVLINISNEYLDEISELMTVFSSAKRFAFKRLNEGKIKKGELEKLIAHKYGINIRQSKDAAQAARQMIASQKSLIKDYYENYARKVKAIEKQLEKAKSQKKTHALTKKLEKRKKKQEFYKNHIDNDTIPKIIFGGRNNFIRRCKGLISNEEWKSLRDNNYYSRGDKTKKGNPNLRIVITNNMAFLEISTLEKNENNKAVKIRVPLYLPQKLSKKTGKINGRNYRQIISDYLLTGEAYQVELIKKDDKIYCHITIDESKIREYKEEFNLFNGVIGVDTNPDGLALTRLDKDGNYKWSVYLKESELLYARTDRRENLCGELIRNVVNIAKSEQCAIAFEDLKFKNDKDVKSKFARTKHQFIYGKLLSMLDTRAIRENIQRFKVKPQFTSKIGLYKYCHQYGLDVHNGAALVIARRAFGFNEKIPKVLKTKLLEKSELEKFNKQVNWKKWSIINQRIKKKGGEYPSLWLKHRKLLLNIS

SEQ ID NO: 34707 - protein, 410 aa, unknown
  TnpB Polypeptide
MKAKHLYYSSYYYLFMEFRRRFKYRIYPSGKQKIKIINQFKLCKETYNTLLAESKDLFSTSRPDFNSIIKDFKICVPEAYNVYSQALQDVGDRLHKAFDNFFNRIKLRKKGIKIKAGYPRFKSRVSSITYPQSGFKFLSNKKLSISKIGSVPIVLHRIPKGKIKTMTIKRNKANQWFAVFSCEIDVPSITHEHPKSKIGIDVGLTKFLTDNQGNSIANPRFYLTAEKKLARLQRIHSRRAKGSKNREKARIKLARQHVKVANQRSDFLHKITHSMTREFAVIYGERLNIKGMVKSNLAKHILDVSWGKFYQMLTYKAVISGGEVRKNPKTRGSSKRCSKCGHLNDMPLAKRTLHCPKCGFVCHRDKNSAINHIQDTEGHSGISTPVETLPLPLRFAKACNVAESGTINTC

SEQ ID NO: 34708 - protein, 191 aa, unknown
  TnpB Polypeptide
MKERCRQRKRNFTRNDVRIMKRIAAKYGQLQRNRLQWFLHNMSSRIVRKAKQNKHGIVMENLRGIRKLYRKANGQGANYRVILNGWSFAELQRQIEYKARWEGLPVIYVSPHGTSARCSICGSRLMRIPEENRKLQCTKCGVTVDRDVNVARNILARGVRFAPVGLSSEAMMEEHGRRNPLILKVDGSQLA

SEQ ID NO: 34709 - protein, 235 aa, unknown
  TnpB Polypeptide
MLLSKKTSIKVSREYANLIGHMCYAASKLWNVCNYERQHYKETGIEQHPDWYYQKKAHKEDLWYKQLPSQTAQEVCRLLDKAWKSFYALKRSGGIEAPRPPRFKQESIPITYMQMGIVHERDTDRVRLSLPKTLKKYMEETYQIHENFLYLENKIFRGMDQIKQLRIYPPEKGNCKIIVVYEVSGQEELPQNGHELSIDLGLHNLMTCYDSENGKTFILGRKYLELERYFHKRRC

SEQ ID NO: 34710 - protein, 325 aa, Bernardetia sp.
LLSIWFNLKNSQNQLPQLRKEISWIKDVPAQALQESIKRLDKAYTSFFKNGGFPKWAKKGRYNSLTFPQDVKSNQVNTFILPKLGKVRVFKNRMPNGKLKTATITKECDGYYLSVTFESETKNKYPTDKNQAVGIDMGITFFCIDSNGQFVENQRIAKKYEKQLRIANRSLSRKKKFSNGWYKKKVVLSKLHRKIARVRHDFLHKISLEYVKNNSLVVVEDLKVKNMIRNKQLSKHIADTSWSMFFDMLSYKCRNYEKDFVKVNPQYTSQTCNSCGNVDKANRLSQSQFKCTMCFHETNADENASKNILSEGIALVRQREALACA

SEQ ID NO: 34711 - protein, 133 aa, Enterococcus sp.
VKVARIHEKIFNQRNDFLHKLSSRITDENQIICIEDLNVTGMVRNHKLAKSIADVSWSEFVRQLTYKCEWKGRTLVKIDRFYPSSQICSSCGHNDGKKELDIREWTCSNCGTNHDRDINASINIRTEGLSGIA

SEQ ID NO: 34712 - protein, 432 aa, Okeania sp.
MYSCQQVLVNKNSELIDILTFLCEQSHKLTNMGIYYARQLYFKSQKGIGKYDLEKVYKKNNHYKVLYSQAAQQILRTVAESFRSYYGLIIAYSEGKISDRPRIPNYRKKGGMATVSYPKQALKLKGNQIRVPLGNTCKRWFGLDCFLIPMPSIRAFSTLKELRILPRNRCFYWEFIYEKEVVVKPQLNQDNVLGIDHGLNNWLTCVSNVGTSLIVDGKHLKSINCWYNKQISTIKENKPLGFWSNRLAAITEKRNRQMRDGINKAARVVINHCLKHSIGTIVFGWNQGQKNQIELGKKSNSEFVPIPTARLKERIAQLCDEYGIRFIETEESYTSMASFLDGDCLPIYGEKPNDWKPSGKRTKRGLYRTGNNCLVNADCNGAANIIRKVSRKLSLDLSQLCRGTLTCPQRVYLWSAKKKRSNTDLSCCVVST

SEQ ID NO: 34713 - protein, 366 aa, unknown
  TnpB Polypeptide
MEKAYKFRIYPNKKQKEILAKTFGCCRFVYNHYLAKKIALYKTSNTTLTYNQCCSDLTQLKNELIWLKEADKFALQNSLKDLDNAYQKFFKEHSGFPKFKSKKAHKYSYRTSFTNNNIEFCNKHIKLPKLKMVKIRDKQIPQGRILNATVSQEPSGKYYVSLCCTDVEMTPSEKTGSIIGLDFGIKEFCITSNGEMVGNPKYLKKSIDKLAKLQRELSRKSKGSSNRNKARIKVARQFEKVSNQRKDFLQKLSTELIRNHDIICIESLQVKDMVKNHRLARSIADASWSEFARQLEYKANWYNRQVVKIDRFFASSQICNVCGYVNKGIKDLSVREWDCPCCHTHHDRDVNAAINILNEGMRVLAI

SEQ ID NO: 34714 - protein, 415 aa, Glycomyces sp.
MAIIFIGRLLCAARVVPGRYCCGRGQAGGGREAAAVAGAGGGAGADPACGQRGGELGLDCGLCAWPATGVRAAPAHLQRVEGARARLADRATGHQENLPRLRDHRRFDQGWSAARQAGRESDGETGGIPARGGAGVRRPVPLLADGRPRRERGIRFAGHPDQLKTLERYRKGESDLVFRGGKWYLIATVEVPDAEMNTDPADFLGVDMGIVNIATASDGDNYEGAGLRRYRQRMAKVRSELQVKATKSAKKKLKARARREARAVKDVNHRISKQLVAQAERTGRGIGMEDLAGIRDRVRLPAAQRGELNAWSFYQLQAFIRYKARRAGVPVVVVDAANTSRRCPRCGHTAKANRPIRDDFACRRCGLAGAADQVAAVNVRDRARMTWAVVNQPIVADTPRPAADTSDKPRIFRPE

SEQ ID NO: 34715 - protein, 411 aa, Mycobacterium sp.
MLVGRRFRVEFSDEQAEFAEQIGAACRAVWNTGLEQRREYRRRGAWMNYQPQAHELAEAKTEQPWLKDVPGHCLQQTLMDLDKACREQGTFKVRWRSARRWAPSFRFPEGSKMTVEKLNRGHARVKLPKLGWVKFRLSRSLDGEAIRSATVRREGRHWFISLLVDDGVNAAAAHTAPNTAVGVDRGVVVAVATSDGQLCDREFITTGEHRRALRLQRRLSRCAQHGRNRDKTRAALGVIRTRERRRRRDFCAQTAARLAATNALVVVEDLKTKQMTRSAKGTLASPGRNVKAKSGLNRAILAKGWHQFTLALESSARYSGTTVVKVPAAYTSQRCSVCGQVDPKSRESQAVFRCTTCHCGPVHADVNAAKNILAAGLAVTACGEIPAPAGAGRTLKQEPAGNREELLLQPN

SEQ ID NO: 34716 - protein, 304 aa, unknown
  TnpB Polypeptide
LGKRSRLEIPVGQELKDEYGLGYHERLRLEVRGNPKWDGKQGRLELEYDEVSDTFRAFQPVTVPDSRLDSPLASEEAALDVGANNLVACSTTTGNQYLYDGRELFGRFRETTDEIARLQSKLREGRYSSNRIRRLYRQRTKRRDHAQNALVRDLVERLYDEGVATVYVGDLTDVLEAHWSVRVNEKTHNFWAFRSSSTVSRASVRSTASASKPSRKRGRVRRVPSVATTKTVRHEDTLTCPCGFEGHADLTASETFLRENSNCEIRPMARPVRFEWDDHDWSKLYPHESPKEVRTNPQVASVGR

SEQ ID NO: 34717 - protein, 400 aa, unknown
  TnpB Polypeptide
VLAVKAVWQYYIPTQDVLRLLELFRRMITDAIRIALAYDATTLRRVSLLAYNELAHYDSPSYYKLCAISPAAGILAARKKSIRRGFTTSTPYAFRQQLVSCYGFKIENGYLHIPVSRGKHFSIPLTRHTLEIISQPGIKVRSFTLTRNRLSLCMARDTPRIECRSTIGVDRNLRNLTVGNDTQTHQYDLSKCVRIAKTTVLIVASFTRNDDRIRTAIASMYGQRRTSRTGHLLHNATKTIVALAVQRRTAVVLENIEGVRSLYRRGNGQGRKYRGRMNGWSFGEAQRQIEYKARWVGLPVIRLSRREIIGSSVSCPRCGERLQSDKRLKRKLWCSSCRVVLGRDMVAAVNLSRRGRVRFARSRPPIIEAQGRAGEAMKGNPTPTVIPGVDAPKLTQQTKG

SEQ ID NO: 34718 - protein, 349 aa, Microcystis sp.
  misc_feature (226)..(288): Xaa can be any naturally occurring amino acid
MEKAYSYRFYPTPEQESLLRRTLGCVRLVYNKALHERTQAWYEKQERVGYAQTSSMLTDWKKQEELDFLNEVSCVPLQQGLRHLQTAFTNFFAGRTKYPNFKKKHQGGSAEFTKSAFKFKDRQIYLAKCTEPLPIRWSRQIPESCEPSTVTVRLHPSGRWHISIRFDDPTIQPLPPTDKAIGIDLGISSLVITRDGDKVSNPKHFKKHYRRLRKAQKSLSRKQKWXXXXXXXXXXXXXXXXXXXXXXXXXXXXXXXXXXXXXXXXXXXXXXXXXXXXXXXXXXXXXXXIREWDCPDCGTHHDRDINASKNILAAGLAVSVCRATIRPEQSKSVKAGAKNPSGKKQKPKS

SEQ ID NO: 34719 - protein, 404 aa, Coleofasciculus sp.
MPQVLTVSCKLEVSPQQVEKLDAVLCAFASCCEYVNNNTDPKLTNQIAVQSLIYKEAREYSGLSAQMTIHAIRRVCANRKTTKQQDRPVKGFAPTSATYDSRTFTFREKDWTVTLTMMKGREKFPLHIGNYQRHLLTGRNPKSAVLVKRKDGNYYLQIQLESEPPKPEQTDKVLGIDLGRTDIAVTSDGDKFSGKQITQVRDKYARVRASLQQKASKGTRSSRRRCRQVLQRLSGRERRFQTLVNHTISYRLIQQAKATSQSIALEDLTGIRERTNQQPRSKTERRRSNSWAFYQLRQFLTYKAVKFGVNLVFVDPRYTSQTCHKCLHIHPVKGESYRSGKKYRCGHCGWVGDADENGAKNISALGLSINQPGGSYLSCVLWTGKPVHLTIWDTGLLKTQASTK

SEQ ID NO: 34720 - protein, 536 aa, Lentzea sp.
LPDHGRRGRHRGLGRRRGTRQLPRAEGLTPVGWNVIERGHVWVPVSGGLVARSRTVGAARYRAGEMDTVILAYRFALDPTAGQRTALQSHCGAQRYAYNWGLARIRANLDQRAAERTYDLPENQLVASLPWSAYSLRRDWNQAKYKVAPWWSENSKEAYSSGLANLANALTNWRTSRAGERRGPQIRFPRFKGKRSGLSCRFTTGAFGLTDSDRRHVKLPRIGTVRTHESTRKLARHVQRGTARIRSVTVSYRSGRWFCSFSVEITRTDPAPVGRGTVVGVDLGVKSLAVLSTGQIIPNPKHLERVQRKLRRLNRQAARRVAPDKRTGQTPSNRWRRSQARVAKLNARVVSARRDGLHKLTTGLVRTFDVIVLEDLHVSGMMRNRRLARHISGVGLGELRRQVEYKTTWSDVGLVIADRWYPSSKTCSNCGAVKAKLPLRVRVFHCGECGLALDRDLNAARNLAALAGEAPGRTSTASCAGTLNRPDGNPCQPHAVWAAGTATGRPAPSRCGPTPPPQGDGCLKTVNTLAHTSGNG

SEQ ID NO: 34721 - protein, 391 aa, Scytonema sp.
MEQVLTLVCKLQPTPNQVMKFEGVLHAFADACNYTNEVVKPQITSKATIQNIVYEDLRAKFGMSANLAVRACARVGANRLTAKKKGKPVKLFKPTSVDYDARIFAFREKDWTVSLTTTQGREHIKIDAGNYQRGKLKGRKPTSAQLCKHRDGQYYIHIQLKDEVPDPQTTKTVIGVDFGRRDIAVTSDGDTWSGEKLTKTRDKYSKVRASLQKKASTRTRSSRRRCRQILARLSGRERRFQTWVNHKISKTIIQQAKHTQAFVAIEDLTGIRERTNQKPRNKTERRRSNSWAFYQLRMFLEYKGLRDGVEVITVPPAYTSQTCHYCLHIGQRSDKKFKCINPDCNWSGDADLNGSRMIAALGLSVNQPGGSNGLYCTLSTDSSGLLKAPSF

SEQ ID NO: 34722 - protein, 416 aa, unknown
  TnpB Polypeptide
LEEPPLFGDHPESRGGAEAGLIQTFKFRLYPTSQQESVMTKTVETCRRLYNDLLDDRIKNRTNAFEQKRHLTAYRKENKYLKQVHSQVLQDVVFRLDKAFGSFFGGLSKFPRFRRNGGYNSFTYPQFGGFKLRDGKLCLSTIGRVKVILHREIEGQMKTCTIVRDIDQWYACVTTEKDGAEPVPNDRLSIGVDLGVTAVAALSDGRILPAPKLLSKSEVEIKSLQRSLSRKKKGSKNREKAKVSLEKAWRRLRNRRNDFTHKTSRFLTDNYGTIVFEDLKIPNMIKNHHLASAILDACWGKTRRLTVYKAERRGGRVILVEPRGTSQECSGCGRVVEKGLSERTHYCPFCGLELDRDVNAARNILARGLEQARAEAEPLPVIRIGKFGRGSKKPAPFVVGSSRNLFLCPTVEAGVG

SEQ ID NO: 34723 - protein, 409 aa, Thermoanaerobacter sp.
VPLITLKAQIHADPQTEAVLKDAMFCATKVYNGLMWHLRKEYKETGRVNISRKNLNRILKELPRAKGYYSMSVQLTRDEVREAYKSFFALKKNGLTQHEAPGFRRKSQLSPLKYIQSGFKVEGDKVTISLGTSREDGVREVTFQISYRPDIEYERVRELSIIYDKISGRIEARLVVGVKARENKGTGKVAVDLGETILMACAFDDGSVILYSGRLIKAVRRYWQKVRANLKQNSRRWKQIAHQEKKQVEHLLHTATSHFIAECVRRGVKEIAIGDLNGIRESIDYGDQLNQRLHAWPYRKLIDMLKYKGALAGILVRDNVDEKSTSITCHACGKVMPSNRRHRGLYVCSCGWRTQADINGALNIFERAYQVSSVKGSSGRVARPAVVSYLLGWHGVVEPKRRGKTLRAS

SEQ ID NO: 34724 - protein, 182 aa, unknown
  TnpB Polypeptide
VETEHVELPHIKQNTGIDLGIKELCITSAGKKYENPKIIRKYEKKLVKLQRQLAHKEKRSQNYYKTKKKIAICHEKITNTRKDYLHKMSHEIISENQVIVSEDLQIKNMVKNHRLSKSISDVSWYELTRQLEYKAKWNGRKYVKIDTFYASSQLCSVCGYQNTETKKSISKGMDMSCLWNKS

SEQ ID NO: 34725 - protein, 405 aa, Haloterrigena sp.
VADEFLRRTAITRLRLTSEQRHLLKETIREWQVACNISSRIGWKYNETRKTKLQNLAYDVVREETQLGSQHAILATHQAAAALSGVKEIEEGRADYDTSRPEFTSETVKYDSRSMTVFDDGTVSLATTGERVNCRLALPNDEDGYQAQYLENDSWKVTESTLSKRDGNYYLHLGFRKPMPEPKADRRDDDEDRTVLGVDLGIANIATTSTAYFASGDELQHRHREFERIRSSLQETGTQSAHRTIQQMSGRESRYLRDELHRVANAIVGEALDHGCEFIAFENLRHIRERMPPVMSLHRWAHRQLVDLVEYKAKDERIRVEFVSPENTSRRCPECGHTSEENRVRQAAFKCECCGATANADYVGAKNVGWRFVRQGQQSSGRTGDSQLALKSGTVMPSRGFVPPD

SEQ ID NO: 34726 - protein, 379 aa, Paenibacillus sp.
MLKAYRYRLVPNSEQEEFFIKTFGCVRKVYNLMLNDRIESFKRSQESGEKIKLPTPARYKKEFPFLKEVDSLALANAQLHLNKAYQQFFKRPAAGFPKWKSRKNPLQSYTTNNQNGTIAIVDGRYLKLPKMKPVRIKLHRHPRGMIKSATISQAASGKFYVSILCETDVQQKPKTGSIIGMDLGLTHMAVLSDSTKILNPKHLAKTAVKLAKAQRKLSHRAQVAKKQGRLLAESRNYQKQRIVVAKLHEKIAHQRNDYLHKRSTDLVNNHDVIFVESLNIQSMVRHRRWARSLHDVSWSSFLSKLTYKATWYGKQVIPIRRWFASSQICSVCGHQDGKKELHIREWSCPSCGVQHDRDVNASLNIRAAGLRLINLTNSL

SEQ ID NO: 34727 - protein, 367 aa, unknown
  TnpB Polypeptide
MLRAYRYRIFPTKSQITLLERTLEICRWVYNDTLALRKDAWEQEQRSISLFETNKTLTQWKKDQPDLKQVYAQTLQNVQVRVDLAFKAFFRRVKAGEKDPGFPRFKGKGRYDSFTYPQGQKGGFKFEGERLHLSKIGDVQIVLHRPVEGMIKTLTIRRSSTGKWYACFSADYEPISKPRKETTVGIDVGLESFATLSNGEKIKNPRFFCTDEKALAKAHRKLSKAEKGTPERKKARKIVAHIHERIANRRLDFAHQTSRQLVNRFGIIVFEDLNIMNMQKNHHLAKSIADVAWNMFITITESKAEEAGSRVVLVNPRYTSQKCSRCGMIVKKTLSERVHNCPHCGLMMDRDQNAAINIMRLGLQSQG

SEQ ID NO: 34728 - protein, 416 aa, unknown
  TnpB Polypeptide
MLISYKYRAYPDAITRTRLNTALDTCRWLYNKLLEECTTAREHGFTPTMRGMQARIVTLKEENPFLKDVYSKVLQMVNYTLWSNIAALSQTKKRGRKIGKLRFKSASRYRTLNYNQSGFKIDREQSTITFSKIGALPFTMHRPYTGKVKSVLITRSGDRWYVIVLAAQEVSEPKREGQSVGIDVGLNSFAVDSDGAVIENPRFHEHSLKKIKTLQQSITRKKRFSQNWKKAKSKLEKVYDHITNQKRDFLHKLSRQYVDTYATICVEDLNIKYLKEKGKSRGLRRSIHDASWGRFYSYLAYKAESAGTNFIQIDPRDTTQMCSNCGSIVKKSLSERVHECPYCGFIADRDYNAAVNIHRVGMEQPFEPVEMQSISQPGKSSISRAVETMPLHHISVVQVLAMIAGKPRPSGRGSSR

SEQ ID NO: 34729 - protein, 476 aa, unknown
  TnpB Polypeptide
MVIRVVSNYLRLTNRQYFLIDTLAYHSKNLYNVALYSVRQHYCEYQENTAILTGIQPNITVKTESPIRSYLPYTRNKKFPYPDICNYYRIKPNENFPLLHNDAAQQTGRSVEEAYKSYFALLRLYRRGELKDCPRPPHYLDKDGKFKLSYPRARLRLQNGNVTLGMSREFKKRYNLTGNELTFKIPPHINPKQIREVTILPIHNGKAYKIEFAYTAPATPVSLNPDRYLAIDLGVNNFATMVDTTGTATIIDGKYLKSLNQWYNKENARLQSIKDKQGLTCKYTKRQSRLLIKRTNRINEAMNRFVAYIVKYACERKIGTVILPTWEGIKDKINHGTRNNQNFVSIPSAKFRLKLKSKCELFGITFDDSHDERYTSQVDALAGDPIKKPSYGRTRRIKRGLYQSAVGTLINADVNGALNHLRKVAGDSVVQQIISSGRVNRPVRVRLGYESNSCKLNCNESCNNGLYMPTTLVVGS

SEQ ID NO: 34730 - protein, 320 aa, unknown
  TnpB Polypeptide
MATAIYKSYRKRRQKGKVNRKPIFKKKAIMLDDHLFKLDLEKGIIKLSTSNGRIPLEFYPAKYHEKFNDWKIGQAWLVKTLKGTFINVVFSSEVRIREPKTFVGIDLNENNITLSLPDGRFVQIITHERELRTGYFTKRRKIQKMLKVGKRKKKLLEKYGERERNRLNDLYHKLANKIVELAEKYSGIALEDLTEIRTSIRYSVEMNGRLHRWSFRKLQSIIEYKAKLNGVRVVFVNPTYTSSLCPICGGKLSSNGHRVLRCKKCNFEADRDVIGSWNIRLKALKMWGVTVPPESQPMKMGGRKSTQYKNKISTQHIFYG

SEQ ID NO: 34731 - protein, 657 aa, unknown
  TnpB Polypeptide
MEEKEKPPEFFKSIKTSLKSILKHPEINTTKINDAVIKSHKIVIHTLQFLKLYLLHHYDTHNQSLPVIDKKLINTTMKVMCGEKETNKGRPPNKETIELKNKLTMFYKEHYQPYTQDDKLDYTYMSNVLAYLTEDIITMYENNIQLHFVDYVERFVNVVWKKKMLVEKIRKLYKTKTERESRIRSLCSELRKIKNDILTVDKTTFTSKPYYHSWITEQKKRILPNKTKFQKDSVSYDLKCKVMDYFPCMITMMKQVENEEETISNVFPLRSGITPNYIRLDTITLVHLLLRKEQGNKSDYNDEGNTKKHEDKIWQFFFRTERKVFTKTGYSFHHMISTDGVGVSILLLRKDLVGNKIPNAKKNTSKEQYIDELKDYSVLQTKKIVGIDPGKEDLIYCVDGASKDANVFRYSQNQRRKETKMKKYNNIVLAMKTHKIQGKSIIEYETELSKFNRKTLDSTKFKQYINEKNRINHLLFEFYRKELFRKLKFGRYINAKRNEQKMVSNFKKTFGNSEEVVICIGDWEQKKQMKFKEPTLGKGIRTLFRKNKYQVFLVDEFRSSCKCSRCNGGICEKFKLRENPRPNKDDMRLVHGLLRCKNGCGEWNRDRNGSSNIYKIAYQVIHNLDRPSYLCRETKSNQAILPSCYKQNIQGYAKTQP

SEQ ID NO: 34732 - protein, 404 aa, Cysteiniphilum sp.
MLLAHQIELKPNNKQSTHFAKACGVARFAYNWALDQWKKQYGDGGKPSETALRKQLNSIKKSEYPWMLEVTKNAPQQAIKDLGTAFKRFFKQGSGYPRFKKKGVRDSFRVDNGTDAANPNAVKVLAKKVKVPNLGWVNMTEEVRFQGQIKSLVISRKADRWFASFTIDTEQLPHVRKNHGAVGIDLGIKSLATFSKGESYTGVKAHTQKLSRLKRLSRQLSRKKKGSNNFKKASMKLAKLHLQISNLRKDYLHKTTTETVLNYNQIGLEDLNIKGMSANRKLARHILDQSFYEFKRQLEYKSQMYGSEITVADRFFPSSKLCHVCNWKNDNLTLSVREWICPQCNTLHDRDYNAAKNLELLCTVSSTETQACGVESSGLSVVISETMPCRSKNITSCSTLDNNG

SEQ ID NO: 34733 - protein, 399 aa, Streptomyces sp.
VRLRYTFRLYPTPGQRVALAKAFGCARVVFNDALAARRAAHAAGLPWIPDAELQRRVITEAKRTPERAWLGEVSAVVLQQAVADLNVAYRNFFASVTGKRKGPKVAPPRFRSRKDSRQAIRFTRNARFAITDGGKLRLPKIGEVAVRWSRTLPAEPSSVTIIRDAAGRYFASFVITVDTEPLSETDAEVGIDLGLAAFAVLSDGRKVTGPTFLRRAERKLRTAHKALSRKQQGSKNREKARLRLARAHARVADVRRDFHHQLSTRIVRENQAVYVEDLAVSGLARTRLAKSVHDAGWAAFLAMLEYKAARYGRVFARVGRFQPTSQVCSACGHRDGPKPLHVRTWTCQHCGTSHDRDLNAAKNILAAGRAERLNACGAGVRPGLALAAGGEAGTHRGAA

SEQ ID NO: 34734 - protein, 251 aa, unknown
  TnpB Polypeptide
VQNVRAVWNGDEWKLHFVCKVELETTESAGDEMAGIDLGITNIATIAFPNEYVLYPGNSLKQDKHYFTRAEYDMEGENGPSEKSMWARRKLTERETHFYHVLTDTIITECVERGVGTLAVSWPEDVREADWGAMGNKKLHSWAFDRIYQYLAYKGEICGVEVLKENEWDTSKTCSACGDDTKSNRVERGLYVCSSCELVGNADCNGAENMRQKITPSPHGEDRSNGCVAQPSVHLFDRESGTFKTREQVVS

SEQ ID NO: 34735 - protein, 486 aa, Vulcanisaeta sp.
MLCRSVAVELEVAKELNKLLYSVESAYLNIVREVVEYAVTNNVTSATQLQGLFYSRYRLEYPGLHSHLIIQAIRQAVQIAKSFMERKKRGLASKPYPEVKAVSIRFDETAWNYKEFAKSVAPVRLSLPLLGERREVWLRLHKRFWQYWWRVLNGEARLASTLIIKRRMNKWYAIFIFKLKPREEEPKSVIAFDINENTVAVGRIDIETTVGKVVGWNRRYATPQLYEIRTDFGRLARRYEKIRNAIIERLKPHFALPSGNYVNVTNTREYRKRVRMLREGRRKDGRIKHVANELTKTPAIIVTEDLGEKPQESMIDGIEKNELRHCIKQTPFKALVRAVEDKALERGSKLFHVSAYRNSRICPVHFVRLRETNDWHILYCPLGHYVHRDYASVMNMAWKLTPESWTKCVWWGLRKRMDWREHEGKSNTTIPYTIVQYLHAMLKTFTASEQWPAMLARAKPMNHHRIQNEGGGEETSHTLLRQGGGQ

SEQ ID NO: 34736 - protein, 503 aa, Sulfobacillus sp.
LAGEKYLWYTLAKEQLFAKGYPMLNGYKFRLYPNTDQQQILLRWIGCQRLIYNAKVQEDRYYRRFQQRMVGTAGEAIPVDQQYSRFVNDTTAFLRHVPSQILRNGAVKFRQAYTRFFQKLGGRPKIKKKTGRQAVWLTAELFQFIPVADGTGGYQLRVGTTKFPVGIIPYVAHRAHAIPASIHIAVEGGQWWLSFAADDPTIAIAGNDADTATERIAEALRHLSADQLAERTLGGDRGVAKPLVTSDGQVFDLQPVQKSRIKKSQQQRQKWQRRAARRRKGSKNHRKAQQKAARYHRYEKNVRHEYAHQTSHQLVANDTWDLYVFEDLKISHMTKRPKAKRDAHGRFLPNGRKAKAGLNRVILASAWSDVVSFTRYKALRQGKLVITVPPQHSSQECAVCTFTSPDNRKSQSEFVCQRCGHTDNADHNAAVVIAQRGITKLLSGIPLTKKHKPTRIFRTLGPERSEVTPGEMRVRRLGPTVPAQRSMSQELSGAIPETSASAS

SEQ ID NO: 34737 - protein, 394 aa, unknown
  TnpB Polypeptide
MKDLAMQRTIRLQLRATPDQKRILLETTRQHTECFNAVAKHGWVENCKNGVELHKATYYDLRSRFPDLPAQLVIAARMRATEALASALVLKNKPFKTRDGEKPRIVSCPTSSLSPIRYDVRSYRYDKANQCVSLATVEGRVVVPVAMYDYAQKRINQALGFDSCDLIIKGETFFIHLVVTLPTPEAKSTNVVGVDFGETRPAVTSNNHFYGDRRWKGTERRYFRLKRRLQSKGTKSARRHLKRLSRRVARFRTDCDHVVSRRIVDSVEAGTTIVVENLTEIRARGKRRGATQRRQFHQWPFKRLRELLTYKAEGKGCIVVGIDPRHTSQTCSKCGYQHKSNRKSQSVFKCRSCGYQLNADLNGGRNIALKYLASAGISDASGPLSTGLSSQPSA

SEQ ID NO: 34738 - protein, 426 aa, unknown
  TnpB Polypeptide
MSVTKYIGNNKFRFKPTKEFKGLQAQALKMYQQVSKTIGQKIRAEEIVWEKPKTKKSMPFRSGLCKGYINLPDGTTVKPAEMRDSESWFKHIFENCTNKTLCGKVIENVCDRYASYCQRNSKLPNYIQIQKLNFNFKEGVCYNINNNTLQFTDFNKNKITLKIKDKTSVLNNKQLWLDQNDHKIKTSKNELKTGGVFIDKHNLFVVTVKKSYENTFDPKGFVAADINMARGDWLTFSHEINGEKTYPMPEYIIEQNKLINDIQGEINKSLKDHEPNKRAENNATTGFRKKKRLEWKKEHKNFEKAIRKHFVENIFPPIIQFCKDNKMGYAHDNIATGSKTGTFGQEKIKKIVFEICEENKIPIIKVNPRFTSQKCVECDYRHKDNRNGDKFCCIKCGFTSNVHEMAAVNISNKGIDDYMTKGYSHF

SEQ ID NO: 34739 - protein, 383 aa, unknown
  TnpB Polypeptide
MKRTVSLKLISTAEQSAALAALADAFASACNAIVPFAVEHRCWNRVALHHLTYYPVRELLPTLGSQMVCQAVHRVADAYKTLKANKGIAKDKPVPAICFRPTAVNFDKRTYSIKGNMLSLFTLDGRIKVPFVCGKHQSNLLASGAPKEAKLVVLKGIWYFNLVLDLPDTPPVSGGVLGLDVGENNLAATSTGKVLGGGKLRHDRDIYLANRRRLQSNGSRAAKRKLRAISGKEQRHVKHVNHETSKAIIAEAIRSGGGEIRMEDLTHIRANIKAGKRVRTRLHRWAFRQLQDFVSYKAEAAGLRIVFVDPAYTSKTCSACGTIGKRERHRFSCECGTRLHSDVNASRNIAGFALPIGLARAACKPAFKFAHQVRPAVVESPVL

SEQ ID NO: 34740 - protein, 401 aa, unknown
  TnpB Polypeptide
VIRRQGYRFRLKPSAAEDGLLRQFLGCSRFVWNAILAENEFRYEHGDPLPRNYGAFCGRLKALKARHEFLRAAHSQPLQQTLRDLASAYSKAFDPKLPAEMPIFKKKAHAQGIRFPQGFRVQRNGVFLPKIGWVAFRVSARTAKRKVEGEVKNVTLRLEGSRWYVSFQTEREVEEPTHEDAGSVVGVDVGVARFVALSDGTFFEGANAFKKHQRRLTLLQQRLARKVKFSANWRKAKARITNLHSKIANIRTDQLHKSSSTISKNHAVVVLEDLSVVNMTASTKGTVKAPGINVAAKSGLNRRILDQGWSEFRRQLAYKLAWKGGTMLLVDPRNTSRACSACGNVSRENRLTQAAFRCVACGHAANADTNAAINILRRAGQARIACGDAQASPKREAQCAA

SEQ ID NO: 34741 - protein, 228 aa, Erysipelotrichaceae sp.
VPVLNGKALKIQYCYEQEEEPQNLNADNVLAIDVGLDNLAPCVTTTGTSFIVDRRKLKSMNQWYNKQLAHYASIKDHQNVKGFTARMSFITDKRNRQVTDHMHKAARHIADYCIANDIGTLIVGHNVDQKQSANMGKANNQKFVQIPFDLLRTYLKTLCERYGIAYIETEESYTSKASFLDGDEIPVYDAEHPYTGIFSGKRVKRGLYRTKENTLVNADINGACNIAR

SEQ ID NO: 34742 - protein, 284 aa, unknown
  TnpB Polypeptide
VDRGLTVFAVAATATGTEAGRFTAPKPLQQGMVGLRRRSRAASRAKSRSSNHGKAIRRLSRQHARIANVRRSFLHEVSNQLVKTHDRLCLENLAVANLLGNRHLARAISDAGWTEFARRVGYEAAWFGAELVICDRWFPSTTTCSRCGQIKDRMGLAVREFCCCNCGLVLDRDRNAAANLAAWAEAASMAAALAPDRQAGGRVTNASGGEGTDHCRGDGETSPIEGGTDAHAVVAWQRTPEKGAAGRPRYEEPGRLQWNDSPQAQEPAALGLSIVKPDFSRVSR

SEQ ID NO: 34743 - protein, 372 aa, Cohnella sp.
MIVTITAKIKIKPTEIQIRALQETSHAYRQGCNLVSAVVFESYELNQAILHRKIYHTLRSTIGLRSQMSQSVMKTVIARYKTNQSNGHDWVCVRFKKPEYDLVWNRDYSLTSNLFSVNTLQGRIKVPYEAKGMEKYFDGSWDFGTAKLVCKHQKWFLHIPMSKDISKPSMEAITQVAGIDLGINFVATAYDSDGKTVFFRGRKLKRKRANYKRMRQQLQRKGTPSSRRKLKQIGERETRWMTDVNHQVSKALVSRYGANTLFVLEDLTGIRQTTEKARLKDRYVTVSWAFRQLRQMVEYKAKLAGSLAIAVDPKRTSQACPKCGLVAKANRDKRKHRFCCKGCRYQSNDDRIGAMNLTQKGKQILLQGAGAA

SEQ ID NO: 34744 - protein, 396 aa, unknown
  TnpB Polypeptide
MIVLEFKLAGAARQYAALDEAIRTTQFIRNKCVRKWMDERGVKPYDLNRYCAILAREYDFAAKLNAQARQAAAERAGAAILRFYKTRRTQMPSQKGYPQFQKDCRSVEYKATGWKLDEARARLTLTDGFKAGTFRLRGTRDLVGYACDQIKRVRILRRADGYYAQFGVNVVRRVAVEATGRNVGIDLGLTHFYTDSEGATVANPRHLRRSGEAVTRLHRRVSSKVKGSKNRAKARGRLGRKHLKVSRQRKDFAVKTARALVMSNDMIAYENLQVSSMVKNRRLAKSISDAGWRTFVTWLGYMAQVYGKVVVAVPPRYTSQDCSGCGERVTKALSERTHVCPHCKAVLNRDHNAARNILALGTRYLAETTAGHAERNAWGQSALYPMQATVSDTATG

SEQ ID NO: 34745 - protein, 375 aa, unknown
  TnpB Polypeptide
MKLTARVKLLPTTEHADALLKTLERANEACNYISEQAWESTTFRQFSLHKLTYYTVRERFGLSAQMAVRAISRVSDAYDIDKSTQRGFAPHGAFPYDDRILSYNLDKGIVSIWTLGGRLAIPFVAGPRDLELLQSRRGESDLCYVRGKWYLLATCDVETPEPIDVEGYLGVDLGIANIAVDNDGEFFSGAHVRGLRRRHSRIRGRLQAKGTKSSCRRLKSLSGKERRFATDVNHCISKQLVNKAERTKRGIALEDLSGIRGRVRVRKPQRRELHSWSFYQLRAFVEYKARLSGVPLVLVDPRNTSRTCPACGCIDKANRRSQDSFLCVSCGFAGRADHIAAINIGRRAVVNRPYVSDAGLPRSARDKPTTSVVGS

SEQ ID NO: 34746 - protein, 464 aa, unknown
  TnpB Polypeptide
MISKTLTDWVEDVAQMTQPDRIVWCNGSEDEYHALIEQMLREGTLLRLNERKYPNCYLHRSHPTDVARTEHLTFICTPKPEDAGPTNNWMSPEEARERVGSLFRGCMRGRTMYVVPYLMGPPGSPFSEVGVEVTDSPYVVANMRIMTRMGTIALEHLGDSDRFVRGLHSLGDLSPERRYICHFPEERMIWSIGSGYGGNALLGKKCHSLRIASVEARDEGWLAEHMLIIGVEDPEESFAVLSDGTRIEAPKPLEKALRLLKRRSKQLSRKQKRTVVEQDPETGKERKRTVFSRNYEKAALCLARLHRRARNIRRDFLHKVATELAKAKPVLVVEDLNVRGLARNGSLSRAIQDVGWGAFRRMLEYKCAWYGSHLVVAPRDFPSTRMCSRCGWVGPALPLSQRVFRCGACGLEVDRDLNAALNLRNYGLAALKGPTGSSPGSDACGDPSGGGTAPPGAGLRAMGR

SEQ ID NO: 34747 - protein, 371 aa, unknown
  TnpB Polypeptide
MKTAYKFRMYPNKQQEAVLDLTLEICRHLYNVALADRKNAYEVEGISRTYEDQAAMLTAEKKEGYFNGVFSQVLQDVLRRLDKSFKAFFRRVKAGEEPGYPRFKGQGWYKSFTYPQVGFKLEGSKLALSKIGSIRIFKHREIEGKIKTCTIKKDNLGHWYAILVSEMEDVPEIEPKTAIGIDVGLKNQVATSTGETIQYPRYYIQAEQKLAVAQRNLSRKKKGSSNRQVAKIKVARLHQKVQNLRNEFLHQVSRKLVDSADLIVFENLNIQGMLKNHHLAKHIQDHAWGKLIQFTESKAAKAGKIVELVDARYTSQKCSQCGIIVPKTLADRTHLCPNCGLQMDRDINASMNIRTLGLRGRAYRDTAIADR

SEQ ID NO: 34748 - protein, 348 aa, unknown
  TnpB Polypeptide
MADTLELCRWTYNETLAIRKNAYEQEGKSVSYYETKKLLPQWKEEKPGLRGVHSQVLQEVVKRVDLAYQAFFRRVKDGEDPGYPRFKGYGQYDSFTYTQSGFSLEPGRLWLSKIGDIKIKLHRAIVGEIQRLNIRKMPTGKWFVSFLVDVVPDEPLPKTGLSIGFDVGLKSFITLSTGVHVDNPRFFVHEENALAKAQRKLSKAKKGTPERAKALKVVHRVHERITNKRDDFVQKLSLKLVESYDLIAFEDLNIKGMVKNHCLAKHIADAAWNKLITTTSYKAEWAGKRVELVNPNGTSQICSGCGQVVQKDLSERVHRCLFCGLILDRDHNAALNILRLGLQSVAKA

SEQ ID NO: 34749 - protein, 442 aa, Clostridiales sp.
MILSEEHRIKKHNNKKLLHEIDSYCYKVKNLSNSVNYLIKQCYRIHKKIVNGKALEDWEKELIQEINKALEEYNAGRSESKRLRYINANNGYIADAYFLSWYLKGTEVYKDVPYATCSQICIQEKCREWKSFYRATAEYGKDQKKFKEHPHVPGYLDPKTGRSSLVITSQNFKVDEAGNVTMPKFLSGIHIRARHGNVRQIRIKIFKNSILISLMYEKEEKQICGTKVMGIDLGVNNLIAAAWDSEDRPVIINGKPLKSINQYYNKAKAHMQKEAKIYNGKNSTKRMNKLTAKRNRKIKDYMHKASRKIVDMAVSSGVGLIVIGSNHGWKQEVHMGNITNQNFVSIPYKTLTDMIVYKARLEGIEVKTVSESYTSGTSYLDGEEPTRTYYDKTRRIERGLFKSNTGILINADINAAYQMMKLGDTRAIPIKTGEQIIKIKAA

SEQ ID NO: 34750 - protein, 404 aa, Cyanobacteria sp.
MIVYEFKVKGTETQYRAIDEAIRTSQFIQNKCLRYWMDNEKVGRYDLNKYCAVLASEFPFADQLNSMARQSAAERAWSAISQFYDNCQNKIKGKKGFPKFKKHCRSVEYKTSGWKLSDSRKAITFSDKKGIGTLKLKGTYDLNYYDIKQIKRVRLVRKADGYYAQFAIDVKVKIETQPTNKIVGLDLGLKYFLADSDGNTVESPQFYRKSEKQLNRANRKKSKKFVKGAKPQSKNYHKARSRYARKHLRVSRQRKEYVKRVAYSVIQSNHLVAYEDLNVKGLVRNRHLAKSISDAGWSTFRQWLEYFGFKYGKVTVAVPPHNTSQNCSRCRKKVKKSLSTRTHVCPHCGFVEDRDINAAINILKLALCTVGHTGTYAWGDLPSWAVGAILLSNGESLNQESPHF

SEQ ID NO: 34751 - protein, 412 aa, unknown
  TnpB Polypeptide
MKHTLRFRAYLADGAASEAWRHIEILRQIRNHAVRDYYNSDYNDQPSGYDQHTKLTEWTDRWPTFAEPSQHAAQQAISQIHDDLEALQERRDEGYNVGRLRWQGCGEFRSVSYNQSSRFDVDHNTGDDRFVRLRLEKIGWVKLRAERDVPPAADIDEVILKKETTGEWYVSLVTSVEDTPEKPSLSEIEPEDCVGVDLGITSYIHTSENLSVDTLDLSEEYERYAREQRNLARKDHGSANWEKQRQRVARAKRTIKRKVLDYQHKLTTWLVTEYDVVAVEDLDVKPMLETSQSAKNKQDAAWSRFLELLEYKADLHGTHVEKVEPEGTTKECAVCGVETAKPIWVREHSCPACGHTDDRDLNAAKNILYRGLRQLGAGRSESTPVQTALPTFTPQREVMNAKRVVEAGSPRA

SEQ ID NO: 34752 - protein, 128 aa, Cylindrospermopsis sp.
VNSAIKLARHHARMANQRKDTLHKLTTYLCKNHAKIVVEDLNVSGMLSNHKLAESIAHCGFYELKRQLEYKAKKFGCQIIIADRFYPSSKTCSGCGRKKDSLSLSERIYRCENCGLEIDRDNRSLPLK

SEQ ID NO: 34753 - protein, 360 aa, unknown
  TnpB Polypeptide
MRQEFTGTGKMLPEYELTGRLANEKQPDYVALPAQTSQQIIKLLFKNWKSFFKLCKVKDTLKARPQLPKYKHKEKGRNIVVFTGQQCKLKDGYIHFPNRVNIKPLKTKVTNVCQVRIVPQCSCHVIEVVYEKENLETTEVEPDTYLSIDLGLNNLATSFDPQHHCCFVINGRVLKSINQYFNKQKAYLMSLIGNRGMSKRIGRMTLKRNCKVNDYMHKASRFIVNYCIEHRIETIVIGNNKDWKQNCNMGKRNNQNFVSVPFEKLISQIQYKSEEVDIKVVVTEESYTSKIDHYSDEEMCHHESYLGKRIHRGLFRSATGKILNADLNGAIGILRKVVGERLWQVADRGVVETPSRIYIV

SEQ ID NO: 34754 - protein, 381 aa, unknown
  TnpB Polypeptide
VPTVKQNRAIKYRAYPTPEQQVLLAKTFGCVRFVWNHMLTDAQQFLNEAGTFFVPTPAKYKKEFPFLKEIDSGALCNTQLDLQDANDRHLESPKTVGAPKLKSKRKSKMSYTTNIHSYKTKDGSVVHTLALGYEAIKLPKIGWVKIKKHRQPSTGWVLKGATISCTRSGKYFISLLYKFEKDIQPVTVTKEKSLGLDYSSHNFYVDSNGKVANYPQFYRQSEEKLAKEQRKLSRMKVGSKNYDEQLHKVQLLHEHIANQRKNFCHTVSAAISKQYDAVFVEDINLRGLAGSLKLGKSTNDNGFGMFRTMLEYKLTSQGKTFAKIDKWYPSSKTCSACGFIKDDLTLADRVWTCSGCGTTHNRDHNAAINIRNVGLLGLYPA

SEQ ID NO: 34755 - protein, 194 aa, unknown
  TnpB Polypeptide
MHQFLGLDFSMQELYRDSEGREPEYPGYYRKAEQKLKREQRKLSKMQKGSKNRGKQRIRVARMHEKVAAQRRDFLHKQSRKIADAYDCVCIEDLDMKAMSQALHFGKSVLDNGWGIFVNFLKYKMEEQGKQLVKVGRFFASSQLCSVCGYKNTETKDLRIRAWICPKCGTHHDRDVNAAVNIRNEGMRLMYSLQ

SEQ ID NO: 34756 - protein, 415 aa, unknown
  TnpB Polypeptide
VRVRAYRFRAYSSKTTARVLKTQLEVACKLYNALLHAEKEEYERNRHSMSKNELRQLALDLRKKNPEFQLLYSQVAQQVAERFYQARERFFDGLVNKPKKKKPHRYLSLVYPQSGWRLCDVREIGLGKNKKRKARLYLSKIGFFTLILHREFLESQVSQVCVKLYPSGRIHVIFLVEEPESQELSSKEPVEAVGVDLGITRLATLSDGRILENPRPLERSLEGIRVLQRTLSRKRFLSKNWLKARMKLAKEHEHLKDFRRDLFFKLGALLAQEYDVLVLEHLNVKGLIQNGTKKRRLRLYDSSFSELRAVLEWQFRKRGKLVLPVPSYNTSRECFLCGGINKGLTLEDRVFHCAHCGFTLDRDLNASLVLLKRAGWVPPAVPGKLRPIPPLPSLGLVRGRQGGVMIQEAPPFRAG

SEQ ID NO: 34757 - protein, 319 aa, unknown
  TnpB Polypeptide
VGKIDIKTTVSKVTDWNRQYVTPELYMIRTDFGKLARRYEAIRNAITEGLKPLYALPNGKYVSITDVREFRKRVKHLREKDRKLGRVRHVANELTKSPSIIITEELGDNPQESMINGIGKDEVRHRIKQTPFKAVEEKALERGSKIFRVSSYRNSRVCPVHFTKLESTNDWHVLKCPLGHYVHRDHASILNMLWKTTPRSWTKGVWWNMKLEMNWREYEGKSNPLIPQNIVQYIHAVLKTFTASEESPAMLARGNPMNPAREANEDWARKPPTPLRTGRRPASPQPAQPCTQSSCKPSRPVHYPHPRVTWPLHRWLRRP

SEQ ID NO: 34758 - protein, 442 aa, unknown
  TnpB Polypeptide
MYIKTLRIPVHYATTKRKRNILNRLTARLSYAVRLWCKLIEENNIKTRSQLENINLQHRVQEKTRLSAGFVQQAGNKALWMWTSYREQHAIWKRMLSKTKLGSKWYNKLLKREPKPPCTSKHSLLKKQPVRFDPRTGKIEKANLKLTSYVAHISTLVKGETINVPLNPCEYHRQLLEKGTVRDFELVWDDSRGWMVHAAVAFQSMLQPVAEFMGVDLGVCRAASTVLIVPSKKPHGHKIFRSGKLKLQRLNDHISHLQRLGKYKALNRLRNKRRNVSEYYDWLLANELAESCKNVLVVFGSPGYIRYNNYRGNNKQYLRKLLQSWSFRRQTRYAQAKLNERGIQSLVLNEWGTSNRCHRCHGKVERPYKGSWRRMKCLSVKCGLEYDSDFGGAANTAQRGISVLRVKSPADLVLNGAGAPVERARTRDDSAEKVDEPRSPTF

SEQ ID NO: 34759 - protein, 408 aa, unknown
  TnpB Polypeptide
VLNTLKLTTNKQGIFNEIFSEYLRILNETLKSLPNAASSTQLHHLTYRHLRETSFLPSDLVQEARKDVWAKRKTIKEFKRCSIRLNPRWFRYVQSERGSPIVKVTYTPGKSLAVPVRIDGQLNRFNQFLGEGWIFRSISLLWDGRIAVVLAKVFPAANNNTRFVLGMDVGSTTLAAVTVYDSEKGKVVKQLYLGRDVAIRQRQFEDRRSKLQSYAGNGSGKAKKYLKKLKFKEHNYVTTRSGQVGKEIVVLAKKYDASVAVERGGFSSRKHEKNRKANRKINRIPQAKLKSFIASNCEEAVVSNPKVDAYHTSKWCPHCGAVNKGHSSTNYALYQCKACGLIVNSDRKASLAVAVKSVLERTAQDITNPRFVQFSGTRVPVNGLVRPDAADSSSAVRSTDRPMESSSL

SEQ ID NO: 34760 - protein, 405 aa, unknown
  TnpB Polypeptide
MKLCVKYRLKPIEEQAVALKKLAFYATKLYNTDNWIRREAWAKTGKIPSWYAQKKLLKTNHWYRLLPSQTAQAVVKNLQDAYRSWFKLRKTDPTAKPPGFRSGDRLSPLMFYQQFTLVGDQLTLVMSKKFRAETGVDKLAFRLDLWRKVGGTLKMCNVIYDGEWMAHVVYEVQEPPRTDDENVMAVDLGIVNLAATVDLNGRAKLYSGKQALAVQHYFNKEIARVQSLTAKQQNKKGSRAISRMHKKKTRQVNQILHSTSKAIVEDAKRNHVGTIVVGDLKNIRKNNGKAKDFGRNNQKLHAWGFRKLLTQVRYKAALSGIRVVEVSERNTSRRCSACGVVRKANRKHRGLYVCSKCGAVLNADVNGAVNLLRKYLHQAKAQGSIGSVTEPLIWRYAVNQEAHTL

SEQ ID NO: 34761 - protein, 412 aa, unknown
  TnpB Polypeptide
MAMAPPATTLKTGKIIEIIKAHKIRLHPTPEQEAYLRRACGTRRFIYNWGLAEWQRQYQAGEQPSALALKKQFNGLRGVEFPWTYDVTKCVVEGAFDDVGKAFSNFFAKRTEYSQFKKKGKSQESFYLANDHLTVGDHWVQVPVLGDFIVKQREAKGETITKRAQLKRRLGKINLAEKLRFTDKTDKTSKIMGATIRCEAGWWFLSVQVQVQVPQTPLEGPPVGIDLGFMRLATLSDDTRFENQKPLRHLLAQVRYLNQQLARRQKGSKNREKTKRKLARLQYRIRCLRDDLLHKVAHQITERYGFIGLEDLNVRGMFQNRQHALSASDAALGRLAHLIETKAQAHGTPVQRVGRFFPSTKRCHRCHHLREIAEDERVYVCFNPACGWVGDRDLNAALNILEEALRLASVAV

SEQ ID NO: 34762 - protein, 369 aa, Megamonas sp.
MEKAYKFRIYPNKTQESLLQKTFGCVRFIYNHFLDRRIKAYEQNKKTISYNECSKELTQLKKEKKWLKEPDKSSLQNALKNLDTAYKNFFNRQKAGFPKFKSKKNRYKSYKTNMTNNNIVFLGNKIKLPKIGKIKTRDKYRQIEGRILSATVSQTPSGKYYIALCCTDVPQPEFIKTNKYVGLDLGIKDFVITSDAVKYSNPKYLQKSLTRLAKLQRELSRKTKGSSNWEKARVKVAKLHDRIANQRHNLLHQVTCQLIRNYDVICLEDLQVENMMKNHKLARNIADVSWSEFMRQLTYKAKWFGRIIVKIDKFYPSSQLCHVCGYKNTEVKNLNVRDWNCPKCKTHHDRDVNAAINIRNEGLRILNIA

SEQ ID NO: 34763 - protein, 379 aa, Acinetobacter sp.
MNEVQMKAYKYRIYPNGEQKVLIEKHFGCARFTYNWALALQQKYYDEHKKSLSRKDIQDQLVSMKKQEQYSWLNEVNSQTLLSGLLHVYTAFGNFFKGRAKFPKFKSKKIPQRSYQCPQHGSVDFEKGTLNLPKLKGIKAVFSRQFDGKIKTVTISKTATGKYYASILVETNQAKVTVSIIEADKTIGIDLGLNHLLIQSDGQKIENPKYLRQAQNGLAIQQKIFARKKKESKNYQRQKLNVACIYEKVRLQRLDLHHKLTHHLICENQATTYALEDLGIKNMVKNSKLAKSISDVAWGQFLTLLQYKAEWYGKNVLKIGRFVPSSKTCSCCGYKMEKLPLSVRLFECPSCNLVEDRDVNASINIRNFALADALGLRAV

SEQ ID NO: 34764 - protein, 303 aa, Acinetobacter sp.
KKKSDGYDSIRLVQFDKYCRIEGNRVKLPNGIGFVKFRKSQDILGTIKNVTISKRSGHWYISFGSEKELLENPVHPSKTAVGVDLGVKKLVTTSEGEVFNPKNSFKTNQIKLAKLQRKLSKKLKFSENWKKLNTTINKLHYHIANIRHDYLHKVTTTLSKNHAMIVVEDLKVANMSKSASGTIEKKGKNVKAKSGLNKAILDQGWSMLVDILEYKQQWRGGLLVKIDPKYTSQTCSSCGHVAKENRLTQAHFECVACGFSENADINASRNILAVGHTVLSVEGGCGKGRPMKQKASEIREEVT

SEQ ID NO: 34765 - protein, 391 aa, unknown
  TnpB Polypeptide
MIKAIRVMLLPNNKQKTKLFQYAGTSRFAYNWALAKEQENYKNGGKFIPDASLRKEFTHLKKTEGYTWLYNVSNNVTKQAIKDACDAYKRFFKGLAKFPRFKSRKHSIPSFYQDSVKIQFTDTHVKLEGFVSSKKKNKQKLNWIRLAEHNRIPVGCKYSNPRIKFDGINWYLTVGIEYKNSNPPPSNGGIGIDLGIKELAVCSDGYSCKNINKIQKIKKLEKRKRRLQRSISRRYEKNKKGECYCKTSNIIKSEKELLKLNHRLTDIRQDYLHQATSEIIKREPSFICMEDLNVSGMMKNQHLSRAVQQQGFYEFRRQIEYKSAWNNIPVILVDRFYPSSKQCSCCGKIKKDLKLSDRIYRCGCGNVIDRDYQAALNLKRYGEDILKQSIS

SEQ ID NO: 34766 - protein, 412 aa, unknown
  TnpB Polypeptide
MLKAYKYRIEPNVKQTELINKHIGSCRFLFNLALETKQLAYSGNKKYLNFFDLANQLPDLKEECTWLSEINSQSLQMSLRNLESAFTKFFKGQADFPNFKSKKGKQSFQIPQHTEVDFREEKIFLPKFKDGIKIILHRKFKGQIKTITISRTTTGKYFASILVDNKRELPKPKKIKSESTIGVDLGLKSFIVTSDGLKTDNPRYLRESLERINVLKRRMRNKKKGSKKQKREYNKIAVLYEKSVNQRKDFLHKLSMQLIKNHDTVCIEDLNVKGMSARCKPKKDENGKYIPNGQSAKSGLNKSILDAGWSMFVSMLEYKAQWYGKNILQIGRWEASSKTCSCCGAINHALTLKDREWLCASCGTLHDRDICGAINVKSFALKNHSGSERASAPAELPTLVGTMKREASIPLG

SEQ ID NO: 34767 - protein, 396 aa, unknown
  TnpB Polypeptide
MCDPVGVKTAYRCRAYPDRPQQQVLARTFGCVRVVWNRTLAARRARYAADGTGTSYAQTDRALTQMKQDPELAFLAKVSSVPLQQTLRHQHKAFAAFFGKRARYPRFKSRRGRQSAHYTRSAFSLRGGVLRLAKTDGPLRFTWSWPDIDVGALDPAMVIVSRESDGRWYVTLTIDASAPDPLKQTGRTAGVDLGLRDFVVTSDGERIANPRHLARKARNLARYQRRQARCRKGSANRAKAAAKVARAHRKVRNARQDFLHRASTGLVRGNDVIVIEDLAVANMVRNRRLARAISDCGWGEFRRQLEYKCERYGRRLIVIDRWYPSSKTCSACGHLLAELNLSTRHWTCPSCGARHDRDINAAKNILAAGLAVAQGSWAMPAELASDIPGIPGCGWW

SEQ ID NO: 34768 - protein, 394 aa, unknown
  TnpB Polypeptide
MPNLSVNISTTIAPCRRQLQRNDKAKSLPNSSKDLPRQHPNTSSIPKSSAVNRNFPATKGNIESFMSGATATGYAMITGGEAVGFTPINVPCCENQEFNAKAPEAMAGDLRIIPMGNTFIVELTYRVKKEEKQTSESVSLNSNEALFCDLGIDNFATFVSTKPGIKPFLIKGKVLKSLNQNYNKQVSELRSKGHCEHIRIKGAKRYRQMHDLMHKASHLVIHFCLAHDLGHIVIGVNKDWKKGVHIGKRNNQNFVMLPHGRFVDMIRYKAEEYGIEVTVREESYTSQASAMDMDAIPNFDPKETKAKTVFSGKRIKRGLYRTKEGFLINADVNGAANIGRKELGDEWLKKLLELDGGVLVNTPTVVRNLHARADVRQLLEMGVRSYETVRVSAR

SEQ ID NO: 34769 - protein, 367 aa, Pasteurella sp.
VKEIAIKQRFYPTTEQAQLLAQTFGCVRFVYNAILKWRTDAFYNESKKVNYNTASSKLTELKKQTEFEWLNSVSCVPLQQSLRHQQTAFKNFFEGRAKYPAFKKKRSKQSAEFTKSAFKFKDGNIYIAKSKQPLDIRWSRELPSEPTTVTISKDSAGRYFVSMLCRFEPKPLPVTKKTTGIDLGLTDLVITADGFKSGNPRHTAKYEKKLAQAQRRLSKKKKGTANFHKARIKVARIQAKIADCRRDFTHKLTTTLINENQVISCESLSVKNMVKNPRLAKAIGDANWGEMVRQLEYKAEWRGRTLVQIDKWYPSSKRCNCCGHVVDSLPLHIRHWTCPACEARLDRDTNAAINIKAAGQAVLACGA

SEQ ID NO: 34770 - protein, 379 aa, unknown
  TnpB Polypeptide
MEQITITAKIQIVATETDKVLLDETMSVYRNACNYVSDYVFHTHDLKQFSLNKVLYSTLREKFGLKSQMAQSVLKTVIARYKTILENQNEWIKPSFKKPQYDLVWNRDYSLTQNRFSINTLNGRVKLSYFADGMSKYFDHTIYKFGTAKLVNKHGKYYLHIPVTYDVEESNISDICNVVGIDRGINFVVATYDSKHKSGFVSGKAIKQKRANYSKLRKELQMRRTASSRRRIKAIGGRENRWMRDINHQVSKALVKNNPKHTLFVLEDLSGIRNAAERVKTKERYVSVSWSFYDLEQKLIYKAKQNQSSVIKVDPRYTSQCCPCCGHVEKSNRNKKIHLFTCKNCGYKSNDDRIGAMNLYRMGIDYLADSQVPNTVVTE

SEQ ID NO: 34771 - protein, 384 aa, unknown
  TnpB Polypeptide
MTNRSIRVALARNIRSRKRLVHEAYADLSRDHAVYKQYIPSAFEVALGVLKVHRRRLKLGKPTRAPFMRRLMLKAENQSYRLDRDTGILDLPIKAGEYVRIRLPVSTWHRSFLSDASWGLGSLTLVPGKLVITVRKTAPAAYEPISAIALDTNEESLDGVVARGNDTTFVVIRLGGVREVQATHFRRRRKLATKKANDRRVAQRLLAREARRERNRVRQRLHVASRDLVCAAKRIRSVIVLEKLTLRWSGGFSRRMNRRRGSWPRGEIHRQIEYKAALAGVPVIKVNPAWTSKTCPVCGARRRDRVGKVFVCLMCDWEMDRQINAGMNILKTALASNEALARAVRFQPGALRHDAVSPLYDLSALPTGAREEPSGVESGPRTLS

SEQ ID NO: 34772 - protein, 459 aa, Micromonospora sp.
VKTVQAYRFALDLTPTQERTLLAHAGAARVAHNWALARVKAVMDQRAAERSYGIAEDLLTPAMPWSLSALRKTWNTAKHEVAPWWRECSKEAFNSGLDALARALKNWADSRSGKRAGRAVGFPRFKSRRRTTPSVRFTTGAIRVEPDRTHVVLPRLGRMKLHESARKLARRLDAGTARIMSATVRRDGGRWQVSFTVEVERAQRAPARPGAVVGVDVGVKHLAVLSTGEFVPNPRHLNNAQRTLRVLGRSLSRKVGPDRLSGQRPSRRWQLAQARLGRAHARVANLRRDSLHKLTTGLAREYGTVVIEDLHVAGMLRNRRLARHISDAGFAELRRQLAYKTIWNGGRLAIADRWYPSSKTCSGCGVAKTKLVLSERTYTCTSCGLILDRDLNAARNLAALAAHCDTAGSGPVAGRGADHKTRLGGPVAVKRQPGTAPAEKTGTVPPQGETADRVPARAH

SEQ ID NO: 34773 - protein, 492 aa, Catellatospora sp.
MEAAPAVAAQVLLAAADRQLTTITRCDDGRAVLRVQLPLTAQPRSRAEWAWHVLQVALPPTVATDATICAPTLRISGHRMRVDLPHRVTVTPADPSGHRLALGLDWGVNTLLTGVVGRLADGVRVVTDGRMLRYDATAISAKLHRLRGHREHLAARRDHHSVLAAGLPATDPRTLRLHAMAQRARVEHERVCARIRHLNKTLAWSAARWAVDHATALHATVIYVEDLATLQARGTRKGNARLSGQVRGVVFEAISHLAAKTGIAVVTVPARGTSRYCPRCGAGSSVLAHTPAPDRPDERGWKWAACSRCGLSADRDHAAAMRITARGLLAQAHVRTDRKTGRHTTTTIVDGNVATVRRTTPRPAKQPDAGRGPKNRPTPKRPPASASKLSHRVPDRRTAPAPPSGGQRPAGQEPKNHHHPAAASGPAHELLNPQHHPTGFHHVRATAVTALSGDFGPRHTATPRPECLKHTQTNSGDQRRFPGSVNVAEVWG

SEQ ID NO: 34774 - protein, 214 aa, Enterococcus sp.
MKALKAYKYRLYPTSKQEEFIQKTFSCVRLVYNLMLQDRIDIYKEMRKNPQQTFKMPTPAKYKKQYPVLREVDSLALANAQVYLDRAFKNFYREKGMGFPKKKKKETVHSYTTNNQHGTVKILDNRYLKVPKLKSLIKMKVHRQPLGEIKSVTISMSASHNYYVSILCEAPIETKTKQQKMVGICSSREKFALLSNGESFEKSYCSKHLKQKLR

SEQ ID NO: 34775 - protein, 255 aa, Hyella sp.
MQDSNTLVVTSYVIEIVYEQSELPCSQLNHTSIAGIDIGIDNLACVTSNNQRFKPFIVCGKAIKSANRYFNKAKARLQSQLPKRKHNSRRISRLTQKRNSKMDYYLHTASRYIVNRLLENKITLLVIGKNNNWKQNLNLGKKTNQSFASIPHFKFIEQLIYKCQLVGIEVKTVNEAYTSKCSFLDLEPIKKQSTYLGKRVKRGLFKANSGRNYGAEQNGSLNIIRKAVGDSLFIGQPIKRLVVSPVRVKPYKASC

SEQ ID NO: 34776 - protein, 430 aa, unknown
  TnpB Polypeptide
MYKLVDKKSKTKYCILDTDDGVIDTLSYDVIIDCLERGIEIDGCIKTNTGYQFTIDNSEYHKVMKGYKFRLYPTALQREYFSQCFGCCRLIWNKMLADKIAYYNEYGESLNTLVTDYKADYPFLKDVDSLALANEVQNLNKAYKNFFRNKDFGFPKFKSKKNSHKSFSTNNQKGTVEFIGNKWLKIPKNKKIGLIRCHQSQEIKGVVKTITISQVPSGKYFVSCNCEIWYQKLSKTDSYIGIDLGLKDLVITSDGNKFENTKTTCKYENQLAKLQRQLAHKQKFSNNYYKTKKKIARLYEKITNTRKDNLHKISHKLTNENQVVISENLKVSNMVRNHNLAKSIEDASWYELTRQLDYKSNWRGRIYHKIDTFYASSQICSCCGYKNVQVKDLVIRYWTCPSCNTYHDRDINAAINILSKGLDDLGICVA

SEQ ID NO: 34777 - protein, 435 aa, unknown
  TnpB Polypeptide
MKESRAVYNFANFLVRQGYFRRKGKKFNTEFLNEFNDDPSLCTEIETYFKEGKNFTSRLHRILCVIARRWKCDINAKIVQGVIRHLQADWISFFELLKKKKDGSYDEKVRPPRYKKEAFNLVEYNPQTISKKKLHAGFIGTAKMAQGVKLRSLKPNETVQAFRVDWKNECVQIEVIFKREIDIPRETGDGEKIASVDLGVDNLMTVAFNYERRPVVISGMEIKSLNRFFNKEKGKLQGELPNKTYSSRNIRRLMGKRYEQIRNLFGRITNKFVAFLICEGVTKLIVGYSEGWKDEVHIGKKNNQNFVQIPFLSLVKILRYKCEEAGIRMVIQEESYTSKASFIDNDAIPTFRKLKKDEEKPVYKFSGHRQKRGLYKTKNGVFINADLNGALNIMRKAGGLSLEKTSSLTYLTRYTHICPISLDLCALSQCKQAET

SEQ ID NO: 34778 - protein, 419 aa, unknown
  TnpB Polypeptide
MKIRIYPNKEQKQHFKHCFGVSRYFYNKSIDEINKRYKDRKDQFNNKNTCIHCNNKKEENSWSCSKHLKKEIKWNLKITLPSIRPIVMSSDENVSNNMLWQKEVAFDTRQMAINDAVKSYVSSVSLLKMNKIKKFDLKYKTKKNKYQIFWVNYKAITKDYKLFTRRLKSKSKLRIRKKQRVLLSKLIPNGIDSFCKIQKSGKNIYHLIISYEKKDIINKNKKDSFISLDPGERIFQSGYSSDNKCYQFGIKQMEQIKRIHKKIDNLKSLRSTNFCSKTKNKNYKNKIDQYDYKVLNIVNNLHNQVSSFLSKKYKTIIIGKLNTHKILKSCGLNNKINRLLQVQSHYKFRTKLNLLCKDNKSNLIVQEEQFTTKTCGNCGCINENVGSNKIFRCDKCNLIADRDFHAARNILIKFLTLNQ

SEQ ID NO: 34779 - protein, 450 aa, Fischerella sp.
MLTFIYRQQVEAMLVLEAKLKGKQSQYNSIDEAIRTALFIRNKALRHWIDNKDVGKNDLSSLCAVLAKEFDFANKLNSMARQASADRAWLAIAGFYDKCKKKKPGKKGFPRFKKRGHSVEYKTSGWKLSADRKHITFSDGFNIGKLKIVGTRDLSFYSIKQIKRVRIVKRADGYYCQFCVDVERTELHQHNGKQIGIDVGLEFFYTDSDGKTVENPRLLPKSEKSLKRKQRKVSKCKKGSSNRRKAVKKLAKKHLKVSRQRKDFAVKTARALVQSNDLVVYEDLQVRNMVKNHHLAKSISDASWSLFTDWVDYYAKVFDTWAIAVAPHYTSQDCSVCGTRVKKSLSTRTHKCHKCGTVMHRDHNAAKQILAKGIKNTVGHTQINDRWTEQPLSRWGNSSRQVDWLKEESHTLKVWECQKTDIRIIQVRSQLIFSKNTHVYISLFSYLPTQ

SEQ ID NO: 34780 - protein, 579 aa, unknown
  TnpB Polypeptide
MASTHLSLPIRLPFEERERYARLDTLTTSVANTLIERYWTPEHLTGINESSYQAWKYFDEHQAFADVDLYLPSRYKRCVMQKVGETLRSHADKREAFQSIQSVLPDHKIRRIDTRRIKERLWDDEEYLTSGYVDLLIDQLNSYYDRYGCFPESYFELQECPTYSKGVLPYSADDGPTSGQAVKYEYDEDTQTLTVKLKTPDTVEPESRGDWTWTEHELEGYEAFHELLEHGSLSAPSLHPTQTKTGDDYYELSFPVEVEHGEKPDDVETVLAIDGGLRKDATAVVVNADGEQLSTPYFVQNTERERMRNLAQERNQLNSQLAYLRREGRDHTDSFTHVQAEYERVNNKIRHKREQSVHDVANQVLALALVYDVDAIVHEDLRTLSPPRGEGQLSWELSSWARREIISKIEYRAEIAGLHVKRVHPENTSRSCPRCGSTGHTTKSPDHFHEIWHGGHFRCDNARCGFQADRDYVGAVNVARVFFSESATLSHDFTSSYTGDFEIVPASRSAGPRLAFGNAPIAYIGQSEKDVTAGGGSCLIAPAVTPTETINNSSNPSTSSPATFGVSRFARVTTNCYRK

SEQ ID NO: 34781 - protein, 388 aa, unknown
  TnpB Polypeptide
MTTITAKIQILPTQSDVQAMLDTFALYGRACNWLSKKVFETKTLNQFTLHKLFYETIRSEIGTKAQMTQSVIKTVVARYKSAKANGHDWSLIEFSNKDYDLVWNRDYSLTGGKFSIGVANGRIKIPMVTKGMEKYFTDDYKWGTAKVVHKLGKWYLHIPVTKESPTMLMGEISNVVGVDLGINFLATTYDSKGKTQFFNGRSIKHKRGEYKALRKELQQQQTPSARKRLKQIGQRENRYVTDVNHQVTKALIENNPKGTVFVLEDLTGVRQVTEKVQVKHRYVTVSWAYFQFKQFLSYKAKEQGMSVVTIDPRYTSQTCPKCGHTHKGNRDKKNHRFTCLSCAYKSNDDRIGAMNIYRKGIELISQSDPAVAVEQVSIAKGEVNRPKG

SEQ ID NO: 34782 - protein, 383 aa, unknown
  TnpB Polypeptide
MLKTFKYRLYPSKAQEKRMFQVLAVCRHWYNMCLEERKLAWEFEQRHVTKSEQQAKGKYYRKTFPQAQIVFSQTLQSVVDDLDKAFQAFFRRVKAREKAGYPRFKGRNRFNSFAFKQFGVGATLDGRRLKLFGIGRVPVRWHRAIPEASTIKTCRIKHQAGQWYVSFAVELPDQSELPKTGRFIGLDMGISALITTSEGEKVENPNYYRAGQRKLRVLSRALARKKPGGKNRRKALKRVQRQHMHVANQRGDYLHKLSTKLVQTCDGVALEDLATRNMVRNPHLSKSILDSGWGIFKQYLLYKAASAGREIRFVDPAYTSQTCPQCGGREKIELSVRWVNCGCGLSLDRDHRAAINVLIKAGWDTPVIAHVDTGRHGLEAAPL

SEQ ID NO: 34783 - protein, 460 aa, Microcoleaceae sp.
MKTTYQYQFYPNTNQKLTLNQWLRICRYWYNRQLGDRFDWWDNNRTAVNACPLIVSISALREKPNYYSQKQQLPLFKKDLVKVFHSGELLDFKQVDSTILQDVSKRVDKACERFIVGDSQGKKSGRPRFKTEADYRTMTFATASNDWIKWIRKSWIYIRLPKLGVVKVRMHRPIPYGFTIKQASVTKKADGWFIQLILEDISVPQFTPDKVIPTWDNSIGLDAVLHEDVYLATSEGEKLPSLKPLRKNKAKLDRISQKRNKRKRGSKSRRKLAKKEALRHQKIARSRKDFHYKTAQKLIKTGAKIFFYEELNLKGLTKRNKVKQDDNANYLPNGQSAKSGLNKSWLDAAFGQFFLTLEYIAAKAGSVVVSQKPAYTSMVLCYRNEIIFTDCSMRDYWDEQNSLMVDRDINAAINLKRLGLDIFPSIKRCSGNLSIVGTMDKSTTKEILYTLNRATKKPTS

SEQ ID NO: 34784 - protein, 385 aa, Streptomyces sp.
VKIVTQVKLVPETDQAAALRSTLRTVNDLATWVSDVAFVNDVPREYDLRRHTYAHLKSEGLGAQAAQHVIKKVRDAYTTLHANLRAGNLGKPGSKRRRKAESKPITFRPEAAQPYDDRCLSWQYDTQTVSIWTTAGRIKNVRFACSADAFKVLQHYRKGESDLIERDGIFYLTATCEIPEAETYEPDRFIGVDLGIVNIATTSTGYQAAGRGLNRYRKRQLALRSKLQKKRTKSAKRRLKERSRREQRHVKNTNHIIAKTIVTEAERTSAGICLEQLKGIRQRVRLRKPQRVALHSWAFAQLGDFIVYKAKRAGVPLVFVDPSYTSQTCAECGHVDKRNRVDQRLFICRKCGVVAHADRNASHNIATRGETVWNAGRESRVPATP

SEQ ID NO: 34785 - protein, 381 aa, unknown
  TnpB Polypeptide
MFRAIKVRLYPNKQQEQVINRILGCYRFVYNHMLALKQQEYNDNKINLSLKDLSKYFYGTLRKDEKYSWMKEQNTQVMSQSIRQMLTAYDRFFKLHTGFPKFKTKKDRQSALFPLEAISRRNIFETKHISLIKSLKNIKFRCSDLYFKRLQTYKDSIRSATMSKTKSGNYFLSILIDIPQDEVVKFKQTGESVGIDLGVKDFVITSDGEVFENKHFLKKQENKIKKLQRQLSRKVKGSNNREKARIKLAKVHKHLVNQRENYIHSVVNELLKYYDNIYMEDLNVSGMLKNHKLAKAIQEIGFYRFKSLLLDKSTNNGKNVIFVDRFYPSSKTCSCCGYVYRKLTLKEREWKCPDCGEIHDRDLNAAMNILTEGERILESSK

SEQ ID NO: 34786 - protein, 245 aa, unknown
  TnpB Polypeptide
MVVQAIKAVRQSHEPTKELLDLMETFRLMVNRCIQIGLENNVTSLKTLSSKSYRQLSVFKTPSYYRLCAISHSVGILRNFRKALRRGRKVRIPFARRPMLTTCYGFKILDGKLRLPLGNQQFAWIRLNQHTQEVLSDPSLTVRSVCLIARTISIAFSKEIAEVEPAGLIGMDRNLDNVSTASSDGSIRAYDLSKAAEIRAKYRAIKTHLKRNDARVKKQVFGNYGRKQRNRTIQLLHLTSKDIVR

SEQ ID NO: 34787 - protein, 390 aa, Okeania sp.
MKLVERHIIQKNHRFYPEIDRLCFLSKNLYNYANYLVRQSWIFENTNLSYYVLQKTLSTQADYQAMPAKVSQQILMILEKNWKSFLAANDVYKQNPSKFKSRPRLPGYKNKVTGRNIVVYTTQAISKRQLKQGIINSTYTEIYLKTLVSTSQIKQVRLVPRLNHYVIEVIYEATKKQYLLEKNRVASIDIGLNNLATLTFNQAGIKPLLINGRPLKSINQYYNKVKSFLQSQLRENQSSKRLKKLMLKREFKINDYLHKASRLIINTLINQKIGTLIIGRNEEWKQKINLGKRNISYFVSVPYNKLIEMLSYKAKMVGIDVIITEESYTSKASFIDNDLIPVYTEGEKKYVTFSGKRVQRGLYCTASKRLINADINGSLNIMRKAAPFCL

SEQ ID NO: 34788 - protein, 478 aa, Thermoprotei sp.
MPASTQLISDEERGSDEERGPISPANSDAGVHGSEGGEEGFLVRAVRASKERVNTVRLLPSGAQERKLMRLADLSAKLWNELNYERRQQWNGGQRVDLEGTWRKYYEKYRGALGPHNAVAVINKNNEAWGSFFSLLKAKKEGRLPKHERVSPPGYWKDREEGRRKPIFVVAGDSYAVDEANHVIRIKLGRKKKPLEVPFAGRLRWYGKQGRMEIHYDGARRAWHAHISVKVGAERTRDGNPARIVRGERKSIRIAEPRGDEAAGVDLGINILASAVTSGGAWLLYRGSRAKEDFFYLNKKIAEAQSEADIARNAGDNEEFRRLNRRKRRLSRKLVGRVAHLYWNLANHLVRSLWELGVSKIYLGYPYDIAQDKGNKLTSNMWRYRELMDAIELKAQEYGIRVYEVLEYNTSNHCAIHGVEVTRGPRGVVTCPLGHRLHSDLNGALNILRRGAGSISTTLKKPLSFLVDHGGVAPVKAA

SEQ ID NO: 34789 - protein, 420 aa, Halorubrum sp.
MEVDRTVPVKLDVPDDRRDDLHQTIEQFNHAVNYTVQNGRDESGYFVLNKSKIHDKVYYDLRDETDLPANLCVRAYSKAVEMLKSTVADWKKGNSRPVPQYTQPSAVYDKRTLTIKDRSATLSTVNGRVAVDYVLGDYQKSYLDDDDYEKRMGTLHYREDEDAFYLHIVVRKEVESAESDSVLGVDLNLKNVAVTSTGRFFDGGDLLWGQNHYFRVRRALQHKGTRSAKRTLEGVSGRENRFVLNQLHTISRGVVEEALEHDCGYIAVERLTNIREHMSNRNRQVKRQMHNWAFRLLQEQIEYKAQEYGIELVAVNPAFTSQTCSRCGHQSSTNRDSKTGWFECNDCGQEYDGDYNAAKNIGMRLVTLPEGKRPSGLGHGQLALKSGTLNASGEYTAHRASVRAGVHGQAPSSNASASER

SEQ ID NO: 34790 - protein, 408 aa, Richelia sp.
VRTAYQYKLRPTKQQAQEIDRWLSMLCAQYNFLLADRFNWYEQNRCPIYACPLVCHLPELCDNPDYYSQKKTLPNLKKTHPHYGEIYSQVLQDVVKRVKVTFDRFLSGDSKGKRSGRPRFKPRDRYRTFTYPQMKDGYLQGNLINLPMFGQVKVILHRPIPDGFRIKTASITKKADGYYLTLSLEDATVPTIKPDFNPDSLTGIDVGLKEFLTTSENETVAIPQYYRSSQKRLRVIQKRVSRRKKGSKRRQKAVKQLGRQHKKVADRRKDFHFKTANNLLKKYDVIAVEDLNVKGLARTRLAKSVLDAGWSSFLSILTNKAEKAGLLVIPVKASGTSQDCSNCGVKVPKKLHERWHDCPHCGCSLDRDRNAAINIKNRAVGHSVLKARRLPSNSRIGREAYTDSTSTV

SEQ ID NO: 34791 - protein, 373 aa, Agathobacter sp.
MEKYTMGFKFRIYPNKTQQELINRTLGCCRFVYNHFLAIRRDEWTANHNPVTYNQTSAMLTNLKRHEEYNWLKQVDSMALQESLKNLDTAYQNFFKHQSKYPCFKSKHNHSQSYRTRNQGNGVRIIGRRIKLPKIGTVKIKQSREFEGRILNATVSRNASGKYFVSLCVELDKAMLFKANAGGEVGIDVGLKEFYSDSNGNAVANPKILRRLTRKLVRAQRNLSRKMPKSVNRGKARIRVARVHERIANIRKDFLHKTSTMLVRRNKTIAIEHLQIKNMMKNHKLARAISDVSWSEFFRQLGYKAELYGSEVLKVDTFYPSSQTCSECGYQNTETKNLGIREWDCPQCGAHHDRDTNAAINILHRALEEKQSA

SEQ ID NO: 34792 - protein, 403 aa, Nonomuraea sp.
VSRYRLTPTPAQEVALLEHCGHARFVWNLALEQCSHWRPGRKSAPGFAEQCRQLTEARAEFEWLRAGSQMVQQQALKDFAQAMANFFGGSHRKPTWRKRGRMEGFRIVGQRGAGRHGKWDVRRVSRNVGEVKVPKVGWVRFRWSRAVPEDVKSFRITRDASGRWHVAFAAIPEPISAPGTGDVVGVDRGVVVSAALSTGELLHAPTYRDTEKARLLRLLRKLARAQRGSNRRSKVKAAIAKLKARDTDRRKDWIEKTSTDLARRFDVIAVEDLKIRNMTRSAKGTIDAPGRNVRQKAGLNRGILAAGWGQLVERLEHKAPGRIVKINPAYTSQRCSACGIVDAKSRESQADFRCRSCGYACNADVNAARNIKHAAGHAVSARGGPPLGGPVNREPQHDILPVR

SEQ ID NO: 34793 - protein, 381 aa, unknown
  TnpB Polypeptide
LRANSNPDFFAGLPMQTAQSIVRQAVTDFKAWLEALKAYKKDPSFFTGKPKMPGYCKADKKTFKVTNQDAALYPTKDGKGCLLKLPKMDHNRIPLSYLKDTSNLREIVFKPYYGKYIMTFIIEDMVPPFYPDLPNMAGMDLGTDNIAAIACTDGSSVVYKGGAILSANQFFAKQKASAVSILTKGKKHRHASSAFLSNLSLKHDCFLKDQMHKLSTAIVRYCIAHRIGILVVGTNRLWKQHAYMSKENNQKFVSIPHEKLRWMISYKALIAGIEVIWQEESYTSKADCTAGDLIPVYGKEKTHPVFSGRRIERGLYLCKAGYCINADCNGAANILRKAFPHAWDACKDFQFLSTPASVGFESLNPSSVLNRQKQRAANKKK

SEQ ID NO: 34794 - protein, 380 aa, unknown
  TnpB Polypeptide
MRKTYRYRLYPTKAQAQALEQQLREGCNLYNAALQERRDAWQKTGASIRYTDQSAQLKTIRAEGLNNLANFSCCQDILRRVDKTYQAFFRRVKRGEKAGYPRFKPHQRFDSITFPSYGDGIRLLPSGKLRVQDVGAIKVKLHRPVEGHIKTVTIKREAGKWYVCFSVIAATYRLKFTPKAVGIDVGLESFAVLSDGTVIANPRQYRKAQARLRRAQRKVARRKKGSHRRKKAVRELQAAHAHVRNQRQDFHHKLSHRLVQNYGIIAIEDLNIQGLAGGMLAKSVHDAGWSGFFSKLTYKAESAGRLLLRVDPRGTSQRCSGCSAEGRKALKDRWHHCLSCGFSVSRDLNSANEILRLGLSLVDSTWGISPCVSTEAVCFS

SEQ ID NO: 34795 - protein, 420 aa, unknown
  TnpB Polypeptide
MLKVKVKKVMLSYKFRLYPNKEIEKKLEEQLEICRWLYNRLLEEMNKARKEGRKITQRDTQALIVKLKEENPELKKVYAKVLQMVNYQLWSNMRALSRLKKNRKKIGKLRFKKRERWKSLNFNQSGFSIDVKNNRISLSKMGSVKAKIHREIDGKVKGIWIKKYPSGKWYAIVQIEKEIERKEKTGKVVAIDVGIEKFLVDSDGRAVEYPKFIDKTIERIKRTQKELSRKKKGSKNYEKYRKRLAKLYDKLNNQRRDFLHKLSRYYANNYDGIYVEDLNIWRLVRKGKANTLHRHILDASWGEFMRMLSYKAEGAGKAVVKVSPRNTSKRCARCEAIVDMKLSDRVFRCPVCGWTADRDYNASLNILKAGLGRPAVPVEREPLLQTISYKDVVLGQILSMKQEAPCVSEGWFTWVKCLGV

SEQ ID NO: 34796 - protein, 348 aa, Pseudomonas sp.
MILNYRYRVKSLSGLLNKQARAVNFVWNFCNDTQKHALKWRKRWPSGFDFNNLTNGCSKELGLHSGTINATCEQYAKSRSQKKRPYLRYRGEKSLAWVPLKGRDLKREGCSFRFAGNTFRVFNSRPLPEGNIKDGTNFSRDRRGNWFLNIVIELPDTPARNIEAGVGIDLGLKEFASLSTGEKIENPRHLRNLEESLAKAQRARKRRQVANIHARIANSRRDFLQKLSSRIVREFDYIAVGNVSSARLAKTSMAKSVFDAGWTSFRNMLAYKAVKHGAWFEEVDERFSSQTCSNCGGLPDSRPKGIAGLGIREWTCSGCGVLHDRDTNAALNILRSGRRAPVVGIPVL

SEQ ID NO: 34797 - protein, 385 aa, unknown
  TnpB Polypeptide
MVVQLMYQYRLYPSKKQKVKIINSLKVCKAIYNELLESSVNTYKETKKTLRKFDYNKLIKGKYPVHSQVAQNVSDRVHKAFSNFFRRVKDKSCKQKGFPRFKSRVNSITFPQSGFKILSDKRLHLSKIGNIPIVLHRVPKGKIKTLTIKQNKVSQWFAIFSCEVPDKVIINPSTEKIGIDVGLENFATLSNGEVITNPRHLIQSEARIKLLQRRLSRKKKGSANRRKARFRLAKQHLKVANQRNDFLHKLSSTITQRFAIINVEKLNITSMLKRHWLAKSIGDASWNTFIRNLEYKAVTSGSELVKVNAKNTSKTCSECRTIIKMPLAKRQFSCPNCGFVCHRDLNASINILNGMGGLPKTYTPVETTPLQLSNRLQVLPMNQEL

SEQ ID NO: 34798 - protein, 394 aa, Streptosporangium sp.
VFLESAGMVNRSRNIVWGVARIVKRAFKFRFYPTPGQAEELARTFGCARLVYNKALEERTRAYTLEGRKVSYVQSSAALTEWKRAEELAFLNEVSSVPLQQALRHLQAAFANFFAKRAKYPTFKSRKKSRLSAEYTRSAFTYRDGRITLAKMGGPLRIVWSRPLPEGADPSTVTVSKDAAGRWFVSILCQDTIRPLDPAGGVVGIDAGITSLLTLSRPIPGLTDAAGKIASPRHERADRRRLARAQRALARKDKGSNNRAKAKLTVARAHARITDRRRDHLHKLTTSIVRENQVIAIEDLTVRNMVRNHSLARAISDASWRQMRTMLEYKAAWYGRELVVVDRWFPSSKLCSACGTIQRSMPLNVRDWVCACGAAHDRDVNAARNILAAGLAER

SEQ ID NO: 34799 - protein, 394 aa, unknown
  TnpB Polypeptide
MIKSIKVMLNPNNKQFTKLFQYAGCARFAYNWAINREEENYKQGNKFLSDNDLRKEFTQLKKLQEYKWLNEVSNNVTKQAIKDACNAYKGFFKGQSKFPKFKSRKHSTPSFYQDNVQIKFTENHVKVEGFSMSKKQNKQKLNWIKLCEKKKIPTDCKYMNTRFTYDGLYWYVSVSIEVDDDTDNTFQSNEGIGIDLVIKDLAICSDKNTYKNINKTQRVKKLEKKKRRLQRSVSRKYCKNKKGENYCKTSNIIKREKELLKTSKRLTNIRHNYLHQTTSEIIKRKPSFICIEDLNVSGMMKNRHLSEAIQQQGLYEFRRQIEYKAKWNNIPVIIADRFFPSSKMCSCCGHIKKDLKLSDRIYKCECGNIINRDFQASLNLKKYGENVLNQQSVA

SEQ ID NO: 34800 - protein, 1671 aa, unknown
  TnpB Polypeptide
MNLKKFGRCALGVLVCAVTLATAAFAAGSVKFGIEDGDKLTFAGSDEPIVWNVVLSDKTNTDDESGMLLLADNLMGTAENTTSSVSGLKAAFTACYDKEFSDLQKSATLRVTKKDAPKKLTVLLYGVQPFSVWCDGALNGEVLFALSYEEASLLPMAKLAAESPWWLRTVGDIPYDCYTYVATNGGLSTAGYAPTCSLRPAVNLKKAAFNVHSVAGETPLLLPVDAAESSSTFTAVTNNATAWKLNLPQTDITISSVQTNVASDNSLSYDIRLNAAAGENGGLSFIIVKPDGTVSYYMRKIFETTPQTDLAGTFALPSDVDKENDKMYVFYERSVGKFSGEISELAEICLSHKYEVKDFSDAVHKYICTTCGKSYTEAHDYTVSETSADGHTMVCSVCGGVHTIAHTFKAVQIDNADEHRMVCTVCNYAGDYKEHTYAFEYEDYKHHKRYCTECGAYGYMKHNFDDYVPYEIDTTQWHAHTCVDCGWFSYYKHDIVCTDLGYDEGHERACTECSYKETLAHTFDTTAYPDKHIQICGACRARYELPHIYGGEVTEVDETYHSTTCSVCGYVQKEKHDLVYTALSDGLRHAYACADCTYGGKTALHTFVYDTDYTVPGFKTAHCVCGVTGDTAAAPGKPAEDIAIVRDIIDEYSIRLSAGESTGMNGYQCLFTDKYGGDFLGRSVQDSGSDRYSIRFTFKTKKAFTCTGLWIRLSDISYAVDPYSVILYGRETEESDYVKIGEATLSCFGTEDTNRNGTYLFTGAGLKAYADYRLDLVGSTNAEMKLGNAYLLGLPTSNVNYQLSGVMLAEEEPVSQIAPGDDLSVTLLSQNGHPAKENVTVLENGASFSSFTYSEETGLLVVDGASIGSGKTYTVKATAPSKLVRVTTELDGISFEGASYAAFGTEYTAYFTDSLGDTTYLPYEFTVTIGGKAFDGYEFAQWKGEFSIPGSAITGDIVIKGGETGRANPADAFFSVEREGESIRYYDDADDFYDQINRGSSVITLLKDLVNLSDISNDDGTVVLDLNGHTLTQDTDISFKVPDNSELTVKNGTLRFNDESYGYVSYDGILCLENVTVSRDVSSEDPVFALNGKLYLKDCTFTSEIYVDGFMSVENSTFTSLQLGVGAKGAFYSGTIGELRYDEYENVPTIFDLLAENTALYVENATSETLAALVDKTAFAPAGGIVIKPADGILTSEPQEATVPYNSGETVTLAVKTSGESEYLWYGPDGKIENAGDTLTVGTAGLAQGEYDYTCYVRSGNYLVKTHASVTVECAHETVDENGVCGNCGTLLCIEVTDANGTTKLYGDIEAALDSVQNKSGSTIRLLRDTVFSGNGAFSGSYRELYLSGDNITFDLNGKTFKIENQNSDIYVNGTYIVKNGTLDAPVRFTDFQETGYLTVENVDFLKLFLVDRNRVCLESGKFTYLRMLYGDFADALGEGKAYYFYEDNVWYDGAYKSSLEKVEVLPAPVRIVTQPKEVILGADESGTMALEAVKAAGFEDKEITYQWYETTYEYSLEHGWNGSYIFSSGTKLEGQTASALVFPDTVGENKYYYCEVTVDGYTVKSDIAAYRRGVGSPVLTVGNADNLRYGFFSVDPQGRDCTVVLAGFKNGRYVRMKTIFVDGDTKLYGETLLNLDFDASYFDEVRIFVVESIETFKPLCESASVYKPKN

SEQ ID NO: 34801 - protein, 264 aa, unknown
  TnpB Polypeptide
MKAKTFNKTRLHQLTYAIIRKAHPKLNSSLVTAVRDQASDMLKRLKLKIKPTKKQDSSIRLNHNTFKFFLDSKIASISTINGRQKYAVKIPPYFQKYDFKTSESGRIRTKKRRIFLDIIAEIKTPNKLAVKKIVGIDRGVYHPAVTSDNTFFNSRKLREVKGRYKYLKSCLQRAGTHSAKRHLSKIAGRERRFVADVNHCISKAIVNKDCGTIALEELKTSKMKRKKKTRKKTRSLIGSWSPRQLLGFIQYKAELLWQDSRSCQ

SEQ ID NO: 34802 - protein, 409 aa, unknown
  TnpB Polypeptide
MKRSNVFCLAPTREQHRILQGLAVNCAKLWNEINYLHRQQYENYLRLDWNPQVYKRYVPLVGSATAQQIVRKNNEAWRAFLALKRMERNGKLPSTVKQVKPPGYWKRDGRYVLRVLFRCDSYHIREARVDLPRGLSIPFKGELKWTGKPGRLEVAWDSLSKKWRVFQSIQVKPIITPLGSKTCYIDMGVRNLATVWLTEWRQPIAYQSGRLLADWWYWTNRIARHQQRLISVNGRKKSKQLSRLYRIRKNRFRHAVATFARQLIKDVYAKGVSTIVIGELTGIRSNSNHGRQGNAMVHNYWSHKHVADRLRWTAEEYGIRVRTVSEAYTSQTCPRCRSRHSQRILRGFRCLDCGLEAHRDAVGVLNMAARCGGYAVRPMAWPMLLRWDGCGWNRNNGMPTQAKRIRVEA

SEQ ID NO: 34803 - protein, 387 aa, Ruminococcus sp.
MKKLLKSFKTEINPTPEQKIRIHKTIGTCRYVYNFYLCHNKALYDKGEKFMTGKGFSVWLNNEYIPNNPDKAWIKEVYSKAVKRSIEDGCTAFTRFFKHQSDFPKFKKKGKSDVKMYFVRNNPKDCVCERHRLKLPTLGWVRIKEKGYIPTTKDGYVIKSGTVSIKADRYYVSVLVELPDNKTADNSNEGIGIDLGLKDFATVSNGKTYKNINKSAKLKKLEKQLIREQRSLSRKYENSKKGESTQRANIQKQKLKVQKLHHRIDNIRTDYINKTIAEIVKTKPSYITIEDLNVKGMMKNRHLSKAVASQKFYEFRKKLQAKCNENGIELRVADRWYPSSKICHCCKNIRKDLKLSDRIFKCDCGYIEDRDFNAALNLRDAITYEIA

SEQ ID NO: 34804 - protein, 400 aa, unknown
  TnpB Polypeptide
MYITQRVKRKRTPQLDRLARESGRCYSKVVSFVRKTHAKKDFWMSKGSVQKYMRYREYDLHSQTVQACVDSYFDGLDSYFEVRKSNPDAKPPKRTPRHFKVRWKSGAIRVKDKQLILSNGLGRAPVIIDGIAEKPNYVEMYFSRGHYYFALVYKVDAFDEQQTGITVSVDMGEIHPIVSFDGDRTTIYNGRFLRSIVRYRNKFKAQMQSAMDTCKKRSRKWYRLLKCKRRTLEKLDAQIKDVEHKITSRFISDCQRAKADTIVIGDIKGIRDNAKFSKKSNQKIHQWAFSRIQQKICYKAELVGIKVVFESEAYTSQTCPKCGHRKKPTNRNYRCRKCGFKYHRDGVGAINIFNKVSGVKNTPVSRDVGSPLGVRFNWHLSSLGLTPRNLAISKERLPIL

SEQ ID NO: 34805 - protein, 386 aa, Bacillus sp.
MLLNYKYEIFPTEEQATTLDRWISICRMQYNSALLDKQRIYQNENRNYKRTDMQKQQTSDKKVTQLLKEVPSQPLQEVFFRLEKAFEKFFRKEAKYPKFKKYKDYNSITFTQFGMSRQSSTNKKTGVVKRQLVRRAASLGKGGKLQISAIGLIDIHFHRKLDGKVKQVVIKRQGNRWYAIFSVARHANQPVTSVAHKTIGIDLGIKKFAVLSDGTEINNPKFLRKKEKQLKKAQQKLSKMKKGSSNWKKQCKKLNLIHSKVSNQRKDFLHKVSYRISNTYGVVCVENLQVKNMVKNRHLAKSIHDAGWGLFRSFLAYKCEKNGGLLVKVNPHFTSQDCSGCGNKVNKSLSIRTHVCHKCGLVLDRDFNAAVNIKKVGLEQIRNQVA

SEQ ID NO: 34806 - protein, 401 aa, Bacillus sp.
MTRKSTPTYTIEFPLRIPIWQQDRLEKKLKIARLVYNSCLGEALKRHKAVKANKNYRILINEPKSKIRDKQLSELRLTSGFSEYGMHHFVKSVQQKFKENIGSLEAQKIATRTFEAVEKLHFGKAKRVHFKSFRDDISVENKSNSTGLRYVDGNILWGDKPTKKNPKPKNWICAPITPKANDEYAHIALLDKTKYVRILKREVRGKVRYYAQLILEGYPPKKSNRKVADDETKRVGIDIGTSTIAISSESKVELRELAPECSTIERELRRIQRKMDRSKRSTNPNKFHENGTIRKGRLTWTYSNQYKKLRQKRKELFRKTTIKRKLAHEILANDILHLGSDIRVETMRFQSLQRRAKNTTRNKKNGKINHKKRFGKSIANRAPAMLLAIIDRKLGYQGRTI

SEQ ID NO: 34807 - protein, 443 aa, Methanoculleus sp.
  misc_feature (218)..(278): Xaa can be any naturally occurring amino acid
LSRRRNRPFAYHDTLSPRTAVLYAGGSPTERCMQSVTKLRLFASPGERQMLFATMERYNAACNAASPVAFSERQFSDRGLQARLYRHIRESFGLSAQMTILALRKVAGSYRSTREAIKEQNKVLAALGKPLKVLTELSFQEHGAICYDWPGALPRPKPGERLDTGRPAQTPVYPTSVFPGGRDRQADGSRLPGRRLLALRDRGDPGRRAADPPEYLGXXXXXXXXXXXXXXXXXXXXXXXXXXXXXXXXXXXXXXXXXXXXXXXXXXXXXXXXXXXXXLGVVNIATTSDGATFSSDATEKVRQRYGRLRGFLQKTGTKSAKRRLQKISGREHRFKTDTNHVISKKIVCAAQGTKRGIALEDLTGILLRTHGYEASARATPQVGVPSTPILHRVQGSQGRSPGEDDRRGVRASSAVAAGSSTPTTARPRRRSAAGSAGIPRTPI

SEQ ID NO: 34808 - protein, 416 aa, Halostella sp.
MWYDYRFRAYPDRTGVTAEVERHIDIHRQAYNHTRYEYQALDTDEDNIGSTYQHQKRLTEWKDEWPVFSEVHSKALQKTVERFYTNLSILSEKKQNGHNVGWLKWKSPREYQSMTYSQSGFELKNTSGRHATLWLSKIGNIPIRYHRSIPDTATIKEVTLKKERTGEWYVTFGLEVDNTALPEKPDVDDLDAKDCVGIDLGINNYIYTSDDDSVDWLDLEDEYERLRREQRSHSRKEHGSNNWEKQRRKVAKVKRRIKRKIEDFQHKLTTWLVKEYDAVFVEDLNVTGMLQSEGNARNEQDASWRRFIEMLEYKGDLYGTHVVQVNPAGTTKECAECGIETEKPLWVREHSCPSCGFEADRDENASYNVLFRGLQELGLGQAEVTPVETATAVETDGGRSSSVPASRVIETGSLGA

SEQ ID NO: 34809 - protein, 416 aa, unknown
  TnpB Polypeptide
VILTQSFRARQPRSILDELNKESGRVYTLTMVEHWRAKRKKDIWISQFDAMRINDALSGSTILRSSSRDAAQEGFYKACKTAKALQKAGIDSKYPHRRKMYRTTTWKKDGIRVKNNKLILARSRGLEPIIVDMPEYISSRDLLEVRLIFNKSSNRYDWHIVYDDKLEIPNALGDTVVSVDLGEIHPVATCTLKEAVVFTARELRSTIQGRNKMLSELSEKQEQRKKFSKYWKKIQRAKTKKLAKSKAKQRDICHKVSRAVVDYADEQKANLIVIGDVRYVADGVAFNKNSNQKISQWPHGTMQKYIEYKAKRRGIATKLQNEAYTSRACPKCGNRKKPSGRVYHCPKCQWTGSRDGQVGAANILSKALYGETSRVLVSETKYRHPYLMVGDGGKRSHEGTVQVACSSIGEQEAVGF

SEQ ID NO: 34810 - protein, 483 aa, unknown
  TnpB Polypeptide
  misc_feature (433)..(436): Xaa can be any naturally occurring amino acid
LTGTRTPPAAVTPSAATIHSREFGAHTATRSPRSTPDARRARAAPSTMAPNSAKSMRRSPSITASAWPERRVRSRTMAGMVGQVTSLRTCRWWVGLGVISVLYGRLVGRCRSFRFLLSPTVRQRAVLDALLGSQRELYNAALEERRGAWKWEHRSVTYVDQCRTLTTMREACPEILGSGVTVCRGTLRRLDWAFAGFYRRCRAGQRPGYPRFRSPSRWDSVQWEDRNGWRLDLAGRRLHLMGVGGITVRLHRPMRGVPKAITVRREGRRWWVTLRCVDVPAEPLPPSGKAVGLDLGVTVLVATSDGTLITNHRHTRQAAERLARAQRNLAAKQRGSNRRRLAVEQVAAAHRRVRNQRTDTLHQLSRRLVNGHDMIVHERLALSNLVRRAKPRPDGKGGHAPNGAAAKAGLNRCIHDAGWGQLLAMIAYKAESXXXXPPHPQPNLCPLRTHLGREPARRRLPMPRVCSPSPRGHQRRHQHPPGR

SEQ ID NO: 34811 - protein, 396 aa, unknown
  TnpB Polypeptide
MRAYKTEIKPTEKQIEKIRQTQGVCRFVYNLFIATNQERYKQGLKYTSGYDFSKYLNHAYKEAHPEHKWIWEVSSKAVKQSIMNADRAFKRFFKTKKGYPNFKRKHGHPVSIYCPRNGADAKNVEVQRHRIKVPTLGWVRLKEFGYIPIGVPFSITITSKAGRYYASCLYETDNTVHPQCKGEGLGVDLGLKSFAVVSNGSAYKNINKSMRVKKAKKRFKREQRRFSRKIQMRKKVKSATVTLFDASQMGHTITTSNLDKQRVKVQRAYQRLECIRKDFINKVVSDLVKAKPSYIIIEDLNIQGMMKNRHLARAVLESLFYYFRATLVRKCHEAGIEVRLADRFYPSSKQCSSCGALKWDLRLNDRVYQCPVCGLEIDRDYNASLNLKHCEQYHVA

SEQ ID NO: 34812 - protein, 701 aa, unknown
  TnpB Polypeptide
MAVLRTETFIHELPLRVTPAQERELAVRFDCARQLYNACLDTALKHLKLMHESRAFRKTRVMKRGRERTATFRRLDEKFGFREYDLHAVAIRTKNACHIGDHLDAHVAQKVASRAFAAVREYAFGRRGRPRFRGRRGLHSLEGKSNSTGIRWRDGAIHWMGLVLPALFDPRDRWGVEAHALSCRVKYVRIVRRPLRGRVRYYVQLVLEGTPLRKAKHHVEHGVIGLDLGPSSIACVGKNDAFLEAFCPVVERDERAVRRLRRKMDRSLRAANPDCYDADERVVKRPQRRSKRYRRLQASLAELSRREAAHRKTEHGRLCNRVLALGNIVKTEKISYRAWQRSFGRSVAKRAPGLFVSLLRRKAENADGEVVEFPTRSTKLSQTCLCGRVRKKPLSLRQHDCECGVHAQRDLFSAFLARFVTMNRGEAIVDISQAIDSWRGAEPLLFHVVSTTRNNKRRLGRPLSASFGFSRSRSRSHGEEHLDVGETVDAVAIPTRMSESHGEPASLCPQNPTTSVVGVAQDTVKTHWRRGADEAGLSRGEINKTGGTSARRRARRSRYNITPHNPPRFPHLSTCHRKALQPVRPLLEQLSPLFQILRPDVLCKPKPDCAEVRLCPPCNVDPHPLLRHILKGPSGDGRGIGVLSAVPIRWTWQSSRLHLLQCHGRAPVGWHPSMVFYTVALWICVELQRSGTKMFHKKPRS

SEQ ID NO: 34813 - protein, 418 aa, unknown
  TnpB Polypeptide
MLFDGCTMKVIRTEQMWIGPDDNMSYYCHLSKNLWNEGNYIVEQGLYNNGKWIRHEELNKILNRESGNYKILPSQTANRILYTLDKSWKAYFNVIRDYKINPDKYEEKPKSPKYKKKNGEHILLFTNQQCKIKDGVVKLPKMKYKVETRLSDDIDLREVRIIPKGTGYVCEIVYNKEVDVKELDKNRIVGIDFGISNIVTIVNNIGLKSIIIKDNGTGIKSINQFYNKRRAELNNIYDKQKVKDGYKMRKLEDKRDRKSHDYVHKLSRFIVDLCVEHDIGTIVFGYNEKWKQNVDIGKRNNQNFVFVPYNLIIEKTRCKAEELGIDVVKQEESYTSKCSFLDNESIEHHDEYAGRRFTRSLFRSAKGTIIHSDVNGGYNIVRKAKPEAFNVDGVGGCGLHPVRCKYDSITRRGLEHVV

SEQ ID NO: 34814 - protein, 237 aa, unknown
  TnpB Polypeptide
MLLSHKTTVELNNAQSNIVGHMCYAASKLWNACNYERRNYKTLGLAQYPDWYYQKKVHKDNFWFKQLPAQTSQEVCKLLDGAWKSFYKLQKTQGILNPRPPRFKQKPMSVTLQQMGIVHESGSDTIRLSIARQMKEYLRSAYNIHDNYLFLKNSIFKNMDTIKQIVIYPSVKDKCEVIVVYEIPDTAIMPDNGRYLSIDPGIHNLLTCYDSATGETFIAGRRYLSICRRFDKEIARV

SEQ ID NO: 34815 - protein, 396 aa, unknown
  TnpB Polypeptide
MLARKSVKQGLTPPASVERLMEYFRLMCNDAIRIGLAADASSLKRLSKLTYGELERYEVPSCYKLCAISKAVGILAARKKSIRRGFPTKRPYLSKPLLVSCYGFKIENGSLLVPLGDRRFESIPLNAHTLASISQPSIDVRSFALSTHSLSLCIAREVGEIKAESAVGVDRNLRNVAVGNVEQVIYYDISKAAEIAENTRSIVRSFRRNDVRVRRQLAAKYGRRRQERVRQILNRVSKNIVAEAKAKKQAIAFEDIGGIRKLYRRGNGQSRSFRGRMNSWPFHELKRQVEYKAAWEGVPTIMLSAKETRGTTMDCPRCGERLQAAVRDDARHHRQLWCEGCKRWEDRDLVAVMNISRRGWVRFAQSKGEGGAGEAVKGNPTRTAILRVDASKPRHA

SEQ ID NO: 34816 - protein, 464 aa, Paenibacillus sp.
VETGEVKFVKVVKTLRYKITSHSKIFDKTIEIYNEALGFLINVIDQEFNSIGHLSTKSLVPAVESLIHFTKSNLRPKYGAFDTTFYKFPSYFRRSAISEAFGIVKSHRSNFYNWNLEKEMAVSEGRLFKKNPPRLQFQHKSFPVFYKDNMFERISEKTGKIKVFHKKDWVWIDIDFKTQDLYKRGVWDWKENNPTLVKVGKKYFLNISYQSQVKLKTEKIQNQRICSVDLGLTKSAVCSIMDANGTVLARKFINQPKEKDRFTAIINKLKKSQRESGNGAKPNFWRRINGLQNQIVTDTAHQITKFAHDNGAHVIVFEYLGKMRLPKGVYGAKRLRFKFQYWAKLLLQNKVKQMGHYLGMRFSRVNPKNTSALAFDGSGYVVRSDRKDLCVFTTGKTYHSDLNASYNIAARYFIREIQKSISEKKWLSIQAKVPELAKRTSLTLSSFINLKQALRPVYTVNSLV

SEQ ID NO: 34817 - protein, 355 aa, Clostridiales sp.
MKITLTSKVRILPDEETKDLMIRTMHAYTSACNYVSVHVFSTGVTSKQMLHDELYRDIRSRFALRSQMAESVIRTVAAKYKTLTSSHEPWKLIKFSKPQYDLVWNRDYSLKGDVFSVNTLEGRKKTSFCRPGSSLDGKFGTAKLVHKHGKFYLHIPVTHEVSDVSDDAVANIVGVDRGIRFLATAYDTSGKTTFFSGAQVKAKRAHYKALRKEIQRVRTPSSRRRLKAIGQRENRWMNDVDHCISKALAESYPKGTLFVLEDLTDIRKATERVRLSDRYLSVSWSYYDLEQKLIYKAAMRGQKVINVDPAYTSQTCPKCGRRDKTSRDKRRHLFRCTGCGYTSNDDRIAAIQHGK

SEQ ID NO: 34818 - protein, 465 aa, Dyella sp.
MVPSTATIERAYRVRLRLKPAQERVLLRLFGARRFVWNWAIRRKDEAWRADGTKLNAVALSREFTQLKASPETAWLAELPREPFNQTLRDFDKAWTNFFAGRAKRPRRKTFGTVMSARFTLDQRRELVDRYAGRVQLAGIGKVRFRVSEAMPGRLRSITVSRDAAGRWFGTFTADRVPAPDAGEATAAIGIDLGLKDVAVISDGVSSRKVAAPKHLAAHLRRLRRYQRGYCRQRDAAMVRQGLNPAKRIPKGTRIVVSNRMHRRKAQIGALHAKIGDQRRDHQHQLTSAAVDDAAVIAIEDLNVKAMARGMGRKAFRRGVGDAGLGEIRRQLAYKAKWHGRVIVTVDRFYPSSKTCSECGDIHTGLTLSDRHWTCAGCGTEHDRDINAAKNIRREGLRLLAEGTGPDGRTRRSRGTEAREEDTCAAGRTSPIGQPISLNRELAYRAATPRTTRQRRDGPALRVEG

SEQ ID NO: 34819 - protein, 420 aa, Halorubrum sp.
MNYNYRYRLKPTERQRETLDYHRDTCRQLYNHALYRFNQIPEHEGTVKQRVRKIRDELPDLKDWWDALTDVYSKVLQPTVMRIAKNITALGKLKEQGYTVGELRWKSPREFRSFTYNQSGFELDKKGGQTVLSLSKLADIPIEHHRSLPDDATVKEVTLKQEKTGEWFAIFGIEMDTDPPAKPPLEDVGTDEMVGIDVGILKYAHDTDGTAVESLDLSEERDRLEREQRNLSRKEYESNNWENQRRRVAACHQKIKRKRRDFLHKLSNYYAREYELVAVEDLEVKGMLESPRNSRNTASAAWNTFSDMLETKCEREGTYFAEVGPEGTTKECAQCGVETDKPLWVREHSCPACGFKADRDANAAWNILSRGLTKLGVGYSEGTPVETALPADTAVVSAKHVVETGSPCLKEPPKAVSRQG

SEQ ID NO: 34820 - protein, 348 aa, Sulfobacillus sp.
MQETTVFPYRVSLSPTEWAKASDARRAAGDLWTRLVKIHRFCRRRHWRWPTEAQLKAHFKRRFPLHSQTVQALIEKFCATIDGVRTKRKHGDQHARYPWRFRRYFNPIFKGQALKIVGRQLLLPRGRGRDPIRVPLPEMPDGQVVQAELGFGEIYLTVTREMPDPVPVPSNKAGGLDIGVIHLGMVSDGKEALAISGRGLRSVKQGRAKAHAKLQKKRVRTKPGSRRRQRLNRARQRVSRKANHVTRNALHQAANQIVAFCLATGLTILYAGDLRTLNHKKRHRRSRRTNQEVGVLEFGRLEQYLEYKLRRHGIRLIKISEAYTSQTCPQCGHLTKGAGRTYRCRACG

SEQ ID NO: 34821 - protein, 248 aa, Bacillus sp.
VEDHGEYYIVKCLVDVPENPHTNYSKSDGVIGVDCNLDHFAWANVTKDGNYKGSGSFRFSIMWKSTGQITKIIEAEAIRLVDLAERYNKPIVIEKLDTTQSKTGDQYGNKRANWMKSMFAYEKMTSAILGRAHKIGVAVFQVNPAYTSISGKMKYMRKFGIPIHQSAAFTIGRRGLGYKEKVPQVLQLYITRKDAHHWSHWHQLNNRLDIRTHHFYQLYDVNQPKEALQIKRLDLLESEKKKLEKLFA

SEQ ID NO: 34822 - protein, 608 aa, unknown
  TnpB Polypeptide
MIITIETRLNLDNTQESIIDSCVVLWSTYYRKTWVMWNNKHLEENIIWHKLMDSKLFTSNQVDSLINKVKTEHSKIKELTKTQLKQHESKLDNINKFIAKESKTINSLNKDIVKFKKELIVFKKLNNLEKVKETYLKLSKANNSIKRKQFIINSKSIKINRLNRSINVLQSRITKNTFKLCFGSSQLLKQRPGNHNDKFRLNDNQKPYHNVIDWEKDWDLSRNNIILSIGRKTKPQGNAEIQYYPTTKILRFRVTDKEYMNRLILISKNINISVEELNDNNIIKYGIYRMQARFMEIANVEFCEKNLAKLNQIIATKPITAKIIKKLTPNGKDVGYYLQLSFDEIVMNKIILPTRPKTIGIDLNQNGLAYCIVKADGNKLNKKEVSKINPNHKSHGFISWDLEKKSTEQRQAIISNKIDELLTIAQEYGVYSIAIENLDFSSTMNNMNSGYKAKSSSKGFNYNEMLSSFAKTKFKELLIRKAERLGFTVNLVNPNYSSVGGYTKYGITNKLSVDIAASLWLARQSIYGKEFKQENGVKFKKKYQEDITFPYGIRFKQSNKSKTNKTEWKDVSSALGKDRKLWYKNSIINIEPIVGKEVNQFNPFELIT

SEQ ID NO: 34823 - protein, 437 aa, Thermococcus sp.
MKRSVTVKLQPSKEQEEKLHQLADAGAKVWNRVNYLRRQQFFQGQIVDFNKTEKTVYEEFKKEIGSATVQQIARKNAEAWRSFFTLARKKRNGELPTWLKPKPPNYLKKDGKRKPLIVLRNDQYRIEGSKLILKGLGKFKRLEIQFKGRIHLKGKQGRLEIIYDEVKRKWYAHISFTVEEKLEGEEWVKLPRKPKGNLSAGIDLGVNNLMAVYVENGQSFLVNGRPLKSIDFYWRKRIAEYQSKLNKSGAKTSRRLKRMHEGAKLQAKHYINTAVRGTVQRLYELGVSKIVVGYPKGIAQNPGKGKKQNFILSHVWRFNTVIKRLKEVAEEYGIVVEVVDEAFTSKTCPVCGKPHEGARFVRGLFKCPATGLTFNADLVGAFNILKTVVGTITPNLSGLYAQRRGNWPKTRPEGFEEPSSRVALMRTPQTSPSMARG

SEQ ID NO: 34824 - protein, 287 aa, unknown
  TnpB Polypeptide
MNLTETHQIRPNHKLYSICDELCFKSKNLYNAALFEFRQSFFDKELDTLTWQNINRIFNQSNQFDYRELPSKVSNTVLKKLGNNISSFWSLVKKSDYNEKVRLPKYLHKTDGRFIVEFNKQTFSNKRDENNNLIICKSNLNLKIPTKVEKPQQVRIIPKVGCYVIEVVYEIKENRLKQNQRVAAIDLGLNNLAAVVTNDGDNPILISGRKIKSINQYYNKMTSKKKALLPYNVFTSKSLDRLWLKRNNKISYEIHKVTKFLANYFDERDVSKVVIGNNSGWKNGINL

SEQ ID NO: 34825 - protein, 389 aa, unknown
  TnpB Polypeptide
MKLTINYLTQNNLYSSMLKTHRYRLFPAKSQVRVLERQLELCRFVYNDALAYRKNAWEQEQRTVKRFETQDRLPQLKLSMPELKEVHSLVLQNVIVRVELAFKAFFRRVQSGEEPGYPRFRGRNRYDSITYTQSGFGVDTGKLHLSKIGDIKIKLHRPIEGKIKTCVVRRMPTGKWFACLSVEVKDDRVPPWKDGSAVGIDVGLESFATLSNGEKISNPRFFRAEEKSLAKAQRRLSKAPKGSLERKKALKVVDRVHERISNRRNDFAEQVSHRLVDRFGTVCFEDLNIKGMLHNHCLAKSISDVAWGLLVNKTMSKAAYAGSKVVLVDPRHTSQMCSRCGAIVKKDLSDRIHNCLICGVIIDRDLNAAINILRLGMQSLRKIDRSPAL

SEQ ID NO: 34826 - protein, 351 aa, unknown
  TnpB Polypeptide
MTRSTKYTLKFSTNKKKNLINSLFDLYSKCLQETIDLMWDKKIPQRKWLSTKDVTWLGDLGGQWKQLVYTHASQIVRGCKARKGKKSKPEMKNFSINIDQKMVKVEKSGNSFDKWIRLRLPFIKSGKKVERIEILIPLKDHKHSLKFEDWELCKSIRLSRNSVTLIFEKEVPEIKLDGKILGLDQGFSNLITTSDGQFIGSDFTKIYNKISRKKQGSKAFKRALIERDNEINYLINKELDLYPIKELVVENLKSVKTGINGRFRKTFNNKLQRWSYPKVMSKLERTCEENRVLFTRVDPAYTSQICSICGFRDKDNRKAEKFLCLNCGHSDNSDHTAAINISHMGAYSPHV

SEQ ID NO: 34827 - protein, 430 aa, unknown
  TnpB Polypeptide
LQEVEQVFTLVYEFKLKPTNAQIATFEEWLEQCRKVYNYALCERKHWVNSRKCPVNACSIKSEYIIPANQPAPTYNSQCENLTQAKKNIPALKQVHSQVLQKTLKRLQLAFEGMWRNGRGFPRYRKAGRMRSFVFPSMGKEPIQGNQVKLPKIGLVKFKKSRPIPEDAAIKQARIVKRASGWYVQLTLQWKVDVPFDKLPSTSLRASPEISPTGTSLGIDVGLMHFAAVSNGQTFPNPRPFKRLESKLKSLQKKVSNKRFGSNNRAKAQAKVSRLHERIANTRKNYHWELAHNLCDWADMIFAEQLNLKGLARGMLSKSCLDAGWGQFLDILSQCCFKRGVYFQKVPAAGTSQTCPKCLKETGRKKLSQRVHKCQYCGYECDRDVAAAQVVELRGLKAVGHTVVKLSEGKGSILEDVKLCLPVTEESPRL

SEQ ID NO: 34828 - protein, 428 aa, unknown
  TnpB Polypeptide
MSSYRRYNYRAYPTQGQRDALSCLYGACRYAYNWVIDQREIMRKRHGRMQTYAQLSDMFTLWKKTPGMEWLTQVSSTPLQQSIRHADTSYRNFFRLYRKGKTRIVVNHRTGKKHRTGLPRYKSKRDGEQSAEFTKSARFKIEHVDGCKWGLLTLPKIGRLKIRWTRDLPSIPSTVTIMRHADGTYEVSFTVQTEPETNIPTPTHDACGIDMGLESLMSIVYTDGTREKIPHPHTLRHKARRLRKLDKKMARERKGSHNYAKTRILKAETYGRIRNQRKDMAYKLASKVAVENQAVALETLNVKGLARTRMAKSLLDADWTGILDRIQQLGIQYGRTVTRIDRWYPSSQICSQCGRRDGRKPLSIREWECPQCGARLDRDWNAALNILDAAGLAESLNACGGDVRRKLAQADHNADPFEAGTHRTARLH

SEQ ID NO: 34829 - protein, 397 aa, Methanobrevibacter sp.
MKCVNQGLKVRLYPEEDMMIKINQNIGNSRFTWNKLLECFQETYKLFKIHGYSKLKCNMTTFNTMLNMLKKEHAFLYLSESSSLQQVYRDLINAYNDFFSGECDYPKFKSKKNDKKAFRIQNNSNIKIKPHTIILPKLGEIYYRTSKKYREKLKNVKINSVTIKIENGKYYAVFNIESEISDFPKTHEFVGIDLGMRTLATLDNGLKIANLDVNYEESMIKKYQKRLSKKEYNSNRYKDTLKTYWKWVDKKKNKINDYYHKITTKIVKKYDIIILEDLNIKGMFQNPRYSPKLQKITWKKFVEMIKYKAEIYGKTFRQISRWYPSSKTCSNCGYYNKDLKYETEWKCPQCQKIHDRDINAAKNILKQGVTDLINETMNLWSRGDSTVILLSWESISP

SEQ ID NO: 34830 - protein, 286 aa, unknown
  TnpB Polypeptide
MAEEPGAMRRAFKFRAYPTRPQEGRAVRLLVDHCDLYNAALEERSEAWRMRQVSVTYGMQSAQLKDIRRADPAGQGRHSFTAQQQTLRRLNTVFAAFCARARRGKAGYPRFKLYSRFSQVGFVAGDGAKWSSADARGWARAAFQAVGSVKVGQHRPVLGTVKFLQLKREHRRWYVIVITDTEPTPLPASGRDVGVDVGIARFLTTSDGQITANPKFLAASAGVIADLQRRKERARRASGNRKRLRRALAKEWRKVGNRRRDFHHKTARDLVNTCDVIALENSTLLG

SEQ ID NO: 34831 - protein, 421 aa, unknown
  TnpB Polypeptide
LVTRRVTFRLYPKPSSLKKMHWARRMHKDLYNSAIANRRVQYERYDHSVSYYEQQNSLPAFKEVWPEYKQLGSQALQATLKRVDLAYQSFFKGLRGKPKFKSIRHYSGWSYPASSGWKVHTTGDNGYLELKDLKVSVRMRGKARTWGKPTTCTIVYRQGKWYASISVECAPVRETGDGAVGIDFGTHHAVAMSDGTIIDNPRSQHKAQEKIKKASKQKRRKRAPNFRKKIKASKRWKKASLKVSQIQRQVANQRQDWIHKIASQIVSGNSLIATEELNLKGMTRKAKQGSKRKAQKTGLNRSMLDVGIGELTKAIEYKLQEAGGFLVYVPTKTVKPSQTCPNCGHQKKKDLSERVHYCSECGATYDRDVAAALVMLSWALGTSVLNRGEEIPTSIPRHTGGWKQISSLRRQKLTVQRSNGE

SEQ ID NO: 34832 - protein, 451 aa, unknown
  TnpB Polypeptide
MQQIITAKLKLITTPEQFEALRETSLAYRDALNAVSRYAFEQGKTSNVTRLHKGIYTELRTCYHLPSQLACSVERQVSATYKGLWTRLKKNAEHRRKKITRKRFKGLDKPPTYTSPTVQYTYERDYTFQRDSRVSVGTLNGRTTIPYQGYDEHLALIRQGASIGDARLWYDKTRKTFYLLVSLEIKVPEPECSQLGEVVGVDVGIRYLAVTSTSTGKATFHSGKRVRHQANHSARLRKRLQQKGTRGAKRRLRRIEQRERRFKAQANHQISKQIIRDHPHALIGLEQLTDIRERTKRRKHKRKKNGKGTERVSPKARKANRVYSQWSFAELHALISYKAVLSGSQAIKVDADYTSKACPVCGHTSDENRPHKGLLFVCQNPNCGYRLHADLVGARNITMRTLVLRQDWSTTGHLSIAPDASDNEAKAARRLRYAELRWSLDASLRLRAGGD

SEQ ID NO: 34833 - protein, 547 aa, unknown
  TnpB Polypeptide
MLIQSKYTKIFKSKDLTRQKYDELYDFAVLIRSHKNTVSQYVNGNLLHFLEYNKFQFLKAMRACFKGVIPSSFDAQLYTQVFTCYQNKFDAIQRKLVFETFAFKGFEFYKRDTKNHKKGDLKKVIVEKKQTPLSNCLTYLARYGNENTISYITSNISNCDEKKREFYSNILRCCEKFGFERLYNLALSKRKRIVKNYSEYPIEFKSLSFSGRCRKTRIIDYNSKFGSKINSFVSLSGFSRKSFDIPVTFNKGWHGNMKDYRKKNPDYEYTITFNEKEHQVNIHLCKDGERYIPQPNGNTIGIDVNCKHNLFSLSDETTYDYNRKLVNDFCKLSLEIDKLKEKNKDYKVGKRKQQKLDTLKSKMAMSEQQLISDMCKILQSQGVGHIVMEDLNNGFGKCYVKDKDNSDINYNRKVKFLGLSSLKQEVEHIARKYDIAVSTVHASYTSKMCPVCGCIEDENRPNQETFECIECGYKDNADFNATKNIKNRVCVTVLRTMLLKQLNNGAFEPKKLKREKVKEVLLSFRRNLQETARSECIESRLTTFDYI

SEQ ID NO: 34834 - protein, 372 aa, unknown
  TnpB Polypeptide
MAEKAYKYRIYPNKNQKELIAKTFGCCRFVYNYYLDKRIEMYENDKTTFTYYMCSKDLTQLKKEYEWLKEPDKDSLQKCLKDLDMAYQKFFKEHTGYPKFKSKKNRYQSYRTSYTKTTAGGNIMFLNKHIKLPKLGLVKIRDKQVPQGRILNATISQEPNGHYYCSLCCTDVEFKQLSKTNQNIGIDLGLVNFAILSDGKTIDNLHFFEKSEKKLAKLQRELSRKAIGSNRWNKVRIKVANLQKHISNQRNDFLQKLTTEIIRMYDVIAIEDLDIKSMKETDSIIRNKRIGDVSWSEFRRMLEYKSQWYGKKLSVIDRYYPSSQICHCCGYKDGKKSEDIRSWACPKCNSKLDRDINAAINILNEGLRVINV

SEQ ID NO: 34835 - protein, 408 aa, unknown
  TnpB Polypeptide
MELEEKLIRVERHIIVNSKTLEDLCYKSACLYNYVNYQIRQTFFETGKFIGEYDQTKKLSSEKQIDYKALPAQTSQQIVKVLYQNWNSFFRAVQSYAKNPKLFNARPRIPKYKKGIKGTKSNLVIFTNQQCRIKDGYLRFPKATNIQPIKTNQTQEILAHVRIVPQATCYVIEVAYIKEQNDLNLPEENILSIDLGLGNLATCINNVGSQPFVINGRAIKSINQYYNKTKARLQSIIGVGTSKRIKRITLKRNNKIEDYMHKTSRHIIEYCVENKIGTIVIGKNDGWKQNITLGSRTNQNFVNIPFIKLINQITYKAEDLGISVMLTEESYTSKIDHFALEEMKHQDTYLGKRVKRGLFQSSANVLLNADINGAIGIGRKVVGDVFVFTLQSLLNRGVAFTPIRINIT

SEQ ID NO: 34836 - protein, 387 aa, Rubrobacteraceae sp.
MKLRKAYRFRMRPTKTQEVGLYRMAGARRFIYNWALSRRKSYYAEHGKGISARELSSELTALKSKPETLWLKEADSQMLQQALRDVDRAFEALFKRRSRFPRLRSKKAGHFTFRIPQRVRVEDGRVYVPKVGWVRIRQSRGVEGTTKSATFKRDATGHWYVALTTEFEIPDVEPPAPVNPVGVDLGLKDLFVLSDGERVRAPRFARTAERRLGRVQKDLSRKKPGSRRREKAKRRVAGVHRKVSNQRSDFLHKLTTDLTREYDCICHEDLNTKGLAKTKLSRSVLDAAFGEFVRQVEYKATWSFKHSVRVGRFFPSAKLCSECGKVNVNMTLSDRMWLCECGTQHDRDLNAARNILAEGMRLLAAGQTESQNARGEPVSLPRGSTAR

SEQ ID NO: 34837 - protein, 394 aa, unknown
  TnpB Polypeptide
MKAYKTEIYPTKAQIELIHKTFGCTRYIYNQFVHHNLNNLKLGLPFTSAYDYSKQVNHDPNTPKWLKEVPSKAVKQALIYADQAFQDYFKKRKGLPKFKTKRSHNSFYLIGTLKVERHRVFVPVLKWLRLKEFGYIPQNIRSVTISIKNNRYYISCLTNETSTDKLIPLSNYNMGIDFGLKDQFITEHQVIPSVNKTIRVKKLEKQLRRAQRALSRKYEANIANKVYYQTGIKKGQLKSYKWVKPLTECKNIQKQKLKVARIYERLARIRTDYNQKALRTLILERKPSSITIEDLATRNLMKNRHLSKAISQAQWYQSRLYLKQLCDKYGIELRLVDQFYPSSKLCSNCGFKNKDLKLHERVWTCDECGSTHDRDINAAINLGKSTTYTVLTAV

SEQ ID NO: 34838 - protein, 369 aa, unknown
  TnpB Polypeptide
MTVRQKTYKFRLYPNNEQKIQFTKTFGCARAIWNMMLADKIKHYQETGQSLNNTPAQYKKDFPWLKEVDSLALANVQLNLQKAYKSFFQSGFGFPKFKSKRHKQSYRTNNQKGTIAVENGKVKLPKIGWIRLKQHREMVGVIKSATISMTRTGKYYISILCETEIHPLPKTNSNVGIDLGLSHFAILSTGEKIGNEQFLKKFSKKLAKEQKILSRRALVAKQSGKNLSESMNYQKQRIKVAKIHEKIANKRRDFLNKLSTEIIKNHDIICIEDLSSKNLMKNHHLAKAIGDVSWSEFVRMLEYKAEWYEKQVSKISRWYPSSQICSDCGDNSGKKALHIREWTCENCGSHHDRDINASINILHEGLRLA

SEQ ID NO: 34839 - protein, 227 aa, unknown
  TnpB Polypeptide
VIQGQIKTCTIKRELNNWYVCFSCEGEPKYLPKTNKSVGVDVGLEKFATLSDGTMVENPRYLRQSEAKLKREQRKLSRTKKGSNSRKKQKTKLAKMHLKIKNQRNDFLHKESRNLVNNYDTIAFEDLKIKNMVKNHHLAKSISDASWSKFIGYTSYKAESAGRKVIFVNPRNTSQTCSGCGVIVKKSLSVRVHKCPHCGLVLDRDINAAINILRAGTAPGGATAVAG

SEQ ID NO: 34840 - protein, 221 aa, unknown
  TnpB Polypeptide
MPIKPSKEIDFSQFKICESRLYKFRDDFFVNITIQKEVNTKSSYSSILFIDLGEKVIAASVVLVNQRPQFYGREVRGIRRKYSYIRKNLGKRKLLKEIKRFGQKEQRTINNILHNISKQIVEEAEKTDSVIVLGDLKGIRNNSKGKKFNRIVSNMPYLKLTQFIEYKANWNGIKVIKISERGTSHTCSMCGSKGIRPYQGLFKCNKCGYQVNADYNASKNI

SEQ ID NO: 34841 - protein, 399 aa, unknown
  TnpB Polypeptide
MLIFEYKLDGSKKQYAALDEAIRIGQFIRNKCLRVWMDERGISKNDLQCYCAVLAKDYPFASCLNSQARQASAERAWFAIARFYDNCKAHKPGKKGYPRFQHDNRSIEYKETGWKLEPDGKHITLTDGCGIGRLRLVGNPKQKIAAFPAEQIKRVRIVHRADGYYVQFAVKAERAIVHQPTGKQVGIDVGLKAYYTDSEGNTVDNPRHYRKAEQKLKRLQRAVSRKQKKSSNRKKARKQLARVHLHVQRQREDFARKTASTLISSHDVIAFEDLKIRNMVKNHHLAKSIHDAGWGTFISWVKAYGLMHNISVIAVAPQFTSQQCSACDAMVKKSLSVRTHICTSCGVVLDRDHNAALNILEKALACTLGHRETSASAENASGQTASTRTSKRTTGKRAG

SEQ ID NO: 34842 - protein, 355 aa, unknown
  TnpB Polypeptide
MTKVKKGVKVRLYPTEEQEILIDKTIGCCRFVHNQTLADCKQSYEQTQHFPSKNERITNLVSLKEEKEFLKEVDAKALQQSVRDLNSAFDNFFKNRNHFGFPKFKTKHNQKQSYRTPWDNGCADVLDNKHIKLPKLGKVKTKHFDMPAVYKIFSITVEKTPTGKYYASICIETEVQPLPKTGKQVGFDLGLIELLIGSDGTRYERPKFAYAFKDKLAKEQRKLSKMRTKLERANLNLDECKNYQKQKHKVAKLYEHIANCAKDFNHKLSRRLVEEYDFLSFEDLTVSDLVKNHKLAYSINDVRWSQLLNFIQYKCLWYGKEFKQVDRFYASSKTCSCCGTYHKDIVNSLKVREWI

SEQ ID NO: 34843 - protein, 519 aa, Microcoleaceae sp.
MRSPKSDCTADQSDKLRQEQGRRCMSKRTLRPFDPSSKGSGRRSAQDGAPRAGIANSWLHPLLSLFSRDTIILEFVKIMSQIITAKLKLNLTTEQKALVSQTALAYRDALNYTSQVAFDAGKTSNGAKLQKAVYNELRVRFGLGAQMACNVPRQVSGTYKTLWTKVKQSNDAIAKGYTKRRYKGLDKAPKYISRTCTLNYQRDYSFKTEQQVSLITLQGRIVVPYDGYNKHLDLIANGARIGAAKIVYQRSSKVYYLMVSIEVETPVVDPLKITRVSGVDVGMRYLAVETDLKNKSKFYSGKEARHKANRYHKARQTLQRKDTRSAKRRLIALSGRERRFIVDVNHQISKEIAKPNSLIGLENLTGIRDRTKSISGKKGSKKQRRANRNKAKWSFAELHGYIDYKANLNGSLATKVPAHYTSKSCPKCGHTSDANRPNKGLLFRCECCGHELHADLVGARNVAMRTLLVRQDWASTGSLSVSPDVSSGETKAEVLQRFSELRWSLDTSPHHSGTPLDGG

SEQ ID NO: 34844 - protein, 209 aa, unknown
  TnpB Polypeptide
MSRLLKSYKTEINPMPEQKTKINKTIGTCRYMYNFYIAHNKELYYKGIGIDLGIKDLAVVSDGTKYKNINKSYKVKRLEKQLKRQQRSLSRKYENLKKLKKGEATQKANIRKQMLKVQRLYHRIDNIRTDYINKTVLKIVKTKPSYITIEDLNVKGMMKNRHLSKVVAGRKFYEFRVKLKKKCDENSIELRVVDRFYPSSKLCNCCGFI

SEQ ID NO: 34845 - protein, 444 aa, unknown
  TnpB Polypeptide
MKLTSSYAIQLNGDLKALENSIAIYRNALRFVIPIANTHWDEIKPFKYANQRMMYVEKLIHSTKTNQALFDFDEQFPKLPTYLRRSAIAKALGIVSSYRSNLENWEKNPKGAQPKLSLTHFAYPAYYKGNLFRNFDPTNQTIELKVFKNGDWVYDVYQLKTSDCRYYQTYLSGKKQNVPIIQKKGRRFYAAFSYEEETSLISEESIGKICAVDLGLGTGATCSIMDKDGTVYARKFISFSKEHDRLHTQLGRIKRNQKRGSRHNKTLWCKVAGISQDIADKTAKAILAFGNDHGVDAFVLEHLDFKGKNAVKRAHFWRYKRIYKVLCHKAHQHGLRVARVNARNTSRLAFDGSGWSKRGFEITPDTPYALMQFTTGKIYNADLNASYNIGARYFIKHLLKTVTVTQRLALEAKVPQVAKRSTCTLSHLINLRSELAVLTARTQA

SEQ ID NO: 34846 - protein, 319 aa, unknown
  TnpB Polypeptide
MKIQLTQQIIINNKHRWYSMLDKLCFKSKNLYNCALYQIRQHYKNTNKYLSYYELNALLSKANQVDYRSLPYAQCSQQILRQIDKQYISFYNTLKSPKMKGKRIRLPKYKDKENGRNIVIYTNQCFKLKNNVLSLKIDDKNKIDIDTNLNVQIVRIIYRGNHIVIELIYNKEYKLKSDNGQYAAIDLGLNNLATLTSNVCQSVIYDGKKLKNINHFYNKRKALLQSKLNGKRQTSNRIRRINYRRNNKIKDYMHKVSHLIVAYMETNNLNTLFVGKNTGWKEGINIGKTNNQNFVTIPYNLLISMLDYKCKLAGIKMVD

SEQ ID NO: 34847 - protein, 395 aa, unknown
  TnpB Polypeptide
MRFRLAPTAAQDALLRTHCGQARFLWNLCLEQWRLWQPGKQAPRYAQLNRQLTDLRAAEPWIASGSVTVQQQVLRDFDQAKRNVFGGTHCRPTWRKKDQDEGFRIVAVRPEHVRRLNRRWSAVFVPKIGWVRFRQTRAVPDSVKSYRVTRDPSGRWHIAFARIPAAIDGPGTGEVVGLDRGVVVSVMTSEGEAFQTPSLRPKETERLLRLRRRLATAQRGSNRRQRLKRSVARLRAHETDRRKDWVEQTTTSLARRYDVLTVENLNVGAMTRSARGTLEAPGRNVAQKAGLNRNILAQGWGLFLARLEHKARGRVRRVDPKHTSQRCSACGHVAPESRESQAAFRCVACGFACNADLNAARTIAAGHAVTARGALGKSSLAVNREPQRRAASLVA

SEQ ID NO: 34848 - protein, 507 aa, unknown
  TnpB Polypeptide
VQLRWNFKLRPSQTQVELMSDWLITLRKHRNYALREREQGYNTSNKDAESSITYGWGSFCDIETKVEYGSCCPLTCPILKHGVVPAQLGLAVKTSKKTGTQRWDSASGIQMKVTTTLRHERQNFALINSDVLQRNIARLDDAFTNFWQHQKGFPRYYRVLNSFEYKPDQVKIVDVRENYATVYLPGIGNVRMHNSRDLTQIQDVRTVTVSRKASNWYVSMLIDLPLDLPEVKPIEKSKSVVGIDVGINKLVALSDGSFVENIHPATNSKTVRRLAMRQRAASRKQNGSQNKRKAYDRIGKMQHKISQQREGYLWQAASLVVKTADVIAREDLNIRNMVKRAKPKHDSNGGYLKNGAAAKAGLNKQILDASWGTLFGMIAWIAAKVGKPVIAVNPKHSSQECPQCHHIDKSNRDGEKFLCVECGYTEHADTKASRTIVKRVGLIFPKKIKKILPRDSRKVTPVKLSAPECVESRNHAYEMSNIQLTLFDVSEYSLSDSRISKRYGRKS

SEQ ID NO: 34849 - protein, 553 aa, unknown
  TnpB Polypeptide
MAQQKSKGQLVGIEAKIEYSTVLDDLGFFYESYRRTALNWLQSGKTETEVKKQLHAQMNLPWAWADAIALEAKQTYDQLQTAKDNQIALLKERIKAKTKHAKQTVKDLEKKFKSATKKGMTPKAYQRFENELKGVKSKLCQIKELKQRLVDLEETERLHICFGSRKLFNAQHHLEANGYSSHAEWLESWQLARSGRFFCVGKSQYGGGTAIKIFATDSLLIYRCEISLPYNLREDYGNIVSLNFSVDNREGRSRKADLDYALEQQKPITVQVFRREHKDEQWYIHLSTYVPEVPIVHAIKNGSIGIDFNRDSIALVIVKPDGNITSHLSILYEWKDLTTGQREARMRDIVKDIVQIAEAHGCAIAIEALDFTKKKAKMSEESKAYNEMLSNLATGLFRECLESRCKRYGVQIIKVNPAFTSVIGMIKFMARYGLTSGTAAAMCIARRAMHHSERLPKWLQRPEDLRSRSPWHGWNALSRYMRHNSIRRHQLFEPTKALEGYLRLAESGGKPSEVGKRKMNSPSLPVAARVVDTIIAQSPMGRDYQQLSLFDSY

SEQ ID NO: 34850 - protein, 485 aa, Streptomyces sp.
VKKFRPQPGFVVQAYRFALDPNAFQEAALRSHCGAARAAYNWAVGWVTASWWQRKAEESYGVPAEALTDWRPWSLPALRKAFNEAKHTDPRFAGWWQENSKEAYSTGLANAAAAFDNYAKSKQGKRRGKRMGAPRFKSKRKARPACRFTTGTIRVDGDGRHVTLPRLGTIRTHEPTAGLHARIQAGTARVLSATVRHERGRWFVSFQAEVKQDIRRVARPGVVVGIDLGVKTLAVMADSTGEIRTVANPGHYDAARKRLRRASRTVARRQGPDRRTGRKPSKRWERANDIRNRVHHRVANLRENALHKLTTAVAAEFGTVVVEDLNVAGMLRNRRLARRIADAGFDEIRRQLDYRTGRRHATRLVVADRWYPSSKTCSGCGAVKAKLPLHVRTYECDACHLVIDRDDNAALNLAALAAACTTGTGVAGDQDTAPAASKPRGADQKTRATTRSRKATGGRAGGATLPHQRQQETRDRTQTEAPTLW

SEQ ID NO: 34851 - protein, 405 aa, Streptomyces sp.
VIGVLLRYSFRLYPSVGQCESLARAFGCARVVYNDALRARETARGKGMPFPKTGELSKTLITEAKKIPVRAWLGEVSAVVLQQSLRDLDAAYRNFFDGLKGKRPRMGAPRYKSKRDTRQAVRFTANAHWKITAGGKLRLPKVGDVKVKWSRVLPSTPSTVTVVKDSAGRYFVSFVVDTGPEEALPQVPGQVGIDLGLGHFAVLSDGTKIDSPRFLRRAEKRLKKAQRDLSRREKGSGNGDKARIKVARAHARVADARREFHHRLSTKLIRENQAVAVEDLAVKGLARTRLAKSVHDAGWSAFVGMLEYKAARYGRTFTRIGRFEPTSQVCSQCGVKGGPQPLHVRVWTCGACGAVLDRDINAAVNIAKAAGLAVTACRAQVRRAPVPAPRGEAGTHPTPQPSTAR

SEQ ID NO: 34852 - protein, 365 aa, Trichococcus sp.
MILTKKVRLILTDELSKLYQSAGVARWAYNYTLRMQEMNHRFGGKFISDNDLRKHITKMKKRKKYAWLNEVSNNVVKQAVKDACAAFKAFFNGQAKHPRFKTKRRTTPSFYNDCVKLKVKGNLVLLEKIGWVKTNEPLPMGCKYYNPRIKFDGKYWYLTVGVEVTPEKVELDNRSVGVDVGIKELAVTSDDVFYENINKTASVRKAEKRLKRLQRRASKKYKKGTPKSKNLLKLEGEIRKQHRRLANIRTNHVHQATAEIVKSKPSRIVMEMLNISGMMKNKHLAKAIANQKLYFFKQCLQYKCERYGIDFVEADKWYPSSKLCNNCGTLKKDLKLRDRVYHCTCGHHCDRDLNASYNLRDYQAV

SEQ ID NO: 34853 - protein, 394 aa, Nocardia sp.
VVGGSAEFDQLGFEVLADPSHDFFHPRQMRCGEHRALIFSGENQMDMHYVNHVPTCAKAGIDAHETKCRVCWVKANTAHKFRLYPTQDQADRLTGWSDTCRAVSNTALAQRVWAYHSAQRVTLRAVDQCPELTQARREYDWLADLPAQCAQQVLRRLDTAYDNFWNRDHPAGLPQFKKKRDRQSICFPGQAIEVRKVSRRSAQVKLPKIGWVRFRLSRPIDGIVRNATISRDGFGWHISFGVHQPAPVAPPVNTGPPIGIDVGIACSVFCSADDTARQRPATATVGEQRRLRGLERRRARQLTYAKRHAGGEVFEQTPPHERGNRRIEGAASPTSTGLEPQAHDRPGPKPRPDRYRRLEGFQHGPVGERHCHATRLEGTPKGRSQPIHRRSGVV

SEQ ID NO: 34854 - protein, 286 aa, Nocardia sp.
MLANGRAKILYATVSFRVGRWQLSVTVEATDLHPVLQHPPRAADDDTGWAGVDRGLSNFLVAADGIEVARIDHPPKPLATGLRRQRRLAKSLSRKKKGSRNRQQAAARLARHHCRVANIRRHFLHQVTNMLVKTHDRLVLEDLNVVGLLGNHCLARAIGDAGWAEFARILRYKQQWRGGTVVTADRWHPSSRRCSTCGQVNPELTLSDRVFFCGCGFRADRDHNAAVDVAVWPMLRCEDSPRSPDPQAGGRVTNARRREGADRHPVGAGETSPDDAGTDVHTTAVA

SEQ ID NO: 34855 - protein, 412 aa, unknown
  TnpB Polypeptide
MVKTVKLKLLATPQQSDQLMQVSLLYRDVCQYVSNWIFENGFILNFMTLQKELYHEIREKFPLNSQMTISALKTTTARYKTVKEQLFQNPFKYMDGKDKDGNDIWHYIPKTLEWLWKPIHFSAPQCDQVRNRNYRLLQDGRISLTTLQGTVKVAYQAPSCWQKRLDDVWTIGTAKLVYQRKHWYLCIPMEIATEEVPRENIQRIVGIDRGLNFIIATADSEGKSSFKSGRQAMHIRHKFSNLRKRLQVHNTHGSRRKIKAIEHRENRWMSDVNHQISKALVEQYGPNTLFVLEDLTGVSFEEKNLRGFKQDRQDKRTWAFYQFEQFLTYKAEAVGSKVIKVSAKYTSQRCPRCGVIDKSQRDHKAHEYRCHCGYRTNDDRVGALNLLELGRRYIAGEDKPKFKKTKNISIAR

SEQ ID NO: 34856 - protein, 350 aa, unknown
  TnpB Polypeptide
MARGRGENRREESKEYVTIKGKIIFPDKTSEAKVLFTMRLFRDVVKKAIVFLKSSLSEAEVKRRLTKFINNAWYSSSAIKKAKTYLKQKRAKLKKPLLFSLGCKGIEKGNRNIRLIDTDKVLVKIPHANGKHEWIKCNVKFGKKYIPLIKELLTGEIAYSSTVVLSNGKYYFHVTIPLNLYAKHTGKSFVKKNASYVAGFDINPDRINMVIINEAGDIIDIRNEHFHDLIQHGYPKNKAREIRLSALSKLIDYAVNHNVKYFIFEKITNIKPDKNRKANRRIGKFAYRQLLQHAEIMVKKRDGAFKTISPAYTSIDAVPLARKFGLDRHTASAYLMAIRGLLFLKNHKNT

SEQ ID NO: 34857 - protein, 364 aa, unknown
  TnpB Polypeptide
MKSVATIKLKIPSNKQLLDMSSTFLQAVQYAIDKGFKAKISNRFKLHHLVYRDLRKLLPADFACEAIAKASENLKSTKLKKKPIIKSCPISFNRNLFTFSFEKVRIATFVKGKRQNVPIEIPEYYWKYLDWRYQTLEIIKDRKGRLFFHITFSRDINTPISCGNRIMGVDVGINNLAVTSEGVFFKTPKTQIRKFHYLRKRLQSKGTKSAKRLLRKLSGRQKRFMRHYNHVVSKSIVSNADTILMENLKGIRKVTKGKRFNRWLNNWSFYQLQSFVKYKAEREGKIVKFVKPYMTSQTCSSCGLVGSRYYDSFSCLHCGFSCDSDLNASFNLRRLNVTQPNVSDDEGKGQLTTAVDIRDKSPHL

SEQ ID NO: 34858 - protein, 371 aa, unknown
  TnpB Polypeptide
MILAKKIRLKPNKNQEILLWQSVGTARFIYNWTLARQKENYENGGKFLSDNELRKEITQLKKIELSWLNNVSNNVAKQAVKDACNSYKSFFKKQTRFPKFKNRKKSKPSFYNDTNKLKVKENLVLIEKVGWIKTAEQLPMNTKYTNPRISFDGKYWYISVGIERENNALELREVSLGIDLGVKDLATCSDGKVYKNINKKKTIKKLQKKLKRFQKQVSRKYEKSREVNNRYEKSRNIVKLEKKIRLVHRRISNIRNNNLHQITNEIVKTKPSRIVMEDLNVKGMMKNRYLSKAIAEQSFYKFITYIKYKAEFNGIEFIQVPRFYPSSKTCSKCGTVKKDLKLSDRVFKCECGYILDRDLNASLNLANYKIS

SEQ ID NO: 34859 - protein, 383 aa, unknown
  TnpB Polypeptide
MIKGFKVQILPNEHQQQEIIKFCNAARFAYNWSIATEKENYENGGKFISGYTLTTMFTEFKHKPENSWLKEISGRATKVAILNAATAFENFFKKRADFPKFKSKKYSKMKCATNEGRIKFDSNKVRLEKLGWVKLAQKNRIPIGENIKYFNPKIEYDKINFWVSVSVEIIDNQDNDKPKTEAIGIDLGIKTLATCSNGIINQKPNIKKEKKKLKRLQRKASRQYQKMIKKSKETKIKFQYLPKSKNLLKLEKEVNKIYQRITNVLTTNIHTFTTSLIKLNPEAIVIEDLNIKGMMKNKHLSRSIAEAKFYEIRTQLEYKCKWNNINLIIADRWFASSKICSECGNKKDKLSLSERIYICKECGSILDRDLNASINLKNLAYAT

SEQ ID NO: 34860 - protein, 554 aa, Sphaerisporangium sp.
  misc_feature (177)..(204): Xaa can be any naturally occurring amino acid
  misc_feature (460)..(521): Xaa can be any naturally occurring amino acid
LEAGFTSGASRRERTAPIWSPGFSAVFAHSCEYSWAGWHTVAVLLRYSFRIDPTPGQRVALARAFGCARVVFNDALAIRNQAYEQGLPFVTDAELSVRVITVAKKTPQRAWLGEVSAVVLQQRWPTAPWRFAPSSPRSAASARAPGWALPGSGRARITGRRSGSPATPALRSPGRGXXXXXXXXXXXXXXXXXXXXXXXXXXXXVTRAGRLRLPKIGDVPVRWSRELPAAPSSVTVIKDAAGRYHASFVVEVTAEPLPAVDAETGIDLGLGHFAVLADGRKIDSPRFLRRAEKNLNKLQKALSRTQKGSNNRAKVRTKVARAHARVADARREFHHQQSTRIVRENQAIYVEDLAVKGLARTRLAKSVHDAGWSSFVAMLEYKAKLYGRTFARIDRWFPSSKLCSGCGAIATSMPLQVREWVCVCGAVHDRDVNAAVNILAAGRAERLNASHTRGRHGPDXXXXXXXXXXXXXXXXXXXXXXXXXXXXXXXXXXXXXXXXXXXXXXXXXXXXXXXXXXXXXXRGRHGPDRAGGGRVRPPLAVVPADEAGSHRGAA

SEQ ID NO: 34861 - protein, 426 aa, Thermosynechococcus sp.
MQRFQAYRYELMPTGEQQRKMRRFAGSCRFVYNKALALQKARYEQGEKKLGYAGLCKLLTEWRNSSDTAWLADAPVHPLQQALKDLERAYNNFFAKRASFPRFKRKGQSDSFRYPDPKQIKLDQANSRLFLPKLGWLRYRNSREVLGAVKNITVSQSCGKWFVSIQTEREVEPPIPQGGVVGIDMGIARFATLSDGTFYAPLNSFKRHESRLRKAQQALSRKVKFSNNWKKAKARVQRIHARISHARRDFLHKISTAISKNHAVVCVEDLQIRNMSKSAAGTTEQPGRNVRAKAGLNKSILDQGWFEFCRQLDYKLAWRGGWLVVVPPQNTSRTCPCCGHVSADNRQTQDRFACVECGFEANADLVGAINILSRGMQKLRDEGRDTLDAFSGTAQAVSPDGLWIEPHWRSEAGTHRSESGAAQCRA

SEQ ID NO: 34862 - protein, 349 aa, Escherichia sp.
VKRLQAFKFQLRPGGQQEREMRRFAGACRFVFNRALARQNENHEAGNKYIPYGKMASWLVEWKNATETQWLKDSPSQPLQQSLKGLERAYKNFFQKRAAFPRFKKRGQNDAFRYPQGVKLDQENSRIFLPKLGWMRYRNSRQVTGVVKNVTVSQSCGKWYISIQTESEVSTPVHPSASMVGLDAGVAKLATLSDGTVFEPVNSFQKNQKTPARLQRQLSRKVKFSNNWQKQKRKIQRLHSCIANIRRDYLHKVTTTVSKNHAMIVIEDLKVSNMSKSAAGTVSQPGRNVRAKSGLNRSILDQGWYEMRRQLEYKQLWSGGQVLAVPPAYTSQRCACCGHTAKENRLSQK

SEQ ID NO: 34863 - protein, 401 aa, unknown
  TnpB Polypeptide
VQVRLAYKFLLRPTRNQVAALEACLEDTRQLYNAALEERREAWRKGHSVTFRSQYAQLKDIRKADQERYGRWAFKCEQAVLRRLDRAFQAFFRRCKAGEKPGYPRFKGRGWWDSIEWAEHGNGCKWDSVLHPKVTRVYFKGIGHVRVHQHRAVRGRIKTVTAKREGNRWYVILSCDDVPAAPLEPTGAVIGIDMGIASFLTTSDGKHVPNPRPLAVAADRLTEAQQSLARKKRSSNRRRKAVRKVAALHWKVRRTRLDHAHKTALALVRDADVIVHEELKVANMAKRPKPRPDPERPDTYEPNGAAAKAGLNRSILDAGWGCFLGILHAKAESAGRVVLEVDPRHTSQRCSRVSCGHVAAGNRTSQAVFKCVKCGHEAHADVNAAINILRAGLVLQAAEAS

SEQ ID NO: 34864 - protein, 143 aa, Salmonella sp.
MAKSKTPLDVRWPRPLPSTPSTVTISKDVARRYVVSSLCEFEPVSMPITASTVGIDVSLKDLFVTDTGFKSGNPRHTAKYAARLTLLQRRLSKKAKGSKNRAKARLKVARLHAKIADCRMDALHKATRKLINENQVVCVESSR

SEQ ID NO: 34865 - protein, 132 aa, Salmonella sp.
MKCAYKYRFYPTSDQVELLAQTFGCVRFVYNSIIRWRTDAYYERQEKNGYTQASARLTALKKVPEFAWLNDVSCVPLQQSLRHQQAAFSNFFTGRAAYPAFKSKCHKQAAELTASAFKYRDGSCIWQRVKHR

SEQ ID NO: 34866 - protein, 240 aa, unknown
  TnpB Polypeptide
MLEKKHDKYFLRFTYAEEVALNRTPVKEQTICSVDLGINTDAVCTIMRPDGTILGRKFINFPSDKDRMYRVLGRIRRFQREHGSRQVQGRWAYAKRLNTELGKKIAREIVFYASENRADVIVFEYLEMKGKLSGKKKQKLQMWRKRDIQKRCGQQAHRKGIRISRICAWNTSRLAFDGSGEIARDIRDHRLCTFQTGKRYNCDLSASYNIGARYFIREILKPLPANGKVFAGGKSSCSKA

SEQ ID NO: 34867 - protein, 382 aa, Edwardsiella sp.
MRGYVSCSPSGATTRKRLGWPMRLFIPCSRHSRIWSGPTPTSSPSGRTSRVSRRKVSPTASAIPIRSKSSSIRPTTVCSCLNLAGWLRYRNSRDVLGTVKNITVSQSCGKWFVSIQTEREVAQSVPQSTSAIGIDMGVARFATLSDGTFYAPLNSFKRHEKALRRAQQAMSRKAKFSNNWKKAKTRVQKIHSRIGNVHRDFLHKVSSTISKNHAMVCIKDLQVRNMSKSAVGTADAPGRNVRAKSGLNKSILDQGWFEFRRQLDYKLAWNGGWLVTVPPQNTSRTCPCCGHVSADNRKTQVQFLCVECGFEENADLVGAINVLRAGHARLACKVSGAVMPPAAGTHRSGHVWLNATPERRRNLWPSGRGGCQQVLVVQWIMC

SEQ ID NO: 34868 - protein, 271 aa, unknown
  TnpB Polypeptide
MLYNAAFFNLLARNGQVEVCKSRRHSDGEKCFGSDDWFIVMAILPTGQVSNHYESKYWDLFDVPERETAFEYDGHTPNEAADRLKKYLKLPRRGMTFEQALERLSNAKKGSNNRRRRLFELQQTYRKINNLRSDFQWKLAHDLCKQYDYIFIEDLNIEGMKRLWGKKVSDLSHSSFIDKLMYISSKYGVTIHKIDKWYPSSKTCECGCINKGLSLRDRTWVCPSCGAVNDRDVLAARNILRKGISELESMGNSSDSNIGVSCVCIQESHSL

SEQ ID NO: 34869 - protein, 505 aa, Sulfobacillus sp.
VKKTLRLGIPKDIHAIKRQAIADTQELYNRVIRFYMEFFVTHLGIFEEKVPYTKKNGLPAERHWTAQELLTFAERHTLSTGAHPEPLMPLISAMPQAEGMPTGLRRAAINHASGKVKGWHILHKQWEHGGKKGGEPQLGAPHEPVTFYADMVEYPDVDLLPQVKVQQVFIAVTLWMAGAWRKVPLPITLPSYAHDALLAAEAERQRIRAEKALITARKAPKEPWTAEERAAVRPKVWVTRSLSLAVKRDKRYPGNLRFALHVPMEKYVPTPEKAKAQLAANPGLPVVTVDLGVNRLAVMGAFALGQLLATQFIAGGALNHQRHLLLNAIDKKRRQSGRLPAGVQDNVHLWEKVRHLDENAARQVARQIVDFALTHDAKVIVFEYLRRYQAPKEHMSRAGRKNHKRAYWLRGQIVQWVRDLAFREGILTVERNPAYTSHMCPHCPHEYRNVGTRVKHTFTCSNPDHAYVADADFVGMMNLYRKWNGTFTYPSQKRKDEPNPMQATA

SEQ ID NO: 34870 - protein, 313 aa, Moraxella sp.
MTAIRGHIIELKPNHKQATYFKKACGVARFAYNWALAEWKRQYEQDKQYRDDCLAKNLPINESKLNKPTQGKLRKQLNAIKRTQFPFMLEITKCSPQLAIMQLGDAFKRFFKGESKYPQFRKKGVNDRFSLSNDQFKLKTINNKPYIQIPNLGLVRMRENLRFDGKILSAKVFTKGGKWFVSIAVELNNNTQAKQLKTNQTLKTGNAVGIDLGITDLATLSTGEKIQAPKPLKNKLKKLQRLSKQLSHKQKGSKNREKAKTKLSRLHYKISCIRKDFLHKLTTDLVKRFDVICIENLNIKGMVKKSQTKPCYQ

SEQ ID NO: 34871 - protein, 546 aa, unknown
  TnpB Polypeptide
MGKEVLKMPTGKKIDSNFITVECLLAFDRDEDKGRVSTLMRKFSSMIRFAYKRLMDGAERKELKKLLSRKYGINTRYSDDAILLAQQTLESCIEREQNPKKLVFGSRGLFEQLKKKHLSGKRRDELRQKWEERRYGILQSRGDKSKEGNLNLRLVNQNNEWHLRINLGNGEYVWARVIRSVKRKTDKWIDFISSLEQAAKTSDWFPYTVRLKLRNGRIYAQFSKEEKLPEVSITKDNGVMGIDINAYPFHLALVHTAKDGNLEKYERISLDKLLEGNSDKRAYLGWQIAHQVVEIAKRARKAIVVENLGKLPKGKRGDGLPKLRQKLQKWVYKALLQKIEIVAMRNGIQIIKVNPAYTSIIGKLKYAPLYNIDKDTAGAYVIARRGLGFKERLPKNYKKLLKDKEFLSYSVAKVEDRIAKLGKEIEAEKNEYKRNKLRSDLKRLKGELKLLLKSLLDSGESKTAAQQTVNRKMERVRGLTHVRQKSWQVLSVALAFSCLESLRDFSPLKRVILTRDWVGVAKRNRLVPLPGQGTTVLNMYSFVQFW

SEQ ID NO: 34872 - protein, 436 aa, Cyanobacteria sp.
MLNLTYNYKIIPTKEQIDKIEHNLAVCKSVWNYALAERKLWSNSRSCPVNACSIKSESIVQPFEYPTYHTQSANLTKAKKTNEFLKSGNAQAMQQTLRKLDRTFNDMKAKGCGFPRFKKRMKSFNLISNKIEVNSNKIKMPLLKQVRFVKSRKIPNGFKIKQVQIIKKASGYYANLALELDVNIPTPQPHGHAIGIDVGIQSMLATSDGLTVKRPAFLDNVLRQIKLLQRRLRNKKRGSNKYLKLQRRIALLHEKVANKRKDYHFKLAHQLCSQVGMIFVEEINFTAWSKGMFSKQSLDMGLGQFITTLEYVCSQSDTYFAKVNKDYTSQVCPNCGVHTGKKDLNQRLHVCSECGYEQDRDVAAAEVVMKRGLTAVGAPVVKQPSHGKGLWAEFSSALYKPRRSVGGNYGCLDKSLNGNPLAFRQGRFKTAVALLE

SEQ ID NO: 34873 - protein, 398 aa, Ktedonobacteraceae sp.
MIKTHKIRLHPTPEQAVYFAKAAGTARFVWNWTLAEWNRQYEAGLKPTALKLKKQFNEIRREQFPWTWEVTKNASDQPILDLGKAFTAFFEGRARRPKFKSKKKSKPSFYLANDQFELKDHHVWIPKLGWVNMSANLRFKGKITGARITKTADWWFISITVEVPDARLASKKTAVGIDVGLNRLATLSTGEGYENQAFLKTALSKLRQANKRLHRRKPGSKNREKARRQVARLHYRITCLRDDVLHKMTTRLANCYGIIGIEDLNLKGLLKNRQLARSFSDAALGKLLTLLISKVEQRGGQVVKIGRFFPSSKACHCCGWKWEEMTLQDRVFLCQNPMCTYYQFPQDRDYNAGQNILREALRLIGLGDQAVNGTGSGDDRRGRKIACGRGVRPKRLWP

SEQ ID NO: 34874 - protein, 420 aa, unknown
  TnpB Polypeptide
MYATQTNTLKGLSKEAYEAIAEMCRYANNLYNVGLYNIRQYYFQEKQFLTYESNYHACKENENYALLQAGIAQQILRVVDRSFKSFFNLVKKANNGEYRFQDIKIPHYRKKGGMFVLVLQKNAISIRNGNLKLPMSYAFKHQHEGLKVEIPFPNRIDPSTIKEVRILPCDFSGRYFKIQYVYTVQAEPKSLNEDNALGIDIGVDNLATCVPTNGTPFILNGRGIKSINHRWNKERARLQSIADKQGIKGGKTKRIYRITEKRNNQVKDAIRKAARYIVDYCILNDIGTIIVGYNKDFKRSVNIGRANNQTFTNIPFGDLRSTIKNLCERYEIQYIEQEESYTSKSSFLDNDVLPEYNPEQPYKGKFSGKRIYRGLYQSANGTKINADVNGAANILRKANRFDSSILCQGFLANPQRIRLA

SEQ ID NO: 34875 - protein, 392 aa, unknown
  TnpB Polypeptide
MECKRAYRYRFYPTPEQAAVLARTFGCVRYVYNWALRLRTDAYYERQERIGYHQTSAALTTQKQQAEMAWLTEVSSVPLQQALRHLDTAFRNFFEGRASYPTFKKKRGRQAATYATTAFKWDATTRALTLAKMDAPLKIHWSRAFTGSPSTVTISKDTAGRYFVSFLVEEAIKPLPVVNALVGVDVGLKDLAVLSTGEKVANPKHLHRSERKLAHAQRNLARKQKGSKNREKARLKVAREHARIADQRCDGLHKLTTRLIRENQTICVESLAIKNMVRNHALAKAISDVGWGELIRQLEYKAAWYGRTLVKIDRCYPSSKRCFDCGHVVDSLPLDIRRWKCPQCGARHDRDINAAKNILAAGLAVNACGEAVRPGRAKPNSARSDEAGIPRR

SEQ ID NO: 34876 - protein, 439 aa, Thermococcus sp.
MKRTITVKLQPSKEQEKALFELANATVVIWNKLNYQRLNQFKEFGKIDFLGTQQEAYYNFKNWIGGSTVQTLARKNAESWRSFFALNKKKKNGELPEWFKPKPPGFIGEKNGKKLFIIPIRNDQYRINGNTIEVRRLGKFGRLKIQFGGRIHLKGKQGRLEITYDTVKRKWYARVSFTVSQKLTKNGWVGVPRQPLGSLSAGIDLGVNNLMAVYVENGESFLVNGRPLKSISFYWQRRIADYQSKLNKFGCGKSRKLQRIHEKAKLQARHYINTAVRQTVEKLYRLGVSRIVVGYPKGIARNSERGRRQNFLLSHVWRFNTGIQRLKEVAEEYGILVVVVDEAFTSQLCPLCGQRHADGRIFRGLFKCRGEGVVMNADLVGAFNILRKVVEKITPSLPGLTAGRGNGGKALPEGSKTHFLVGFNETPRTSLSSARVPKS

SEQ ID NO: 34877 - protein, 316 aa, Thermococcus sp.
MKRSVTIKLQPSKAQEKTLKELAQISSKVWNKVNYLRRQEFSEEKPVDFLKTEEIVYEEFKAEVGSATVQQIARKNAEAWRSFFSLIRNKRNGELPNWLKPKPPNYIKEGGLIVLRNDQYRIEGNKLILKGLGKFKRLEVQFKGRIHLKGKQGRLEITYDPIRRKWHAHISYTVKEKLRGEEWVELPRQPLGSLSAGIDLGVNNLMAVYLENGESFLVNGRPLKSIDFYWRKRIADYQSKINKSGAKKSKKLSGMHEKAKLQARHYINTVVRQTVEKLYQLGVSRIVVVIRRALAGTLIRAGSRISFSPTCGGSTR

SEQ ID NO: 34878 - protein, 372 aa, Thaumarchaeota sp.
MKIFRAYKTELAPDDMQLASLYRHAGAARFAYNWGLEWKSNVHAYNLLPHPKLKTPTAVDLHRELIRLKKGELSWLYEVSKCAPQEALRDLDVAFSNFFGQRAGFPNFKSKRKRGAGSFTLTGAISVRPGEVRLPRIGWVRLKERGYMPSKKAHVNSVTVSERAKRWYVAVNVAEERKEEPIPPPGPVVGLDRGLNSLAVVSDGTVLENPRVLRRYERKLRHLQRNLSRKRRGSSNRRRAREALARLHMRVANTRLDAIQKFTTMLAKTKPVIVLEDLDVKNMMGNHHLARAIADAAWGEMLRQLRYKTQWYGSALITADMWYPSTKRCSRCGHVKEEMPLGERVFRCEGCGLVSDRDLNAARNLAEWPGVA

SEQ ID NO: 34879 - protein, 483 aa, Thaumarchaeota sp.
LYEPLGRARKIGPSYKTPRRLWKTGRLHLPAAQLATGTVQDADRCAHLNDRPPVRKAGNKKVPRWEGQEGAIAMKIFRAYKTELAPDDMQLASLYRHAGAARFAYNWGLEWKSNVHAYNLLPHPKLKTPTAVDLHRELIRLKKGELSWLYEVSKCAPQEALRDLDVAFSNFFGQRAGFPNFKSKRKRGAGSFTLTGAISVRPGEVRLPRIGWVRLKERGYMPSKKAHVNSVTVSERAKRWYVAVNVAEERKEEPIPPPGPVVGLDRGLNSLAVVSDGTVLENPRVLRRYERKLRHLQRNLSRKRRGSSNRRRAREALARLHMRVANTRLDAIQKFTTMLAKTKPVIVLEDLDVKNMMGNHHLARAIADAAWGEMLRQLRYKTQWYGSALITADMWYPSTKRCSRCGHVKEEMPLGERVFRCEGCGLVSDRDLNAARNLAEWPGVARTLETPVEGGVQSTAEPLIQPPGESGTISLGRGLRRWM

SEQ ID NO: 34880 - protein, 139 aa, Shimazuella sp.
MERNGVRTDFFAHYEQKLANTQRTMTRRKKDGSNWQKARIKVARLHEKITHARHDFLHSRSTKLVCESQVIHIESLQVKNIWKSKKLAKSITDASWSKFVSMLEYKAKEYGGKLVKVGKSFPSSQLCSCCGHRNKEMKH

SEQ ID NO: 34881 - protein, 354 aa, Okeania sp.
MQSIKTKLKVNNYQKTILAKHAGVARHAYNWGLATCITEYQKTKKRPSAITLHKRLVAEVKSQNPWYYEVSKCAPQQALRDLERAFKNFLTISLRGFPKFKKKGRKDSFYLEGSIKILKGNYIKLPRIGIVKTYEILPSVPVKNVTISKKANNWYISFKYDYQPTPNAKEREIIGVDVGINTLATCSDGTKFTNVKAYKQAKKRLTRYQNSVNKKDPGSKNRAKAVKKLAKAYKKVADIRADALHKLTTWLAKNNSTIVIEDLNVSGMLKNHKLASAIADCGFYEFKRQLIYKCEWYGSSVVIADRYYPSSQICSQCGHKQKMPLNVRTYECSNCGFEADRDFNAAVNLENYAR

SEQ ID NO: 34882 - protein, 539 aa, Streptomyces sp.
VAAPFVAPGPSGVAIRTRLKGLTCGDEEVLGLVGGHLGSLASRDLKARCSAGPEHDGEGWAARKRALTAESSSRWAGSVTKASHDQWALARRGLLAYIHSLQAGVRTLAHRLSLPVGEKGTKHAPGGYRSRREWFAKSRRLRVLEDRLQAARTDWQAGTVRVVRGGRRLLNTRHHLEAAGLGEAEWRRRWRAGRRFLQADGESGKRYGNETVRVTPDGEVSLKLPAPLAYLANAPHGRYVLAARVSFAHRGEQWADRVSAMRAVAYRIHEDTGRGRWYPTASWTLPPVQTIPLDAARARGVVGVDTNAGHLAAWRLDAHGNPVGEPLRFGYDLTGTASHRDAQVRHALIRLLHWARRHGLAIAVEDLDFQAEKTREKHGRRKRFRNLISGMPATRLRARLVSMATELGIPVIAVDPAYTSRWGAQHWQQPLTSNKRRTTRHDAAAVAIGRRALGHPIRRRTAPPRTHQSDGCGHRTVQARPGSPGREGHRPRIPGPRTRSVGAGRAANAVDQNAQHRPGRSAEHETWQQDPLPLSLQER

SEQ ID NO: 34883 - protein, 301 aa, Chloroflexi sp.
VCYRIDEAYLRYFKKVVKGRPKFKKARKYSSFTFPQSGYKVDDNTVTMDGTKYKFVKHREMGGTIKALTIKRDRVGRLWLCFRVKEDVVIGKASTGKSGGFDFGLKTFLTDDEGRPYTSPQFFTQGIRKTIKLNRALSRKMDGSKHHKRARRALAKHSADVANKRSEHHFQLAHRLCDEYDTLYFEDLNLSGMKILWGRKVSDLGFASFVSILEWVAFKRGKRVVKIDRFAPTTKTCSGCGQRHHLTLRDRVLNCDCGLVIDRDHNAAINIKTAGTSAVFQSVRKTMVPLRKRVDGRSSQL

SEQ ID NO: 34884 - protein, 377 aa, unknown
  TnpB Polypeptide
MDQQAVRKTYKFKLKPPPDQERAMEFVLRRCRELYNAALQERRDAWQKCGVGITVAGQSAQLPDLKEVRPDYRDIHSQVLQDVLTRLDRAFHAFFRRVKNGEKPGYPRFQGANRYNSFTYKQFGNGATLDNGFLVLSKIGRIAVRWSRPLEGTPKTVTVSKEADGWYVCFSCVEVPVQPLPPTGQETGIDLGLESFATLSNGTMIHNPRCYRRAERRLKTAQRRVSRRKKGSNRRRKAVQLLAKAHQKVKRQRVDFHHKVALQLVRQNDTIYHEDLQTANMLKNHHLTKSIADAGWRRFLSILAAKAAYAGRRVVAVPPAYTSQTCSGCGVIVHKGLSVRWHSCPDCGTSLHRDHNAAKNIERLGQSLRGGVAVAAS

SEQ ID NO: 34885 - protein, 469 aa, Acidaminococcus sp.
VIVSKTFTIETRLNQNDNADLIKYVKEYNALYGRMLRFAWHRYNNGGKFSVKKSQFNTLLQIQFGVNKRFANSVISEVEGLYRGLYQLKWYEYKQLSGKITKLYSKRNKLCKQVFALKEKARNNQLSPSALRYYRRKKEKIFYTGKKINRLKQKQANLLKELQSKDLHLCFGSKKLFYAQHNLENNNLTSHKVWLEHFREQRDNRSLYIGAKDEFRCNQILQLTPMVHSGKGNRFVIQLRKNTKAREYVYGACIFKYMSSLLAKTIVQKSHGVSYRIVFRGSKCYLQAMVTFDIDTDSYRTRKTYGTIGLDYNDGFIELAETNETGNLVGLKHYDLHYHGMGNRAKSEIREITAKIVNYAISVGKDIVIEDLDFRKSKSEVIKAKSAQGKAYNKIIHAFDYSRYKETFENCCFRRNVNLIQVNPAYTSKIAKQKYCDRKKLIIHQGASYVIARRGQGFADEYISKKKFS

SEQ ID NO: 34886 - protein, 468 aa, Streptomyces sp.
VAEAAGGNKLIRVTGAEAKRIKREALGVPDPVKHRQRVAVPMQRRAPEADTRQRVYRYRCYPTPAQAEQLIKTFGACRWTYNEGLALRDKAWREHRVSFGYAESCRALTGWRNAEGAEWLQEVSSTVLQQALRHLDAAFGRFFSGSKEYPKRKKKGRSRDSATYVRTGFRWVEDPERPGTGLIALAKQSGPLRIRWSRPLPAGVRPVKLTVTRDRAGRFFVSVLVEERIEPLPPVFLRDGGTPKAVGLDLGLTALVTLDDGEKVDHPRLLKKYGAKLADLQRSLHRKKRGSRNREKARQEIARLYALIGDVRRDALDQLTTRLVRENQVLVVEDLAVASLVRSPKGKGRRRKAALNRAILDASWGTLLRLLQYKCAWYGRTLVLVDRFFPSTRRCSACGVIGPKRDLAVRGWSCGGCGAEHDRDVNAARNLRDEGMRLYELVASSLPTGRAMPSLIRASEMPDVMLTA

SEQ ID NO: 34887 - protein, 414 aa, Moorea sp.
MRAAYQYRLRLTNSQIAKTEKWLDMLRHQYNYLLADRFNWFEHNRCSINSCPLVCYLPDLRNNPDYFSQKKTLPQLKKDRPWYSDIHAHVLQDCVKRVDLAFKRFIKGESNGKKSGRPRFKGKNRYKSFTFPSLSKNPINGNILTLPKFGKVKIIYHRPIPEGFKIKTATITRKADGYYVTLSIQDDSVPDIIPIDSVTNPIGIDMGLKSFLMKSDGAEIPIPQYYRKAQKRLKKIQKAVSRSKKGSNNRKKAVSKLGKAHKKVADTRKDFHFKTAKELLDHHDLVAHEKLNIKGLAKTKLAKSILDAGWGQFLSILSTKAVRVAWPTALNAGLVTVAVNPRNTSKNCSNCGKKVQKKLKDRIHSCPHCGYVADRDVNAAINVLNLAVGHSVRSKACRATEAIAGVGKKPALSR

SEQ ID NO: 34888 - protein, 387 aa, unknown
  TnpB Polypeptide
LHPTFRQTQALTRQLIYQCELYNAALEERKGAWNWEKRSVTYFDQCKTLTGLIDVRPEVLSSGVILCRGTLKRLDRAFTSFYRREGTGENPGFPRFKSAQRWNSLQWEDRSGWRVKGVERRLRLCGIGEVKMNYHRPLVGVPKAITVKREGTKWWVNVRCVDVPATPLAPTGREVGVDLGVVNLVALSDGELIEGNHFSARSSERLADAQRRLATKQRGSNRRSRQVQEVARLHRHVKQQRMNAAHQLSRRLVNEFDFIVLEDLKITPMVARPRVKPDPENLGDFLANGAATKAVLNRSIHDAGWPTLRSLLSYKAESAGRTVVVVDPRFTSSTCYQCGHVDKKNRVTQAVFRCCSCGHEDHADSNAALNILRAGRAQLASASVGPN

SEQ ID NO: 34889 - protein, 400 aa, Bacillus sp.
MVTTKKKSKPKKKNVRHVALRYRIYPNETQQAQIAKTIGCARFAYNFYLSERQDVYQQTGQTLTVTDFNNALNQLKHHPEFMWLKEVDKFSLTNALLNVQDAFDRFFSGQNGFPKYKSKHKSKQSYKTNATNHNIKVLWEENLIQLPKVGKVKMRISTSQKQSFQEKGLPGVIKSATVTRHSSGQYYVSILLEQPPIEVQKVSADQVPSDQIIGCDLGLTHFLIDSNGRKVENPRYLKNNLKKLARLQRRLKHKKVGSSNSQKLKQKISKLHLHIANMRKDFLHKESRKLVNENQVIILEDLNVKGMIKNKKLSRHIADVSWSMFTTFVSYKANWEGKHVVLVDRFFPSSKQCHGCKEKNTLLSLSDRVWVCPSCGTEHDRDQNAALNIKEEGIRLLLSA

SEQ ID NO: 34890 - protein, 405 aa, Bacillus sp.
MARKTVAQRNKELAKENKILRHFGLKLRAYPTPYQEELIAKTIGCARFSFNFYLKERIEVYNLTKLSLSCNTFKKSFNVIKQHPMFNWLKEVDKFALECALEQVEDAYDRFFKGQNGFPKFKSKHRSKQSYSTKETNGNIQLDIQDEVVKLPKVGKVHISLSKKHRAMFQQNGLTAKIKSATVTRHSSGQYYISLKFEEIVPLEAKQDVQTIPSDQIIGCDLGLTHFLIDSNGRKVENPRYLKNNLKKLARLQRRLKHKKMGSSNSQKLKQKISKLHLHIANMRKDFLHKESRKLVNENQVIILEDLNVKGMIKNKKLARHIADVSWGMFTTFVSYKANWEGKHVVLVDRFFPSSKQCHGCKEKNTLLSLSDRVWVCPSCGTEHDRDQNAALNIKEEGIRLLLSA

SEQ ID NO: 34891 - protein, 400 aa, unknown
  TnpB Polypeptide
MTKESAQIYNMAINLHKEQLDFKAIGYKIDHEFETKFLIAQSRQAAFEQYCKDFKSYSAALRAYKIDPSVFVAKPQPPYRLKFMNVVYFKKEAIRFKNDHLLLSAKKPNVPIEVKWNKFLPIPHFVSINYDQHTGWSINLVVETDDPGCPPDNRNETMAIDLGVKRIATTFDGKTVKTYSGKEFLALSKLRNRLQAKTQEKYSHCKKDSRRKKYLKKALRKNVKKIKNKEKDILHKYSRSIVNDAIANGVKTIVIGDCSTIHKNTNLGKANNQKINQNPEQKLKDYVSYKFQGAERITKVISERRTSKTCPKCNHVNKRAPSGRTFVCEDCGYTYDRDGVGSMNIYSLEVSFDHDKWLNVIGRMALPLGVKYHPNLPCSRMISARRNQRRNCQGKETTML

SEQ ID NO: 34892 - protein, 399 aa, unknown
  TnpB Polypeptide
MRVHKFRLYPSKKAEQNMRNTLDLCRQTYNILLGELNGQKEIDKSQIQGIIPDMKICDSRFNQLYSKTMQYECYRLFSNLSALAQTKKHNRKVGSLRFKGKGWFKTFTYNQSGFKLINNGKRCQTLHLSKIGDIPIRCHRNIKGKIKQVTIKHEQSGKWFASIAEETENIKQIRTIKNVVGIDLGLIDIVYDSDNNKIANPRHLKQYAERLAFINKKFSKKYKGSNNRNKWRIKLARQYEKLANTRDDFLHKTSRYYVDNYDAIGFEDMHISNMVKGYFSKSILDASWGKLRRYMTYKAESAGKLCIPVNYKGTSQRCSDCQEIVTKEIWQRVHQCPFCGINIPRDYNSAIEIRNLAIKKIRQELPESTLVEMEDYKPKSWCLSMNQETISSTAEAVRL

SEQ ID NO: 34893 - protein, 387 aa, unknown
  TnpB Polypeptide
VVIFSLAINSNTLYSISMLTYTYKMRPTKTQDVKLWQCLYLTRKMYNDALQELIEHYKLTGKHLRRYDQDKLHDGKRHPELPAFVVDEVLNRLHRSFANFFRGLKDGRRTGFPRFKPPNQWHSFAMSSVCSLKLHGSRFHGGAKLGGKIRVSLPRSPEGTQKIARIIHKRSGWYLQVTTDHENPKMESNDKAIGLDFGIKNLIADSDGNFVENPQFLKQSLKKLRIAQRKTSRRKKGSNRRKKAWRMVARIHENIAAQRMDYLHKVSRKYVNEYGLIVIEDLTPSNMMKNHIISRMVVDSSWGILRNLLEVKAASAGRQVIAVPPHYTSQKCSKCGEIVQKSLSVRTHVCPWCGYVADRDVNAARNILRAGVRPSGANVGVVNSCVA

SEQ ID NO: 34894 - protein, 415 aa, Defluviitaleaceae sp.
MYLTVKQQLKNLSKEDYQNLKTLSHTAKNLYNQALYNVRQYYFVEKEYLNYEKNYALLKQSDNYKLLNSNMAQQILKEVDGVFKSFFGLIKLAKKGSYDFRNIRLPKYLSKDGFTTLVIGFVRLNGNKLTIPYSNSFKKEHKPVTINIPPVLQGKKIKEIRIIPKSNARFFEVQYTYKVEEQQRDLNQQKALAIDLGLNNLATCVTTDGVSFIVDGRRLKAINQWYNKHNAKLQSIKDKQKFKGTTKLQSIITNNRNNAANDYINKTCRYIINYCLEHKIGNLVIGYNETLQKDINLGKRNNQNFVNIPIANIKEKLEYLCKLYGIKFTKQEESYTSQASFWDNDDIPKYNDDNPQTYVFSGKRIKRGMYRSFCGKLVNADVNGALNILKKSSVVDLNVLYSRGEVDTPVRIRIA

SEQ ID NO: 34895 - protein, 423 aa, Hadesarchaea sp.
MARVSIPAVITRITPNDREGLEELFRRFGNAKRRAHMLKQRGTSKAEIEHLLQKQVGINCRYAKDAYHSIKDLPPHVTFGGKRNQQLRMEDKIGREEYRRRRNSLIISRGDKTRKGNVNARVVEENSKFMLRINAPPENGMSERWIYPEIFIPEKYLKRYGHMLHGKSPYTVVLKRRDDNRGYDVRVIVKVHKEHCLEPKRVMALDMNAGHVDFAVAEKERVIAVGKINYHEVQHTSHDKTNNLLHKTVNKIRNIAEHYNAKVVYGELNTSKFKSNRGANRKVKRIPHHKLGSILKYKYGAKKRSEAYTTKLGKKFSPLVGLDVHKCAASAFALKVLDYEAFKNLRSSSDENLSRGVAPNEDAGSPRRWLSAGSGPTALHQARGLVHDEVLADGGYSEIPGIWGLSFMGSLRTDLPCLRVKIC

SEQ ID NO: 34896 - protein, 449 aa, Calothrix sp.
MALRRATFRLYPTAKVNNILHYHRKLHKDLYNSAISNRITSYRKFGKSVSYFEQQNCLPDFKEVWTEYQQINSQALQATLKRVDFAFQRFFKGLGGYPKFKSIRRYSGWSYPSFTGWKCHSTGDNGYLELAKIGSIQMRGKARLWGHPKSLDIVHRNGKWYASIVLDIDDDLLRNSRKTDNGLIAIDLGCNDAIAWTNGEENGLIPAPRFFRKAEQQIKQLSKGKRRKRSPNFQKKQKASRRWKKFQRQISKVYRKVANQRQNWVHQATTRIVSGNSTVVTEQLEVKNMSAKAKRGKRNKQKTGLNKSILDVGMGMIRQSLKAKLDDVGGLFSEAPTKKIKPSQTCPKCGHQEKKSLDQRVHICSNCNYTQQRDIASGEVMLLWYSNQLPGFGTSLADADRSSSTSRTRKQAGSMKQLGQKKRQKSYSTGGDVETPPDNVVGWGSSLTQ

SEQ ID NO: 34897 - protein, 382 aa, Thermus sp.
VIRKAFKYRLYPTKPQARDLERTLSLSRQLYNAALQERREAYKKAGKTVGFYQQKRYLPQIRAELPEYKGVHSQVLQNVIERVDKAFQGFFRRVKAKGGKAGYPRFKGKGRYDSFTFPQAGVTGVKLQKDSKRVYIYGIGSVKIKLHRPLEGKIKTATVKREGDHWYIVFVCEVEPKPLPESHEAIGIDLGTNPHFLVTSDGEMVEAPRHYQRTQAKLADAQRKLSRKKRGSHRYKKAKRQLAKLHQKIANQRKDFHHKLARKLVNRYGTIVHEDLNIHGLARSRIAKGVQDAGWAQFLRILAHKAAEAGRRVLGVDPRHTSQDCPICGYREKRPLWVREFTCSFCGTPLHRDVAAAINILARAWTEPLGAGLNLSPRSPAL

SEQ ID NO: 34898 - protein, 371 aa, unknown
  TnpB Polypeptide
MICYQYRLYPNREQVALLWKHANKLNSLYNYFLNQRNIVYDTYNIPVTRYDQQAELVRLKKIDPELKDIYSQVLQQVPLRLDNTFKAFFRKDNEDQGYPRFRSCRNFFSICYPQSGFTIADNIFTTTAYGDIKFYKHRPYNGKIKQVTITCDSRNRFYISITVDVILRKPYTRKVIGIDVGITNLVATNTGDIIKNKTHAKYFDKQIDKLKSRRDKQYKKGSREYIRLSRTINRLYEMKNRKVTDYLHKISKNLTSKYDTIFCEDLSLKRMSESNITGLNRGLRNSGLSTFISYLNYKSKQLIKVNPRNTSKTCNRCGNIIDMPLHKRTYQCTCGYVEDRDINAAKNIHCLGQAILNGYTEITLQEALTFR

SEQ ID NO: 34899 - protein, 556 aa, unknown
  TnpB Polypeptide
MGTKSRGERKHPKKKTQTFLLELPLAVEAGQVARLRAHLEAGRQFYNAVLCAGQCRLRQMRADPAWQVARTIPRTHTQERRAAFSALRERYGFSEYAFHDLAKELRVSWLADHLDAVLAQTLATRAYRALNRVCVGKAHRVRFKSRGRGLSSLENKRNDTGLRFVLQTPTQGHRGWLIWHDDQLPALIDWDDPVVTHGLAHPIKYARLVRRPASSPHAQGADSQGEHYFVQLALAGLPYRKPKHAMGLDTVGLDLGPASIAIVPREAEARLEPLCAELRPDARAIRRLQRRMERQRRAANPEHYDERGRPRKRGKGAQPWKQSRGYQVTRRRKAARERRLAAHRKSLHGQLVHQIVAVGHTIITEKLSYQGWQRRYGKSVGLRAPGMLIDHLRRTVASTGGTLHEVHTRSTKLSQYCHGCGKTLKKPLSQRWHQCPCGIGPVQRDLYSAFLAAYLDPAGDFIPSCAQYVGPWEGAEARLKAAHERVEERANEGQVVPRSMGISRAGARLPKSRSEATQELLFLSRRGKVEAWKRRPEPPVLEPGESSGARTISNNE

SEQ ID NO: 34900 - protein, 364 aa, unknown
  TnpB Polypeptide
MKILKTYHCNLKGNKEKLSLLKIQHYYCQVIARYYLRYIRRNKEYRKNEIHKATYSIIREKYPFLHSKLIQHIRDKVLSSVKDKKLFKVRKLNFPLIFDYQSFDIEFKKGYYDAFIKILKNKYPLSGLRTINIIKDKKVKEIQIKLYGTKWRIYFICETECQDKTTGNQTFGIDTNTKNITLSNNQRYSLKIFFHKKMEFRKHGQGDKISNYSRNFFHQLTTQMVKDIIQFGGSKIVLEDLTNLRKSASRKCGTSKGRNMNYVLNNTFTYSMFQSFLEYKCKESGIQVSYCNPRNTSRTCNVCKGLNTERPRQSLLICHDCDKKHNAELNAANNIQESSPLNGVPNESIHEKQLEKHVSENSNL

SEQ ID NO: 34901 - protein, 267 aa, unknown
  TnpB Polypeptide
LKISGLNQIPKEAEFSNILLIRKHGDYYIKITTFLPKEKSIVYTKAIGIDFGIKTQMAFSNGIKAEFKIPVSKKIKKLHKNLSRKQKGSHNYYKNLLQLQKAYDEPNNIKKDINKKTIHYLKNNYIVCIQNDNIKGWQAYNFGKQINESAIGGIISGIKNIPETLVADRFFPSTKTCFNCGHKQKVDLSERVFVCQECDYQEDRDINSARNILKRSFEDKSKSLLPVERRKFTLVENETSTLKMLEYLNNIPHLKASLCLLKQEAFI

SEQ ID NO: 34902 - protein, 418 aa, unknown
  TnpB Polypeptide
LFVPHLALLDKLQPYTLPHKISARVLLYPTSEQQIALAKSFGCCRWFWNYSLNLCQETYKATGKGLARGAIQGLLPSLKKEYPWLSNAYSQCLQYVALNLSTAYKNFFERSAGYPKFKSKHARQSITYPQKVKLEGEYLKLPGKVGSVYYRKDREVIGQFITTTISQNPDGKYYASIIVDDGVELPGTSTEGKAVGIDLGLTHFCITSDGSKFDNPRHTERHVKNLKKKQQSLARKQKGSTTRAKAKRLVARVHSKISKVREDFLHKLSRKIVNENQVIAVENLAVKNMVKNHNLAKAISDCGWGQFCTMLKYKAEWEGKTYIEVDRFFASSKTCSVCLNKVDSLSLDIRSWTCKTCQTHHDRDVNAAINIRNEALRILALGTSATANGGNVSQPGKISVLLDAVPNEVGNPILLEVG

SEQ ID NO: 34903 - protein, 450 aa, unknown
  TnpB Polypeptide
VLVRRQIFRLYPNKAQIVALFRARRLHSYLYNACIENRKTEYERFGKSVSYFEQQNCLPAFKECWSEYKELHSQSLQATVKRVDLAYNSFLQGLRKRPKFKSIRDYSGWTYPAKSGWKANTEGTHGTVTLNDLGITLRMRGKAKDWGTPTTLTIVYKPHVNQWFASITVEIPLPEVKFGSQSHLEYESIAAIDLGTETALTLYNGKEFEEITNPRFVRQTEQSIRQASKKLKRKRAPNRKKKVKASKRWKKARKQVSQLQRQVANQRQNWQHKVTTDIASCHDIVVTEKLETKKMTCKGKKRKKQKAGLNKSILDVGFGTLNKMITYKVEGKGGLVFFLPTRELKPSQRCPKCGVIHKEWAELSNRYHICECGFEMSRDKTSTVVMYQALLDKQPGFGMSLDSRGCFSSTSKTLKRKHTGSMKQLGQKKRRKPNHAESGDSETSPSYRVG

SEQ ID NO: 34904 - protein, 398 aa, unknown
  TnpB Polypeptide
MFSLTYEFKLKPTVNQAFLFKDWLEHCRRVYNYALAERKAWYKSRSCQINVCSLHSEYIIPADFPRPTYASQCKSLTTAKETLSTLREVQSQVLQQTLKRLEQAFVSMWERNFGFPRFKKPGRMKSFVFPQLGKKPLRNGAINLPKIGWVKFRQSREVPSDALVKQARIVKRASGWYVMLTLQWDVVVPQQTPHGEAIGIDVGLMNFIATSNGQTLPRPKFFVDLQHQMRLLQQRVSRKKMGSNNWHKAQRKVAHLHEKISNTRKNYHWQVAHSLCHQAGMVFVEDLNCKSLAAGMLSKHCLDAGWGQFFNILQHCCWKSGVFFMEVDSRKTSQICPNCQVTTGKKDLSERVHQCNRCGYQTDRDVAAAQVVLNRGLAAVGYTVKMLNEGKVVGLPTS

SEQ ID NO: 34905 - protein, 167 aa, unknown
  TnpB Polypeptide
VRAARAPRESPERRTEWARIARLRAREADRRKDWCEKTSTLLARRFDLIRFEDLRIKNMTRSARGTSDNPGTNVRAKASLNRAILAQGWGLLVRRTQDKAPGRVEMVKAAYTSLRCSACGWIDKNSRDSQAGFCCTACGFICNADENAAANIAAGHAGGTPRASVNL

SEQ ID NO: 34906 - protein, 297 aa, Salmonella sp.
METKNKGRDSIRFVNFEKYCRLENRRVKLPSGLGWVKFRQSQRVNGKIKNATISQLAGQWYISFQVEVETAEPNHTSTTIVGLDAGVTKLATLSDGTVYQPVNSFKASQRKLATLQRQLSRKVKFSSNWQKQKRKVQRLHSHIANIRRDYLHKVTSEISKNHAMIVIEDLKVSNMSKSAKGTAEQHGRNVKAKSGLNRSILDQGWYEMRRQLEYKQLWRGGQVLAVPPAYTSQRCACCGHTAKENRLSQSKFVCQACGYTANADVNGARNILAAGHAVLACGGMVQSGRPSETGTRR

SEQ ID NO: 34907 - protein, 423 aa, unknown
  TnpB Polypeptide
MNKTHEIKLNPTKSQRVFFAKSCGVARFAYNWALNSWNKKYEAKEKTSAYSLIKELTSIKKTEYPWMLEVGKTCPQYAIHNVESAFKGYFRRLKDGTIEANKKQYFKSRKTKGLPIEEKKLQSIGKPNFKKKGIHDSFVAIENESSFKQEKNKIWIPRLGWVKCAENLRFKGKINNVIVKKIANMWFAVINIVSDEAPIICENQTIVGVDLGIKSLAVTSGGKVYENPKALKSNLRKLRIRQKSLSRKVKGSNNRKKAQMKVAKTYYRVSCIRKNALHQATTNIVNNYGIIVLEDLNVKGMTKNHHLAQAVNDVSFGEFKRQIKYKAKWQGKQVIVADRWFASSKICSCCGNVQDMPLSKREYKCEKCGLIIDRDLNASINLANYGSTLRHKESQVCGVRSSSVAIPNSPTMKQKIVCNFNIN

SEQ ID NO: 34908 - protein, 437 aa, unknown
  TnpB Polypeptide
MLGGEGFLTLTIKMRVRPEPECEEELVDLLKRYRDALNHSVEKIVEEKATSLSKAHALLYRELKEAFHLPSRIAMDCYREALSIAKSWLGNPNKGTMPRAKTLRLWLTPSLSYRIKGNYVEVLGGYRLRIVGWDRRYDQYPNGEARLVYKEGKFFLMIFKRVPRPSKYAPKGVLAVDINEKEIVFGNSVVRERRETAIDRALHYKRLAEKLQQKYSFSKYNAWLRRRGILKRVRHFHRKARNIVEDWAKKVSREIAELAKRHQHAIAREDLTGLIEKLRELPGDHKVALLILSYRKLAFWIDWQCEKLGVPIIPVEPKHTSSICPNCSSRLKGNGYRQLKCPRCGLEEDRDRIAVLNIEKRALEQLEPISGGSLTAPTAPQMTDVFPNRCGEPNRPFRAGRRSAQIIHPFLRERASTSNCQSFRRHWRGEISGSISS

SEQ ID NO: 34909 - protein, 415 aa, unknown
  TnpB Polypeptide
MYLCIKQQVKDLSKDDYLNLKELSHIAKNLYNVGLYNVRQYYFQEKEYLNYEKNYNLCKDNENYKLLNSNMAQQILKEVDGTFKSFFALIREAKKGKYDFKSIKLPHYLEKDGFSTLVIGFVRLNDNKLIIPYSNSYKKNHESITINIPPILLDKKIKEIRIIPKSKARFFEIQYTYEVEVEQRELNEANALAIDLGLNNLATCVTNAGKTFIIDGKRLKSINQGYNKQNSKLQSIKDKQNIKGTTKLQSEITNNRNNAVNDYINKTCRYIINYSLNNDIGTIVIGYNETLQRNINIGKVNNQNFVNIPIANIKEKLEYMCKLYGIKFVRQEESYTSKASFWDKDTLPKYNDDNPQEYKFSGKRIKRGLYKTKEGNLVNADVNGALNIMAKSSVVDLNVLYSRGEVDTPVRIRVA

SEQ ID NO: 34910 - protein, 523 aa, unknown
  TnpB Polypeptide
MLERCAALFSRLERLLFVAIYAHGETLNAVKRRFITEHRITSRQFSAIHKQLSAKVDSWREVRKLNMATVEKQIAKTETAVKKARSAHIRHQKKRRLQRLLDRKNGIESALSAPVPSICFGSRALNRKQFHLRKNGYADHAAWRKEWQATRAASFFVLGSADETSGNQTCQYHDGALHLRLPDALGGETITIPVKFRYRENDLLAALTPSMQKVTRGPRKGSDTLRPSAVSYRFICRDGRWHVQAMFDVAAAPVTTSRTNGCGGIDVNPWGLALTRIDGAGNPVDSLDIPWAVEGRQQDQVSAAIGDGVRIAVLYAKKHAVPVAVERLDFADKKHEDRGARTNRMLTAFAYSAFAQMIRGRCAREGVELIEVNPAFTSVIGQAKFAAGYGLSVHRSAACAIGRRALHFGEALRSRHTGSALALPARNRTRHVWSDWGRWVKARRSQRKASSKPKGSCGSEPPGDRGNSLDPSPPNDRRTAVGGSAGERMLRTNAALILSGAIPEANCRPCCSGGVVRPKSQAA

SEQ ID NO: 34911 - protein, 523 aa, unknown; identical to SEQ ID NO: 34910
  TnpB Polypeptide

SEQ ID NO: 34912 - protein, 368 aa, unknown
  TnpB Polypeptide
MRRAIAICLAPTNLQAQRLSALQATFAAACNQVAPTALEHRCTNRVKLHHLAYYPLRERFPQLGAQMACNAIARVARSFKAHRANGREWALIAFRANTAVHVDARTFRLREHRVSLFTLDGREHVAMRLGSFQRGYLSRGTVKEADLLVRRGVWYLHVVLELDEVNAAMGSAVLGVDLGENVTAATCGGTLYGGGELRDKRDRFMTFRARLQRNGSQSARQLLARVSGREFRHVRHVNHEISAGIVAEAARNGSGAIILENLTNIRSRIKMGKRMRTRLHRWAWRQLQTFVEYKAMERGIAVCYVAPAYTSQTCSVCGEIGKRSRHRFSCEMCGIFAHSDRNAARNLAKIGARTLAPTGDVMRPHVAA

SEQ ID NO: 34913 - protein, 524 aa, Klebsiella sp.
  misc_feature (111)..(170): Xaa can be any naturally occurring amino acid
VLCSAGFNRRNTDFYLFPAPVDSVLYIWLFIQVISIHTECKMLIQKAYKYRLNPTDAQAQRLRQMCGCARFVWNYALAETQRILETGQKLPSAFELNKMLTGWKKLPDLAXXXXXXXXXXXXXXXXXXXXXXXXXXXXXXXXXXXXXXXXXXXXXXXXXXXXXXXXXXXXLNKMLTGWKKLPDLAFLSDAYTDNLQQKLKDLHGAWKRCFDKKLAAKAPVFKRKSHGNDSVRFVNFDKYCQLEYRRVKLPSGLGWVTFRQSRAVVGKIKNATVSQHAGGWYISFQVEMVVEQPAHPSTSAVGLDTGVSKLATLSDGTVFEPVNSFKQNQSRLARLQRQLARKVKFSANWKKQKARISRLHSHIANIRRDYLHKVTTTVSKNHAMIVIEDLKVSNMSKSAAGTVDEPGRNVASKSGLNRAILDQGWYEMRRQLEYKQRWRGGEVLAVNPAYTSQKCACCGHTAKENRQSQAKFVCTVCGYEANADANGARNILAAGHAVLACGGKVQSDHPTKQEPDTERSAVTH

SEQ ID NO: 34914 - protein, 514 aa, unknown
  TnpB Polypeptide
MATPTFAHDLQDAVSRRSLVIACNAGLWPSVQIVNQLRARGLMVLGSGLTDPDFSLAGKGDWIQEQPYLPEMRNRNLLILGLGAGGIHAYVFIKLLLFTYRAIMFKSFKFRIYPTKEQAVLLAKHFGCSRFIYNWGLNKKTEYYTTEKKSYSTHQLMKDVTQLKKELPWMKEINSQSIQQSLWDLDTAFRNFFNKQNNFPKFKSKKHNKNSFNAPQFVEIDFNKSMLNLPKFKDGIKIVVHRHVGGEIDSGTISRTSSGKYYFSTMLEVTDAVKNPDKIFIGIDFGIKTFMIMSDGTKIERKDFLYLVERRLAFLQKKLSKKTQGSKNREKIRLKISRLHEKTSNRRDDFLHKITTKIAENKDYNFVGIEDLNIVGMMKNRSWSKRIGDLSWNKTTNMLKYKLERVGKSLIKIGRFQPSSKICSCCGIKNTELRLSDRTWKCSCGKIHDRDINAAINIKNFALLSNLGQELPNVKSVEKLASNDIRKMIVKSASAKQKKSNDETKVSTLKPSLL

SEQ ID NO: 34915 - protein, 418 aa, unknown
  TnpB Polypeptide
MYLTVKQQVKHLTKEEYNILRELCRTAKDLTNQAIYNVRQHYFQEKQYLRYEANYHELKHSDNYKLLNADISQQTLKNVDRMFKSFFALIKLAKQGKYNFKHIKLPNYLPKNGYSNLIINNIRIKNNNILMVPFSNTFKRKRLADRIQIKIPKVLEDKTIKQIEIIPKFNARFFEIQYIYEIQEEDIQLNTNNTLAIDLGVNNLCTCVTNTGKSFIVDGRKLKSINQFFNKYNAKLQSIKDKQNIKRQTKQQFLISRKRKNRVDDYISKTCRYIINYCLINDIGTLVIGYNQSFQSRTNLGKKNNQIFTQLPFGEIREKLEYLCKRYNINYILQEESYTSKASFFDNDELPIYNADNPQTYEFSGKRIKRGLYQTKNNYCFNADCNGALNILRKSKAVDLNILCCRGELDTPKRIRIS

SEQ ID NO: 34916 - protein, 393 aa, Thermococcus sp.
MPSETIKLTAKFKLKETPEGLDDLFSTYREIVNFLITHAFENNVTSFYRLKKETYKGLRREYSELPSHYIYTACQMAISIFKSFRKRKKKDKAKGRPVFKKEVIMLDDHLFKLDLENRTVKLSTSQGRFSLEFYPAKYHEKFKDWKIGQAWLVRTPKGVFLNVVFSKEVEVKEPDAFVGVDLNENNVTLALPNGEFVQITTHEREIRTGYFVKRRKIQRKIRAGKRRRELLEKYGQRERNRLNDLYHKLANKIVELAEKYGGLALEDLTEIRDSIRYSAEMNGRLHRWSFRKLQSIIEYKAKLKGVRVVFVNPAHTSSLCPVCGGKLSPNGHRVLKCLNCGFEADRDVVGSWNISLRALKMWGVSVPPESPTMKKGVGKVSRNDVYELHASYG

SEQ ID NO: 34917 - protein, 390 aa, Bifidobacterium sp.
MTMRKAAQRIPFKPSKTQASLLERCFGDRRFVYNRQVEAFNTYDKETNPKPEYPNVSGMKNANGWLRDSPIPSNALSNAIMDFRKAQSAYFHKAQYGKNRPRFASKIDNVQSFRNSMPIRRLDGNRYPLSRKLGSVRIRKRDRLRYPVESLSSWTVKRENGKYYLVLLFNVDIQPKKPVEGKIGIDAGVKDFITLSTGEKINYPNRMKVLEERVKREQRKLSHRRKGSNNYLKQKQNVAKAYAKLRHYREDFQHQTSHRLIEENQFIGMETLMVRNMTRKAKKKLDANGRPMRNGQSRKRAMNRSILRDGWSGLVDKLAYKAEWYGRTLIRVDRFYPSSKLCHECGRKYKELRLSEREWVCEHCGRKHDRDVNAALNIRDEALRLNQTGQ

SEQ ID NO: 34918 - protein, 561 aa, Actinobacteria sp.
LPAGAACCHDSDCRAQARSFRVGVSPEVTLAGVLCCWMMRSGAPGRMWRVGRGPEMSVHDVPVHRPQPPGRYALEGVHQGGHGHLGRVLHRQVHVVVCAAELARVGAEVGADLPHDVLAALEHVRVEHATPVLCHEDQMDMECGNHMPATAVITGVCHRPSLGSGAVQVRYRYRIYPTPGQQQALARTFGCARVVYNDCLRVRDEAYAAGEKIGDTEVQRRVVTLAKRTPERAWLGEVASVALVQACQDARRAYRNWFDSLSGKRKGRKVGHPALRRKHQRQSIRLTRNGFALHGERLYVPKVGDIEVRWSRDLPSVPSSVTVIREPDGRYYASFVVERAVTLLPACDHEVGIDLGLEALAVTSDGEKIPNPRFLRAKERKLARAQRALSRTQKGGANRAKARHRVAAVHRKVREARLDHAHKVALRLVRDNQAVYAEDLCVSGLVRTRLAKSVADAGWSQLLRLIEEKAAQYGRTFARIGRFEPTSQVCSACGVKDGPKPLSVRQWTCAACGTVQDRDVNAAKNVLALGRRESLNACGGGIRPGHVLAAADEAGTHRSVA

SEQ ID NO: 34919 - protein, 627 aa, Rhodococcus sp.
MDDVTAVPASLSGPFSGRCGRHRINDGVSTTPRQFAFTTRAHVAVDDATGEPIGLDDIDTRVGWLLDLITTAGGELVSRLWQPATFDVLAAGRDHHDRRLPAQGHVAAARLGWNPIYPDGVYVPSRVTRVVTAQTMATLRTLTYRDTAITALSARFDPATGRLTAPTEPGDYVPSGFARGVRRQLLARFGHGGGAPAGRLRITDVQEPPRMAAMARLSAADRQLAQITMAGRELVLTVKLPTSPTPAGRAQWRRVRLTAAIPAHLHGRAIIDWHLPTLVLDRRGLLWRCAATEMVPAADLTAGRVAVGVDWSPSTLGAAAITAENPDGLVSDYRGWTYDDRGLGIKLARLQAEGQLLHAKAARLTRLAATAPPEVRAELEEKIAVLDAHRTAVGAKRGKINRELAFDFARQATDYAATAGADMIAVEDLTTLETRGHGRVNNNRAAQSARRQAVAALAHTAAGVGITVVSVPARGSSALCPGCDEPLSRPGGYHTAWCPGCRVGGNRDHLAGVNLAKRALLGRNKATRRRRRLPDIRVAEHAPVHKCRDKNSPTPSRPRHRRVRRSLPTTTRRMGVNPKQHVPAPQASVWDTVKPRSNPHHRTVMRVAVTHVHLPRATPVADSMRST

SEQ ID NO: 34920 - protein, 408 aa, unknown
  TnpB Polypeptide
MIMILVEQHQYSKYSKHFKELDHLCFLAKNLYNVTLYHIRQHYFKTKEYLGYCKLNQMSNTLFPNDYQALPRKVAQQVQKLVDQNFKSFFNHLKVLKQGERINIPQYLHKTDGKQVLTYTNQAISQNNRNVSKGHIKLSGTTFEIKTNIENVIFARIVPNKGYITIELGYEIQNTEPTEKNNRYASIDIGVNNLATVTSNIFKPFIVNGKPLKSINQFYNKKIAELSSTNKKWTNRMYSINRKRNNKIKDYMHKSSTYIVNQLVENRVDTLVIGHNKGWKQDTNMRKDVKQSFIQIPFNLFTDMLSYKCKKVGIDVIIQEESYTSKSSFLDLDNIPVYNETSQEITFSGKRIKRGLYRSKNGTIINADVNGSLNILRKYLTKQEAWNEKIFSNCVEVCSMPSVYTVKF

SEQ ID NO: 34921 - protein, 427 aa, Hydrococcus sp.
MKQVLTVSCKLQAKPEQVAKIEVTLKAFADACKYVNEVVPPNLMNELAMQSLVYQDVRAKFGLSSQLAIHAVRRVSGNRKTAKQKNRPVKGFAPTSATYDVRTFSFREKDWTVSLTMLGGRERFPLAIGNYQRGLLKRQTPKTATLCKRKDNTYYLNIQLESLPPNPEETDGGQNISGGNLPKARLDKVLGCDLGRTDIVVTSEGEKFSGKQISKLRDKYASLRAKLQQKAAKGTRSTRRRCRELLKRLSGHERRFQTHHNHVISHRLVQQALTTKQVIALEDLTGIRERTNELPRSKTERRRSNSWAFFQLRQFLTYKAIKFGVKLVLVDPRYTSQTCHNCLHIHPVRGQSYRSGKSFRCGHCSWSGDADLNGAKNISVIGALVNVPRGSGLSCELVVRGYVQLSLWDPLRASQSSHPSCTQLGGG

SEQ ID NO: 34922 - protein, 200 aa, Clostridioides sp.
GVGLILSNREGRSIKQFRNKMYAYISKRLSKCKKGSRQSKKLWRLKNKIRSKTDNQLMNLYHQTTRKFIDFCVEQKVCEIVLGDIKGVEKDTKKKKRLNRVNRQKISQMEYGRIKDYIKYKAKEQGIEVKLVKENYTSQTCPKCSKKHKPTGRTYSCTCGYKTHRDIVGAWNILNKKHKYGLVDFRINHKQPINLKVSTV

SEQ ID NO: 34923 - protein, 386 aa, unknown
  TnpB Polypeptide
MLRLIKYRAYPSEEQEIFFAKTFGCARFVYNLMLDEAIKSYARSKKFNRHTPAYFKDKYEFLKEVDSLALCNAQLNLDSAFKNRFSKKSKKQSGFPKFKSKKYKQSYTTNNQGKTIRIEGSKIKLPKLKSPVKIKLHRLPEENWIIKSATISKTTTNKYYISILFETPEIEKLEESEFAIGLDMGLKEFCITSDGEMIVNPRFYKNAQDKLAQAQRKLARTKKGSNRHEKARLLVAKCHEHTANQRKDFQHKLSKRLIDENQVIVVEDLNVKGLVKNHKLAKSISDAAWSQFIGMLEYKANWYGRTFVKISPWFASSQICSSCGTKDGPKPLSIREWTCPACGTINERDINAAQNILDEGMRILGLGMSHRKLMLSKTKVSYENNS

SEQ ID NO: 34924 - protein, 413 aa, unknown
  TnpB Polypeptide
MYTAFKYKLKPTKEQEQRLSNWMGASRWIWNWCLELNQKEYANTKKFIFRNELKCQLPKLKEEHEWLKDVPSQALQNRVIDFDQALKRVWKSKFGFPKFKSKKIEHHNTLRISQINNHIKISRKQIQIPKMGWCDWRYHRPIKGTLKSITIKRENGVWWCVCLCELPDPVICTNAIDADVVGIDLGLKDFAVTSDGEVFGTPKIYRKKQKKLRRLQRILARRRIGSKNRERARKRLNRLHYKIKNQRQDFTHKISSQITNDYLFIALEDLNIKGMMKNRRLSKAIADQGWRQFVNQLEYKSKAKGGCMVRIGRWLPSSKTCSSCGNHQDMPLSVRIYSCSGCGMKMSRDVNAALNIKQWGIDTINRCGTHRIYACGDTNDGGNEQSSPSYVSGKQEKFMDKDEVISIHEAVAL

SEQ ID NO: 34925 - protein, 419 aa, Halorubrum sp.
MEVRRTAPVKLVVPEERHGDLHESARQFLHCANRAAQFCWSDRSYNECVTANTTARDALYDELREETDLTANLVQEAIRRGVEAVKGCVERWKNGKRVSQPEFTSWSMLYDKRSATFYRNKVSLSTVNGRVECEFELPSDSPTPYERYVLSEEFEFRASTLQYDAVDDEFYFHITTRKYDSEGDDGEDAGVSADTEHRTVLGIDLGVNSLAVSSTGRFWHGDDYDHWCREFEKRRGKMRERGTQAAHNALLRLGKRERAWRKQYIHTVANEIVTEAVEHECDVIVFEELTDIRERLPHAKWHHLWAFRRLWEYVSYKAPERGVSVEQVEPNHTSQRCSRTDCGFTHEDNRHGEYFECQKCGYEVNADYNAAKNIGVRYVRKEIHKLRSSPKSGSGDAPVDVRLNGGMLNGESHQPLAGD

SEQ ID NO: 34926 - protein, 235 aa, Halorubrum sp.
LYSKAAQATVARFHHNLSSLRKKKEDGYNAGRLKRQSPTEYRSVTYNQSGFDLDEKRGHDKYAYVRFSEIGWVKIRCPRPIPDHAIIKEVTIKKEMTGEWFVSFGLETDDAHLPEKPDVDSLNTSNSVGIGLGIQNYIHTSDGKTVGWLDLEDDYERLRREQRKLSRKQHGSNNYERQRQRVATIKRHIRRKVLDYRYKITTWLVKEYDAVFVEDLTIQSMLQGDGNARNEQHVA

SEQ ID NO: 34927 - protein, 212 aa, Halorubrum sp.
LFWDETARRFRAFQPVAVDTSRLAQPLASEEAALDIGANNLVARTTTTGQQYLYEGRDLFDRFRETTREIARLQSLLEEGRYSSHRIRRLYDRRTKRRDHAQNTLARNIIERLYYEGVSTVYVGALTDVLDTYWSVETNAKTHNFWAFRAFVNRLVCTAEEYGMSVEVRFEAWTSQECPNCGSTEDTTRHRDTLMCPCGLRGTRTSQRQRRS

SEQ ID NO: 34928 - protein, 457 aa, Halorubrum sp.
VKRTNTFAVRPLSENGQRLLRDLLDASAALWNEVNYQRLMRYNDENGFGGSVWDADTGHLEGKYKAVLGASTAQQVIRKNSEAWRAFFRLKEQYHDASNTSVMDHPEPPGFRGNEDNGRQLKTVIRNTSYTIEWGDRSRLEILVGSELKSRYDHTGRLRLEVAGNPNWPDYEKQGRLDLWYDETDGTFRASQPVTVSDEARATPLAAETAALDIGANNLVACTTITGEQYLYEGRNLFARFRETTQEVARLQSKLEAGRDSSERIRRLYRKRTRRRDHAQEALCRDVIERLYAEGVDTVYIGDLTGVLETHWSVKANAKTHNFWAFEKFMDRLACTAEEYGISVEVRSEAWTSQECPQCGSTDRTTRHQETLTCPCGFEGHADLTASKTLLERQTEQEVRPMARPVRFEWDDHDWSGKSHPHNSPKEARTDRSTVDRRENCLRGDGIATIPREEYHG

SEQ ID NO: 34929 - protein, 302 aa, Halorubrum sp.
IEYSHRYHAYPTQEVAADLEYHLDVHRQLYNHVRWDYTNSPEDDKPSEYDQNNKLPTWKRKWPVFGELYSKAAQATVARFHHNLSSLRKKKEDGYNAGRLKRQSPTEYRSVTYNQSGFDLDEKRGHDKYAYVRFSEIGWVKIRCPRPIPDHAIIKEVTIKKEMTGEWFVSFGLETDDAHLPEKPDVDSLNTSNSVGIGLGIQNYIHTSDGKTVGWLDLEDDYERLRREQRKLSRKQHGSNNYERQRQRVATIKRHIRRKVLDYRYKITTWLVKEYDAVFVEDLTIQSMLQGDGNARNEQHVA

SEQ ID NO: 34930 - protein, 404 aa, Halorubrum sp.
MAEVRRTVVVKLNVDDSDATLLHETIEEYLWACNYVVQDAWQDDYKPTSKNKLHDRTYSDVREQTRLQANLVQSARNRAAEAIKGVIARWQNGKKASQPHFTTPSVRYDKRSATFHDDHVSLSTVSGRIEAEYVLPPEGDNPQTKYLCNDEYEVTDATLQYRDATDTFFLHIGTKADVESEIPDEGDAENSTVLGVDLGIEQIAVTSTGMFWSGGYLTHRRQEYERVRGDLQRTGTESAHRTIERMGDRERRWVEDYLHRISKAIVQEAVAHGCDRIAFEELTDIRDRMPDVKKFHAWAFRRLYDYVAYKAEGEGIDTTQVDPAYTSKRCSKCGTTLDENRRSQARFCCQKCGYEVNADYNAAKNIGFRLLRAEQKSPHGGAISHLALKSGTLNVNGGYSPASE

SEQ ID NO: 34931 - protein, 298 aa, Halorubrum sp.
SFFSLKKKGEANGKPGFWGNSEDGRELRTYIRDTSYSVEWGEYSRLEILVGKDLKNEYGLGHRERLRLEVRGDPNWKEYDKQGRLELFWDETARRFRAFQPVAVDTSRLAQPLASEEAALDIGANNLVARTTTTGQQYLYEGRDLFDRFRETTREIARLQSLLEEGRYSSHRIRRLYDRRTKRRDHAQNTLARNIIERLYYEGVSTVYVGALTDVLDTYWSVETNAKTHNFWAFRAFVNRLVCTAEEYGMSVEVRFEAWTSQECPNCGSTEDTTRHRDTLMCPCGLRGTRTSQRQRRS

SEQ ID NO: 34932 - protein, 425 aa, Halorubrum sp.
VADDYVRRTAITRLEVTDEQRDLLEETISEWKRGCQLATDMAWDKCNAKSDVQPLAYDDVREHTDLGSQHAILATHQAAQAITGCIERRSNGKRVSKPTFTAPTVTYDTRTMTLFDDDTVSLSTTESRVRCQLALPTADDGYQRQYIDSDTWSVTESTLTARDGDYLLHIGFRRHKNDAERNTAEDGTVLGVDLGIENLAVTSTASFVSGRELTHNLREFERVRGGLHQTGTRSAHRTLEQVSGRELRYVRDVLHRASNAIVNEALRYECDVIAFEDLTDIREQTGASWGHRWAFRTLYEQVEYKAESVGVSVKQVGSAYTSQRCSECGFTADENRPSRNDFGCVKCGSEANADYNAAKNIGMRYVRRGQQSSRRTGNSQLALKSGTVTPSGGFTAHPEGFEAEFMDKPPSTSEPVRVSEVGSGS

SEQ ID NO: 34933 - protein, 387 aa, unknown
  TnpB Polypeptide
MGSMDKGFEYRMYPSQEQELLLVRTFGCSRWVYNHFLEEKVRVFKETGKLLSYCKCSKMLTKIKTQKGTVWLAEVEAAALQQSLRNLDRALDNFFKRASQGVGFPKFKKKKSRKTYRTPAAKIVDDSHVWIPKVGLVKARISRPIQGRIVSATIKQTPSGKYFIVFTCADIPEAPKAKTGKSIGIDLGISTLVTTSDGEKIEGVADTGKLEKKLAKEQRNLSRKKKGSNNRKKQKIRVAKVYEKIANKRKDHIHKVTAKLISENQVVCAETLNVAGMMKNHHLAKSIAAQSFATIFGFLEYKAKEKGKIFIQVDRWFASSKTCHSCGVKADAMPLNIRSWQCKNCGARHDRDINAAQNILAEGIRVLNGTEGHSGTTAESFAVTLVE

SEQ ID NO: 34934 - protein, 386 aa, unknown
  TnpB Polypeptide
VIQTKLTETIKLSFTREQEKIIHSAMDEYIRAVNETVSLAIRGIDIRKFSSKDIRANLPSAVRAQIAQDARSIIKKHRKECHKAVLQNKRLIAKGSPVRVTAPHLPVLKKPCCYWNNQNFVISKDTFSTEDTIYLSVPVLINGKSERIRIKTFCTEEQYDTIKSHKLGTLRIVSKNSKLIAQVSIEEAAPELLPDNKVMGIDLGIKCPAVSFTSDGKVKFYGNGRHNKYMRRHYKYLRKKLQQKKKMAAVKRINNKEQRIMKDIDHKISRSVVNEAIKQGVSTIKLEQLANIRTATRQSRKNNPSLHTWSFYRLAMYIEYKARLAGIQVAYVNPSYTSQKCPKCGSLNHAKDRWYGCSCGYHTHRDIVGARNICASTEIVGNRLSA

SEQ ID NO: 34935 - protein, 340 aa, unknown
  TnpB Polypeptide
MIQRQLKLRLNTPQEKQLDTWLFQLTGVWNWAIRKIEQDAKDGMYYSQKAFHNLLADHGKKLGIPSHTLQGMLDTAYLAWQRCYKQLSKKPKLKGRCNRLSSIPFPDAFKPPTGTRIHVPGVGAVRFHRQDLPSGRLKSGRIVKRPSGWYLCLCIDTQPNVIPIAGTGAIGIDPGFLHLLTLSTGEKMLHPHELRQTADRLAQAQRGTRRHLTARLQERLANQRKDRNHKLSRRLVAEHQTIAWSRDNDKALARMFGKSVASAGHAQLRGMLAYKCTASGRQFLEVPSKYSTKTCSACGSLSGPTGYAGLQVRQWTCGALPGSSRKIVAEPCWRNAVLVR

SEQ ID NO: 34936 - protein, 414 aa, unknown
  TnpB Polypeptide
VGALRVVRGLSFRAGDLPPALFGLLEEFRLIVNKSIRIALREDVRSRVRLQKAAYRDLSEEHRVYKQYIPSAFEVALAVLKVYRKRVRKGKRTTVPFIRRLILKAENQSYRLERATGRLRIPIRRGEHVDLDLHLSEWHRSFLSDPSWGLGSLTVTPGRIVVTVRKGSPMPYEATSAIALDTNEDSLDGVEASGETSRLVTLPFGGLRQVQATHFRRRRRLARKKAHDRRVKRRLLAREGTRERNRVVQRLHRVSKLLITRAKMKRAAIVLEDLALNRAGGRSRKMNRRLSSWPRGEIHRQIKYKAALAGVPIIKVNPAWTSKTCPVCGARRRGRVGQDFVCLMCDWEMNRQINAGMNILKTAIASNEALARAVRFRPAALRDDVVSPLYDLLARPAIAREEPSGVECDADVVR

SEQ ID NO: 34937 - protein, 655 aa, Micromonospora sp.
VLGAGVNLKEWAAATGVSYATARRRYEAGALPVPTYRLGRLMVGEPGTGTLAEVGRVVVYARVSSADQKTDLDRQVARVTVWATGQRLAVDSVVTEVGSALNGHREKFLALLRDPAVTTIVVEHRYRFARFGAEYVEAALSAQRRRLLVVDPAEVDDDLVRDPHLAVRTPIRSPCRGEPSSARGRSGYRGTVVKTLQAYRFALDLSPRQERAVLAHAGAARVAHNWALARVKAVMSQRAAERTYGVPDELLSPPISWSLPSLRKAWNAAKDEVAPWWAECSKEAFNTGLDALARALKNWSDSRKGARKGRAVGFPRFKSRRRSTPTVRFTTGVMRIEADRGHVVLPRLGALRLHESARKLARRLEAGTARIMSATVRREGGRWFVSFTCEVERAVRAPARPGSMVGVDLGVKHLAVLSTGERVANPRHLVVAARRMRRLARAVSRCVTPDRRVRRVGSNRWARAQQELSRAHARVVGLRRDGLHQFTTRLTREHGTVVVEDLNVAGMLRNRRLARHVADASFAEVRRQLTYKSEWNGGRLVTAGRWYPSSKTCSGCGAVKTKLTLAERTYTCTACGLSLDRDLNAALNLAALAREVTDDRSGRESLNGRGADQKTRSRGQVAVKRLPGTARAGQAGTVPPQGGTTAQRSLLSTRR

SEQ ID NO: 34938 - protein, 276 aa, unknown
  TnpB Polypeptide
MVKRLAKSGFPYPKQLGEIFLTEPLPEESFNKSAVVKYENGQWYISVQQHITVASLVKGETSRICALDPGVRTFQTLYSENQVVKYGEGFSKAILLPVAQSISKWISKRDSFIAKFKDRQETQYYNDMMKCFERKLNKLKARRNNLINDLHKQVAYDIVMNNDVILLPSFNTSNMVSKGKGGKRKLGKITVRSMLNLSHYKFKVYLNYLAMKYGKTVIEVNEAYTSSTFEGKIFSIGSKEEFKTTLGKIIDRDITGARNILIRFLTKSCRVNILHT

SEQ ID NO: 34939 - protein, 301 aa, Streptomyces sp.
VLRERRDARRHTSKTSITYGDRSAQLREIRAVDPERRGRVRTISVKREGNRWYVVLACDEVLAEELPPTGGIHPGTARALVGDHDVIAHERLDTAGVTKSPVPTADPERPGGFLPDGAAANAGLNRATLDAGWAQFLAIPANRAESAGRLVVPVAARDTSRTCSHCGHVATENRVTRERLPCTACGFAANGDHVGATNVLDRAGLVLCAAARPPTQEARASTRGWSHEQASRTGVERGSGRTGSPLRSISLDNAPPGDLVTLRRCERTCAGRTSVRAPPVGPPHRLVRRAITPVHRARYYQ

SEQ ID NO: 34940 - protein, 243 aa, Streptomyces sp.
VIRAHTVLPRPTARRTAALGETPRDHRSRHNGVLRERRDARRHTSKTSITYGDRSAQLREIRAVDPERRGRVRTISVKREGNRWYVVLACDEVLAEELPPTGGIHPGTARALVGDHDVIAHERLDTAGVTKSPVPTADPERPGGFLPDGAAANAGLNRATLDAGWAQFLAIPANRAESAGRLVVPVAARDTSRTCSHCGHVATENRVTRERLPCTACGFAANGDHVGATNVLDRAGLVLCAAA

SEQ ID NO: 34941 - protein, 424 aa, unknown
  TnpB Polypeptide
MNKNETIKASVKATKAKRKTQICRVYETKIDLSHLNHATQEHLNRLFLEGKWLRNYVLSQKKIFGIDDKIYEVPVKVKDVFEIRELKCLSSQMRQNIIGRIQDDIRGLAEKKKKGYKVGKLKYKSEMQSIPLKQFDNTFKILDDKKYIHIQGIKQKLKMIGLKQIPEGADIANGTLIHRNGNYYLTITTYQEKVKQVPANKSVGIDFGLSNQLMLSTTAIAIQYSIPVSPKLRRIARTLSKQELHSRNWNKTRIKLNKEYEKATNIKQDIKNKVVSFLKNNYEIICVQDESLKAWQRIWGRKMLSTSIGGIISALTKKAHTLIEVPKNFPSTKTCSKCGNIQDMPLDKRVYVCENKKCGNIMDRDYNSADNMEIEGLKQVGTERIELTPVEIESSTLIALRYFNSIPRIKASSVYETGSFTALE

SEQ ID NO: 34942 - protein, 418 aa, unknown
  TnpB Polypeptide
LYRHEIHGFRRVEIHIWITIRKAVNRAHKIALDPTDTQEAYFRRACGVSRFTFNWALDAWKRQYAAGEKPSGSALKKQFNALRHVDFPWTGEVLRDATAQPFVNVQRAFRNFFEKRGKYPRFKKKGLHDSFYIANDKFEVDGQRIRIPHIGWVRMREALRFEGRIQSAVVSRTAHRWFVAIAVEVPDQLITRENQAVVGVDLGIKALATLSTGEHVLAPRPLKAALEKLQRLSRQLARKQKGSQRRAKAKIKVARLHYRISCVRNDALHKLTTGLVHRFGTVVIEDLNVKGMVQNHCLARAISDVGFGGFRRQIEYKAAANGVRVVVADRWYPSSKTCADCGFVVDILPLSIREWACPRCGVVHDRDVNAAINLEKLGRATPEGTPVEKQALACRPMRVKPASVKRELTGAQTCALER

SEQ ID NO: 34943 - protein, 412 aa, Streptomyces sp.
VIVVQLRYSFRLYPSVGQRAALARAFGCARVVFNDALRVREEARAGGLPFVTSAELSKRLTAVKKTPERAWLGEVSAVVLQQSLRDLDTAYKNFFDGLKGKRPRMGAPRFKSKRDNRQSIRFTANAAWRITSGGKLRLPKVGDVPVRWSRTLPSAPSTVTVVKDAAGRYFASFVVETHAYEVLPQTTPEIGVDLGLGHFAVLSDGTKINSPRFLRRVEKRLKKAQRDLSRKEKGSRNRDKARIRVARAHARVTDARRNFHHQLSTRLIRENQAVAVEDLAVKGLARTRLAKSIHDAGWSAFVRMLEYKATRYGRTFMKIGRFEPTSQVCSACGVKDGPKPLSVREWTCGACGTVLDRDVNAAVNVAKAAGLAVPACGAQVRRVPVPAPRSEAGTHPKQPTRLVREQAGILGL

SEQ ID NO: 34944 - protein, 386 aa, Lachnospiraceae sp.
MLLAKKIRLLPTEQQEILFWKSAGVARWSFNYFLAKNERAYREHHKYLSGNEVRKYINNVLKPTTHIWLKEVGSNVMKQGVKDAEKALKEFMSGLRGKPHFKSKRKSMPSFYVNYESLTRKPYGFHGEKIGYVKTSEPLPKLKKGEKYSNPRITFDGKFWYISVGYEINDKNTIELTEESIGIDLGIKDLAICSDGKTYKNINKTKEVRRLKKKLKREQKKLSRKLEHNIKGYEANRKPIFENPLRECNNFQKQKKKVALIHRRIANIRNNYLHQTTTEIVNKLPKRIVMETLNVKGMMKNKHLAEKVAEEKFYEFKRQIKYKAELKGITVEEVPTFYPSSKKCSCCGHIKKDLKLSDRVYICSECGLKIDRDFNASLNLANYKSA

SEQ ID NO: 34945 - protein, 457 aa, Mycolicibacterium sp.
VNVPWSGFDLINRFNAWKKSEHAGRVFTVDTEGVTEIAVTGLAWRDRVYQQVFEEAAVDLAGGLAAWSDSRSGKRRSKRVGFPQFKKKTANSPSFRLRNKRGKGHPSGIRVGDNGRPRSVTLPGLGQVRVQDDTRRLRRMLADGRAKICFATVSHHGGRWWVALNVQAAELHHKQQHPTHIDPGAAGWVGVDRGLSTFLVAATADGTEVARIVAPKALAVGMNRQRRLAKSLSRKKKGSRNRKDAAARLALHHRHVADSRRHFLHQVANEVVKTHDRLVIEDLNVAGMMRNRRLARAISDAGWAEFARLLKYKQAWRGGHVVEADRWYPSTRRCSQCGEVDHTLTLADRVFTCGCGHAADRDTNAATNLARWGLTHHRLDRPPDPQAGGRANNAHRRDGADQYPLCPGETNPDEVGTDVRTAPSGEHRRRPRRAVSPINAFVGHASATQSHTDRNDH

SEQ ID NO: 34946 - protein, 394 aa, Salisaeta sp.
MRYNTAYKFRFYPTAEQKVALAEVFGHTRYVWNWALNLRTRSYYDEGKSLTYTATSKRLTKLKRDDDHQWLRNVSSVALQQKLRDLEQAFQNFFGGRAGYPNFKRKHGKQTARFASNAFTLYGKSLSVAKVPGELNVRWSRDLPDTCKVTSVTLTKNPSGRYFVSLTCTEEKEPLPETDTAVGIDLGITDVVVTSDGSKSGNPKHLKEDLHRLRKAQRRLSRKKKGSENWKKQKRRVARLHAKIADKRNDFLHKLSRKIVDENQVIALETLNVKGMQQNRNLSRSIADTGWSTLVRYIEYKAKWAGRTVVKIDRWFPSTKRCSECGHVGETKPLSVRHWQCEACGERHDRDVNAAKNIRTAGLAGAQKSLREDCEGRGKTHKAFVRSGHGPVKQ

SEQ ID NO: 34947 - protein, 412 aa, unknown
  TnpB Polypeptide
MKAANGESSKYVSQGWKRTANGSAPSYGEDYVNLGAVNKQYAAIENDPFADGEIVLKMVIQGQWYRLIFNFDNKRFTEGRVTLPVIKVEDGEPVFIFTVVTDNPVVQFSGDYVIGVDVGISNYATVVVREVATGRIVYETTLSQRVHSLWNSVRASEQQVRDLKAKAVTLLCDRQARMAALDEAQFHREAASRKKRELAILAAQEIADLSHAWGNAVVAVEDLSWIVNTMQNGRWNRGELMRWLAHYVTQNGGWVVAVNPSNTSQKCYACGAQVTHPTHKDSVCPEHGEMDRDVNAAANIAARAVPRVAKARLTRAKNRKLGPQAALRTPVARNSLKHPGRDRTKNKPTPKRKNHRRVSREVILPVCPARAQAQRLEARVLADQGACDTLGTVQAALKRGNVAYKCRLCSLI

SEQ ID NO: 34948 - protein, 378 aa, unknown
  TnpB Polypeptide
MKLIAQVKLLPTPDQADALKQTIEQANLACQFVSDCAWESKTFRQYGLHHKCYQSVREQFGLSAQITVRVIAKVADAYKLDRKTKRTFKPTGSIAYDDRILSWRLQDRTVSIWTVNGRLRIPFVCGERQRELLQTRQGESDLGIFRGMFFLSATCEVEELKPVDVEGALGVDLGVANIAVDSDGEIHSASHINNVRHRHHSLRIKLQAKGTRSAKRKLKQLSGKESRFAKDTNHRIGKQIVAKAKDTKRAIALEDLTGIRTRVTVRRCQRATLHSWAFFQLRNFVEYKAKRTGVPVILVDPRNTSRTCPVCGCIDKANRPSQGVFSCVVCGFAGLADHIAAVNIGRRANVNQPIVARDEAKANFPLELRQSAVTSHLH

SEQ ID NO: 34949 - protein, 292 aa, unknown
  TnpB Polypeptide
MLKSFKYRLYPNKTQEIQIQKTFGCCRFVYNQTLAYRKNLYETEKKSMSKFDCNTYCTQVLKKEYVWLKEIDKFALNNAVFNMDSAYQKFFKEHSGYPKFKSKKDNRKAYSTNSTNNNIEVDFENNRIKLPKLKWVKAKVHREFVGIIKSATISQTPSDKYFVSILVDCENFHMKPTGAMIGIDLGIKDLVITSDGDKFENFKTLYKYEKKLAKEQRKLAKKAKGSSNRNKQRIKVARLHEKITNIRIDNLHKISHKLIQENQLIVSEDLKISNMVKNHKLAKSILIVVGMN

SEQ ID NO: 34950 - protein, 397 aa, unknown
  TnpB Polypeptide
VNVRYRFRFYPTKAQRIELGRTFGSCRYVYNWALRLRTDNYKAGKTVNYYDSSAALTKLKTQEDHAWLNEVSCVPVQQALRHLQTAYRNFFDKRTGYPSFKRKYGKQAAEYTKSAFKWDAVNRNLSLAKIGRLRVHWSRPFESSPTTVTITKSRDGRYFATLVLDEKIATLPKTGAAVGIDLGINRLATLSTGERIPNPKHLSKRTKQLARAQRVLARRKKGSSRRAKQVLKVARIHARIADSRADYLNKVTTDLVRRFDVICMEDLNVRGMVRNHCLARSLSDASFGAFRSMVEYKCGWYGKELKLVDRFFPSSKRCSACGHVVESLPLDIRQWTCPECGASHDRDENAACNILMAAGGQPVTTARGAGARPRKATASRGIPRRSANRSKVGAECV

SEQ ID NO: 34951 - protein, 397 aa, unknown; identical to SEQ ID NO: 34950
  TnpB Polypeptide

SEQ ID NO: 34952 - protein, 416 aa, Lactobacillus sp.
MKSMAKMKYHYGLKMRCYPSDQQKQLIKINSDASRFIYNEMVAINKELMQLRRVKLPIDIVQDRIKQLTMRQNAKQMSNHYQFLEDKRIDSLTKANAIQNYRKAWNAFRKVHATGVPKFHRKSYHWRYQTNCQYPGQKTALLTNGTVCFLDNSHVKVPKIGLLRVAGSQVRLLKRICETRIGTVTLTKDSADRFFLSMQLASDESFVKVSKATHGHVGIDLNTDNFLTDSEGNIVPNPRYYRTIKGKLAKEQRILSRRQQRAKKEHRSLRDSKNYQKQRLLVAKLHAKVMNQRHNFLQQISTALIKNHDLVVAEELRSKNLLKNHALALSISDVGWRTFLGMLAYKAKLYGRQFITINPRNTTQTCRDCGFVMGTNGTDKLTLDDRNWTCPNCGIHHIRDWNAAKNILDKGIAKLA

SEQ ID NO: 34953 - protein, 343 aa, Lactobacillus sp.
MLLDQLKEVDIVKSMAKMEYHYGLKVRIYPSDKQKQIIKLNSDASRFIYNEMVAINKELWQLKQVKLPIDTVQSRIKQLELRQNAKQMSNHFQFLGDKRIDSLTKANAIQNYRKAWNAFRKIHTAGVPNFHRKSYVWRYQTNCQYLKQKEAYLTNGTVRFEDSKHVLVPKLGRLRVKGSHQRILARSAETRIGTVTITKDAIGSFFLSMQLASDAPFVTMSKQTNRQVGIDLNTENFLTSSDGQVIANPRYYRTIKGRLAKAQRILSRRARRAKKEHRSLRESRNYQKQRLLAAKIHTQIFSRRRAFLHQLSTTLIKEPRFSSCRRVAEQEYAKEPRFGDEYC

SEQ ID NO: 34954 - protein, 283 aa, Lactobacillus sp.
MLLYQLKEVDIVKSMARMEYHYGLKVRIYPSDKQKQIIKLNSDASRFIYNEMVAINKELWQLKQVKLPIDTVQSRIKQLELRQNAKQMSNHFQFLGDKRIDSLTKANAIQNYRKAWNAFRKIHTAGVPNFHRKSYVWRYQTNCQYLKQKEAYLTNGTVRFEDSKHVLVPKLGRLRVKGSHQRILARSAETRIGTVTITKDAIGSFFLSMQLASDAPFVTMSKQTNRQVGIDLNTENFLTSSDGQVIANPRYYRTIKGRLAKAQRILSRRARRAKKEHRSFARK

SEQ ID NO: 34955 - protein, 368 aa, unknown
  TnpB Polypeptide
MNTTLQLKLAPSADQHQALVHTMESFNTACNWIAGVAYENGSANRNIVHRLTYQEARERFSLPAQLAVRAIAKVCEALKRDKKKQPKFKPHGSVVYDQRNLSFRSLDTVSILSVSGRLKMPVVVYGYAHDRITAYGVRGQADLVLRNGHFYLCVVVDIPEPPRGQPKDWLGVDMGVVNIATDSDGENFSGAEVNGLRRRHASLRARLQSKGTRSATRRLKQQSGRESRFGRHVNHEVSNHVVAKAKGTERGISVEDLTGIRERVTVRKAQRRALHSWGFWQLASFVEYKAALAGVPFVKVDPRNTSRTCPGCGHVAKANRPTRDQFLCVSCGLAGPADHFAAVEIGRRAAIGQPYAAAAVLGLAASCQ

SEQ ID NO: 34956 - protein, 368 aa, unknown
  TnpB Polypeptide
MQRTIIVQLDVKAGREALLATMEQYTACFNVAAEFGWKNKTTNGVAIHHATYYPLREQYPSLHSRLVCSSRAKATEALQSVRVRLAKGKAATLPQSRCQSVRYDVKSYTISLTEGWATLATVAGRQRVTFDASFTRLQTWKPTSAELVYRRNQFWLHVVVESPAPVYTATGEVVGVDLGIVRPAVTSEAQFFGERRWRNVEQRYFRLRRALQAKATRSARRKLRKLSGKQARFRRDCDHVLSRRLVESVDPGAVLVFENLTGIRDRADFGRHGNRRLHGWSFAQLFAFTAYKAEEGGKTTATVDPRGTSQKCSRCGHVARGNRVSQSEFRCQKCGFRINADLNAGRNVKGKYLTREAIGVPSGPRQPA

SEQ ID NO: 34957 - protein, 341 aa, unknown
  TnpB Polypeptide
MGQVAPLSTRSTSAGTLSIIGHLTYFVGAAAALRRNGREVKYPWRKPEFHDIIYTNQAVTNINGYELRLPNGSAGALFIRIPRRMLWPAGRLMEARLSYGKLELIWDCEMALQSGGPTLGIDLGVNTLLAATDGETAVLVSGRELKATVQWRNKRLASLSGKQSNCHRGSRQYGRLQRRKRKLLKKSENRVKDLTHKATRIVADTFPGAKCYVGEPFNDASQKMSRKTTQQVSQACNRRLITQLDYKTAGAITVGEAYSSQTCPVCGTRNKCQRTYRCKQCGFTAPRDVVGSANIRCIGSQGALVPGCDVPNVWTYKYPGVIAPGSSGGRPARSSRKREAA

SEQ ID NO: 34958 - protein, 394 aa, unknown
  TnpB Polypeptide
MPIVYRSVKLDWLPHSRSEWTIFTAARSDSGRLWSDLVERHLRIRRRQLKWPSEARWRRWAKGRYPNLHSQSVQEIIREFCEALKSTTAKRRGGLGSSYPNHKPEFRDIPYTNQGAVVRNGSVRLPHGDSGYLFVRLPFELPGRLMEARLAYGAIILVCQCEEPAIPTGSTIGVDLGINTLLAATDGEKTVLVSGREAKATVQWRAKRLATLRSKLSNCHRGSRQYGRLQRRKHKLLKKSENRINDITHKATRVVVDTFPGAKCYVGEPFNDAAQKMSRKTAQQVSTACNRRLITQLDYKTAGAITVDEAYSSQTCPVCGTRNKCQRTYRCKQCGFGAPRDVVGSTNIRCIGMRGELAPGCDVPNVIRYKYPVALVAGSSGGRPAHSSRKQEAA

SEQ ID NO: 34959 - protein, 402 aa, Bacillus sp.
MKGGERMKTFHKGYKFRLYPTSEQATLINKTIGSCRYVFNWALGKQNDKNMYWYITEEMVQNGQLSENNWKSEYFRSFNVQKELTSLKKEWAWLKEVDSTALQNSLQDLGTAFSSYYKKQKGKPRFKSKKNEIQSYTSKCNNGKSGSTIRVRNNHFIQLPKLGLVRFAKSKEVKGKILSATIRRTPSGKYFVSLLTEQETEYAQSSFFEIGIDVGLKEFATLSDGTKIENPKWFRKMEEKLTKAQRILSRRKYGSSNWYKQKKKVARIHEKIVNQRNDFLHKVSTSLVNENQVICIENLRVKNMLKNGKLAKAISEVSWSEFRRMLEYKCKWHGKELVVVGAHFPSSQLCSNCGEKNKKVKDLSIREWTCSCGAVHDRDENAAKNILQEGKRLLTVGQTGIA

SEQ ID NO: 34960 - protein, 457 aa, Moorea sp.
LYRTIPVKATFSDEEKAFWEFQCKQANSLFNCAIYYAKQKHYHWLEEQEAYTTYWRDDELRCGWKTYKCTTKYPEIDKALKMSPHYKGMAAQSAQQTLKTVGEAINSYNKLVGLYYLGLVDRPRFPRYRKSGGFASVTFPRQALTYKQGLFYPSVSKESKPELLTQITLLPPDFVDPDWVKEVTVRPCYGQLWIDWVIDDGKQPVTSNPKLDYSHAIGIDHGGDNWLTCVSTLGKSFIIDGRKLKSMNQGYCRLVAKHKSGKPEKYWDSHLDKIQLKRNNQMRDAINKAARFLVSRCLNDGIGNIVFGWNEGQKSSSSMGKKGNQQFVPIPTKRLIERLKQLCPEYGINLITTEESYTSKASFLDGDSLPKYGEKPSGWIPSGKRVRRGLYRTASGILINADANGAANILKKVTKQSFNMTKMVRGALTLPHRYDLFTNLSKSYRNKGEAVRVHPTA

SEQ ID NO: 34961 - protein, 291 aa, Erysipelotrichaceae sp.
MVCGHPENEVLMIQHKGYKFRIYPNKAQAVILSQFFGCCRFVYNRCLSYRKEVYASDKRNVSQYECMRLVTQMRHDPDYAWLSSCDSMSLQESIKDLSKAFANFFEKRGGYPKFHKKSSVQTYRTRNQSGGIRIEENRIVLPKLGAVKAKISRCLKGRILSATVSRTATGKYFVSLCCEEELIPKPNAKGMIGIDLGIKELYVDSSGFHELNHKYLSKYEQKLHREQRSLSRMIEVNIAGYTSDRKPIWKRPLFECSNLQKQKRRIARIHEKIYNCRSDHLHKVSSQRSSS

SEQ ID NO: 34962 - protein, 242 aa, unknown
  TnpB Polypeptide
MYFVRNNPKDCLCNRHRIKIPSLGWIRIKEKGYIPTTKDGYVIKSGHVSIKAGRYYASVLIEIPDRRTANNSSKGIGIDLGLKDFAIVSNGKTYKNINKSAKLKKLEKKLIREQRSLSRKYENLKKGESTQKRNIQKQRLKIQKLHQRIDNIRTDYINKTIAEIVKTKPSYITIEDLNVSGMMKNRHLSKAVASQKFYEFKTKLLAKCKENGIELRIVDRWFPSSKTCHCCKNIKKRFKAFR

SEQ ID NO: 34963 - protein, 384 aa, unknown
  TnpB Polypeptide
MGGNNITERKNKALEPYGKCIYNYGLLLELIPGDQTSRINQNIGNSRYVHNNYLAERIKYYDEHRETLSIDQYKKEFLPKLKEEKEFLKRTDKFVYQNACQNVDTAYQNFFSGKAGFPNFASSRKPNGNSFTTNYTNNNIELKMIDGLPYLKLPKIGNVRFVLPKGKTLADLQPQGVSIKSATVTRTNSRYRVSLQMETVIDRPVFPTVIHADEVFSVDLGLKVFGMFGNAKETFTVPNPRWIKVHARRLRRFQQSLSRKQYDHNTHKGSKNWEKARAKVAKEQRKTADQRRDFHHKLARAIADNYTAFICEDLAVKNMMKNRHLSKAIASVGWSQFLTIVKYKMEKAGKYFRKVSEVNVTRSRSLFFSSPMMTRIISRVRCPS

SEQ ID NO: 34964 - protein, 366 aa, unknown
  TnpB Polypeptide
MNLRSQQIELNPNNKQSTLMSQHTGYARVAFNFALSSFKVGLDKDEWRDYREIKREFNAVKREKFPWCSELSQNASKNAIHNLGDAVTRWKKGQNNFPVYKRRDGKCSYQADNGQGTVDVYKKRINLPKIGWIRMREELQWTGEITKVVVSKHNGKWYASITVRRLDSNNYKHQPLLFDDSKQPIGIDVGINTLATCSDGTTHENPRPLKRYERKLQRANRALSRKVYQSKNWYKAKKVLSNVHYRIACIREDAHHQVSTTIVRKASAIGIETLNISGLLKNRTLAKALSDSALSRFLRMLKYKAERRGIPITQADQFFASSKTCSNCGHKKKYLMLSDRVYNCLKCGFTCDRDLNAAINLCPTPT

SEQ ID NO: 34965 - protein, 401 aa, unknown
  TnpB Polypeptide
MNITRGYKTELDLNNKQIMLCKKHAGCARFAYNWGLKRKQEVYKATGRNISAMELHRELIVLKQTKFAWMYEVSKCVPQEAFRDLDNAFKHFFRRWRLKKEGKYKGKLGYPKLKSKKKGLGSFRLTGHIHIFEKAIQLPRLGTLKLKEYGYLPTEGVCILSATVSEHAGHWFVSVQVEESIPDLTPATGTPIGVDLGIKTLAMCSDGTAIANPKVLRKNIKKLIRAHRRLSRRTKGGKNRAKARKQLARMYYHVGNIRRDALHKATTLLTAKPKREKKQVSKQCINTPSKQQVIRRERPQTIVLENLNVAGMKKNHKLAQAISDVGMGEFKRQMLYKTAWNKETLLLADRFYPSTKRCSRCGHVKEKMSLAERVYVCENDACKLVLDRDLNAALNLAALAQ

SEQ ID NO: 34966 - protein, 440 aa, Mycobacterium sp.
MQMRYRYRIEPTLAQQQMLARVFGCTRVVFNDALRVRDEAYRAGVRLSDSEIQRRVITAAKTTRERVWLREVPSVALVQSVNDSRRAWRNFFDSCSGKRRGRKVGRPKLKSRKDHRQSFRLTRNGFSIRPSGRLFVAKVGEVRVRWSRDLPSVPSSVTIIQEPDGRFYASFVVDVPASPLPVVDREAGVDLGIVRLATTAATDGGRIDIVNPKHLRRKLRKLARLEREKSRRQEGSANRDKSRRKVAVAHNEVARARRDYHHKQALALVRDNQVIHVEDLNIVGMVKNRHLARAISDAGWGQFVRIISEKADRYGRTVHAVSRWLASSKTCSTPGCGYRTGELPLQVRQWTCPSCEVSHDRDHNAAKVILAAGRAERLNASGVSVRPPTHREARGDEAGSTPSRRDRAGTPAIHTGSTSMRRPITRNAAAHKPVPCQLSR

SEQ ID NO: 34967 - protein, 422 aa, Oscillatoriales sp.
  misc_feature (422)..(422): Xaa can be any naturally occurring amino acid
MYSTQKNQLRDLSKAEFLALRELCRPSKNLYNVGLYTVRQYFFEERKHFYESVYHLCKDNENYQLLNTDIAQQTLKVVDRTFQSFYGLIGAIKSGVYQQKVRLPHYLPKDGYFLLIIPRIKVKNGKFKVPMSHAFKKQFGALVLDFPERLNPETIKEVRIHPKYDARFFEIEYISQSESEPVETVENSALAIDLGLDNLATCVDTNGASFIVDGRRLKSINQWFNKENARLQSIKDRQKIVGSTSGMPQRLTERQARLYINRNNQVRDYLNKAARWIVNHCISNKIACLIVGFDPGIKQEINMGSRNNQNFVQIPFHAPSNKLKSLCERYGLIYKEQEESYTSKSSYLDGDDLPVYNADKPVAYQFSGKRIKRGLYRSKEGHLINADAQGAANIGRKSKQNGFTGLSRGCESPAVANQALLX

SEQ ID NO: 34968 - protein, 943 aa, Oscillatoriales sp.
MYSTQKNQLRDLSKAEFLALRELCRPSKNLYNVGLYTVRQYFFEERKHFYESVYHLCKDNENYQLLNTDIAQQTLKVVDRTFQSFYGLIGAIKSGVYQQKVRLPHYLPKDGYFLLIIPRIKVKNGKFKVPMSHAFKKQFGALVLDFPERLNPETIKEVRIHPKYDARFFEIEYISQSESEPVETVENSALAIDLGLDNLATCVDTNGASFIVDGRRLKSINQWFNKENARLQSIKDRQKIVGSTSGMPQRLTERQARLYINRNNQVRDYLNKAARWIVNHCISNKIACLIVGFDPGIKQEINMGSRNNQNFVQIPFHAPSNKLKSLCERYGLIYKEQEESYTSKSSYLDGDDLPVYNADKPVAYQFSGKRIKRGLYRSKEGHLINADAQGAANIGRKSKQNGFTGLSRGCESPAVANQALLGFISQESPCVRARECQSPFKIENHQSKMTAVPLPRPSPQPADRPTGRNSTDATPVFALKELVARLHRYQHNVQDMLGSLGFALRSFNNLNQFLELVPLVATRVTDADGGALVLFKPNGQVRFQQLHCQEGRQCQDMRKALEIATRQATAGAGAAGESFSETSGQTSSLDLQVGRYLGPDVHLFGAPVLVKNLERGRLFVFSSDPQYLWTPGRQKLVRLVADQTAVAICKDELTVKLAEKERLDRELEIGAEIQLRLQPRSCPTIPGLDVAARCQTASRVGGDYYDFIPADYDPIGKENEGEHPPSLIKNLKSKIDKGRWSIVIGDVMGKGVPAGLLMTMTRGMLRAEVLNRHSPARILQHLNRVMHADLENSHRFVTLFYSEYDPKTRILSYSNAAHHPPLLWQAATNSIVRLDTLEGMLIGLDADSHYQEAHVQLQPGDTIIYYTDGFTDAANQRGDRFDEDNLTAAFQLACQNYQQSEEILDYLFDRVQQFIGIGNRNEDDMTLVVLRVTPTTGENHHDS

SEQ ID NO: 34969 - protein, 409 aa, Calothrix sp.
MQNCIVVGKLSNFWSRSCQVNACSLRSCYIIPADAPRPTFASQCKSLTAARKESEYLQRVNAQSLQQTLRRLEKAFVSMWEQNHGFPRFKKQGRMRSFSFPQLSVNPLENAKSSGGNTPPGKFRGCVKLPVIGAVKVRQSRSIPDGGIIKQARVVRKVSGWYVMLTVQWDVNPPQPQPHGEAIGIDVGLTSFVATSNGLLVKRPRFFVDAVRKLKLLQQHVSRKRLGSNNWKKALYKVAKLHEYVANCRKDWHRKLSHQICNDAGMVFVEDLNLIGLSRGMLSKHCLDAGFGQFFNILEQTCFKRDVYFQKVDARKTSQICPNCGVETGKKELSQRTHVCSNCGYTTDRDIAAAQVVAKCATGMHPCGHFRAIRGLAAVGHTVKMLAEGKLCHGEYPRGKIYVNSLESL

SEQ ID NO: 34970 - protein, 383 aa, unknown
  TnpB Polypeptide
MIIYQYKLKCSKVQQALLDEAIRTCQFLRNTALRYWMDHRNEKFNKYTLQELASENNFKSEHEFALKLNSQARQQAVLRTTNAILRFFKKQGKFPKFKKDVRSFTLTQTGWKLDNECNHLTLTDKLKIGKMKLVGKRNLHFYTKEQIKQIIIVKRADGYYALFCIDIERKEDIGYTGKNIGIDLGLENFLTDSDGKHIENPRFFKKSEVALKRLQKDVSRKKKGSSNRKKAKIKLQRKHLKVQRQREDFVVKTARQLYLSNDTVFLEDLSVTKMIQKNKFKSIRKSISTICWGKFKDWLKRYSEIFNKNLILVNPKNTSQLCSCCGLMVAKDLSVRVHSCSSCGFEAHRDHNAALNILKIGQGMPKFKPKERKSSNMELVSLC

SEQ ID NO: 34971 - protein, 395 aa, Enterococcus sp.
MVYQKVAQGCLKWSAVSPSDCRSRRVVLLVKVLKACKYRLYPTSSQIEFFEKTFSSVYLVHNLLLQDRINLYREAKKNPQLKQSLPTPAKYKREHPLLKEVDSLALANAQVHLERSLKRFYSGKDVGFPKMKSRKNPVMSYTTNNQNGTIKFVGLNCLKIPKLKSLIKVKMHREVKGKIKSATISKSSTGKYFVSILCEETIACQKKTNKAVGISLGCSELAVLSNGRRIDNDCLTEEIERKIRREEKKLARKKKLASQKGLDLLEQKNYQKQKMKVAKLRERLLNQRNDFLNKVTTDLIKEYDLICIEEAHKKEFHRNCKLTKRVSDVSWSLFVSKLEYKAMWHDKRLIKIKKNDQIEATKIPTKMILDIDQELSESDTETASSIQLLLQGLNQ

SEQ ID NO: 34972 - protein, 330 aa, Bacillus sp.
MEVNQIMMNKAYKFRIYPNQAQAILINKTIGCSRFVFNHFLSLWDHAYKETGKGLTYGTCSAKLPAMKKELVWLKEVDSIAIQSSIRNLADAYTRFFKKQNSAPRFKSKKNNVQSYTTKQTNENIAVVGNKIKLPKLGLVRFAKSREVEGRIVNATVRRNPSGRYFVSLLVETEVQELPKTHSYIGIDVGLKDFAILSDGTHYENPKFFRSLEDKLAKAQRVLSRRMKGSSRWNKQRVKVARIHEYISNARKDYLDKISTEIIKNHDVIGIEDLQVSNMLKNHKLAKAISEVSWSQFRSMLEYKAKWYGKQVIVVSKTFASSQLCSCCEY

SEQ ID NO: 34973 - protein, 438 aa, Bacillus sp.
  misc_feature (217)..(353): Xaa can be any naturally occurring amino acid
MEVNQIMMNKAYKFRIYPNQAQAILINKTIGCSRFVFNHFLSLWDQAYKETGKGLTYGTCSAKLPAMKKELVWLKEVDSIAIQSSVRNLADAYTRFFKKQNSAPRFKSKKNSVQSYTTKQTNENIAVVGNKIKLPKLGLVRFAKSREVEGRIVNATVRRNPSGKYFVSLLVETEVQELPKTHSYIGIDVGLKDFAILSDGTHYENPKFFRSLEDKLXXXXXXXXXXXXXXXXXXXXXXXXXXXXXXXXXXXXXXXXXXXXXXXXXXXXXXXXXXXXXXXXXXXXXXXXXXXXXXXXXXXXXXXXXXXXXXXXXXXXXXXXXXXXXXXXXXXXXXXXXXXXXXXXXXXXXXXXXWSQFRSMLEYKAKWYGKQVIVVSKTFASSQLCSCCRYQNKDVKNLNLREWDCPSCRTHHDRDINASINLKNEAIRLLTARTAEIA

SEQ ID NO: 34974 - protein, 209 aa, Bacillus sp.
LPKLGLVRFAKSREVEGRIVNATVKRNPSGRYFVSLLVETEVQELPKTHSYIGIDVGLKDFAILSDGTHYENPKFFRSLEDKLAKAQRVLSRRMKGSSCWNKQRVKVARIHEYISNARKDYLDKISTEIIKNHDVIDIEDLQVSNMLKNHKLAKAISEVSWSQFRSMLEYKAKWYGKQIIVVSKTFASSQLCSCCGYQNKDVKNLNLRE

SEQ ID NO: 34975 - protein, 513 aa, Caenispirillum sp.
MMRTFGTIIRSEQAEAVLAPFAARMARARHWQFRELHIKGRPKLAVRKEAQQRFGLTKRQALANEFDLDQAVTAWRGMMRNRIDRLRDRMEQTEGHIARLERKMAGAPPALRASLKMRCHQKKRHVGRCRDTMAACQKTLEGPPALCFGGRDLLRQGAVEAWRDKRQGRFLLVGSKDETAGNQTAQYDPYNGRLVLRLSDADAETARAAGAPVDRRGRVVFENVVFRYGQQDLANAAERGIGITFLFFRDDRRRWHLRATIEQPEVPKLTDIRIATVGVDLNVEHLAVVVTDRYGNPVERATVPFPVAGTDGGTAQAMIGDAVKWVCDLALRYEAGVAVEDLDFGRKKAALKTYGRKHARRLSSFAYSKFGEMIASRCGRHGIDLTRVNPAFTSVIGGVKYATGRAMSRHHAAALVIARRAQGFEERFVCMGDKALGGPGRSQPRHLWSRWRNVHLMASAGGTVPHAPRRSDDGATEDGRLEPRAGPARRRRRTATTASGHHQVRAAVARARV

SEQ ID NO: 34976 - protein, 536 aa, Sharpea sp.
MTDEEYKKILKQFHKLSDRHILAVETDMPYSDVLKVVALSDRIRKAGNELVGLMRKNYDQLLRTKRYRKLLKLYGDTQDKDKRKALAKQLNEMQISYNITWDYCRRSMIPIGKKYGIDAVFALTKAEDIWNGMEKCLYGDGGIIHFSKYGDLPCIRAKQINRGISMSVKDNKLQFRLGKTMFGIQADDRFQQDEVDAVLSYLAEPENIDNKAINTLIEDACCIDTYRPCYATLVPKMIRGKYRLYLHLTIEGKAMPKYGKHGNPRHIYGKGTIGADIGTQTVAYTSDTEVGLKNLSERGNSIQTSERKERLLYRAMDRSRRATNPQNYNDDGTMKKGRKIWKYSNHYKQLKAKHSELCRINAVNRQLAINEDANHLRSLGDTFVTESKNASRLMRRTKETTVNSKGKFNRKKRFGKSIKNRCPSGFQTAVERKFKATGGTYIEVPNNYRASQYDHTADDYIKKKLSDRLYKLRDGTEVQRDWYSSYLLYCYDYRTQNIDKDKCNAEFERCYNKEKALITWIKANKIKILNSGIKVA

SEQ ID NO: 34977 - protein, 307 aa, unknown
  TnpB Polypeptide
LLVLLGLLVLRLTGRWQSGKSNTKQVANDTFTVGDHWIDVPKLGRVNMAETYRFSGKFLSARISKTAAWWFVSITVELPDEIPWNTHPPVGIDVGLNRLATLSDGRQYENQRPLAHQLKKLRRLNKELARRTKGGKNWLKTKDKLGRTHYKIASLRLDWLHKLTTEIATTSGIVAVEDLHVKGLIHNRCLSRSFSDAAVGKLLDFLESKVPRQGGMLLKVDRFFPSSQLCHCCGARKEDLTLADRIFVCPNSDCGYIGDRDENAALNIILEALRMFGLNLNMPSRVVATTRRKTAWGPGVRPKSLRG

SEQ ID NO: 34978 - protein, 523 aa, Lachnospiraceae sp.
MRQLGKTRLSMAKPAQEMHVVRLRIQTTEYEESLFAKRFHALSHVHNVMVKQAKKRIIRLEHDHEHQEMRAAYVRLLKLPKESVTPDIEKQKKALSRQMNRNCQKYGISEYDFQKYLAACGRQYRTLLSSQQVQKEASRVFRSVEHYLYGKGKEIHFKPYRNFNTIGGKSNRNGIRFDPKSRMIRWLGDTFPCLLPKDRASRDYVLEALNADIAYCDLKRLMFPNGWHYYVVIVLRGPAPRKLTVGTGTTGIDPGVSTMACVSDEQASLFELAPGAKKYNPAIRKLQQQMEASKRLSNPDRYRADGTYIKGSQGQWTFSKRYFRVRDRLKSLYRQKTAYTQDSHRQQINRLLADSRTFIVEDMNYLALAKKSKNTIRQDHPSIVTDKKGCQRVVYKYRRRKRFGKSMNSRSPGAFLSRLEEKAALYGGTVIRIHTKEFRASQYDHAADTRQRIPLTQRSKIVDGHKVQRDLYSAFLIRNTDDSLNHPDREKCFAEFPGFLRMQRTCIDTMKQNHQSMPQCFGF

SEQ ID NO: 34979 - protein, 455 aa, Micromonospora sp.
LLEVNAWRRRRRDAPLVGYQQLCRELSGSGPGTLGELDTTGARSVLRRFSDAWFAAAKRRKDGDLSARFPRRRRGLVPVRWYHGTFTLDGRRARIPTAKGTAPLWIRLAREVPYPAEQVRSITLLCEGGRLFLDVTAEVPLAVYPPGEKPDPARFAGVDLGIIHPYAVAGPDGEGLLVSGRAIRAEHRMHLADTKARRRAVARRAPKRGEQGSRRWRKYRRRARLVEGRHRRRVRQAQHEAARQVVSWAVERRVGVLHVGDPRGVLDIAAGRRHNLRLRQWQIGRLLQVLTDKATLAGITSGWSTNAAPRPPAPPAAHAFRNLVAGPCPARAVDSPGTATWSRPPASPPAPRAADPPPRQPLLCCRRWSRTVEPAGTSPVPGGPGEDQLARGGPPHHLVGSRSPTRRGSTTTTEHPVNVRGHRTRGRMRRVSIGGRAGAGWGRIGSSRSAPRVGR

SEQ ID NO: 34980 - protein, 494 aa, unknown
  TnpB Polypeptide
VTAVRRKATFRLYPNAAQEAALGRTLAAHCKLYNTLLETARLRHKAGLPAFNRTSVNEATKAVRNKQGWMAQRTTAQSVQVTGERLVRAFDAFFRRLAAGQTPGYPRFKSIERYHGWGYKAHGDGWTLLRKAEGFGAVRLSAIGTVSLRGRARFEGVPKTAEVLRQGHKWYLSVTFEVAETAVARPGGQQSMAFDFGLATLLTQVVGDPMAGEVQTVENPRWLKRKLQAIQETQRVISALEAKAPRNAKPTCALLRAYARRRRLHSQVARQRHDFYHQLSARLVARFGLIVTEELALANLVRAPKARPNEGAAADEPQFLPNGAAAKAGLNRSLLDAAPGGFLQKLRYKAEEAGSKFIEIPTRAVKPTQRCHCCGAASPKRLDERRWRCACGADHERDENAARTMLRYAYEGAWWDNNGSGADPGAQPRPETPSKRKLGWSSSLEAELDQKRRLDDRGCGPAHHQRPKCRSGSAGAGESTQVDRSLGARRHAWA

SEQ ID NO: 34981 - protein, 93 aa, unknown
  TnpB Polypeptide
MLKNHKLAKAISDLSWYAFKRQLEYKATLFGNFIVSIDKWFPSSKKCSNCDHKKEDLKLSERTYRCDECGFSIVRDLNAAINIEREGLRVLAY

SEQ ID NO: 34982 - protein, 446 aa, Bacteroidales sp.
MMQDSGATHTLSFGVTPHEGRSENLHEGCLEARRVRNEVNRLDKEGWDWDDIHDTVVDNANLVKNTTQLLVQKALKELETYHDHKDEDWGRPFPYIDETYPMRMNHNEGYALTIDESGDVHFRVSYKPYNYVKGVLRGSPDHLERVKNALNSDSWRVGVAELVHKHNEWRLHVSVTHKTRTVASPDDAETVIGVDINEDCVTLAAVTCNGDVLDSVVIEYPDIKRVRHEFFTKRKRMQTVGQTAFETVVRTEERDFVHDQLHKVSRDVTRWVSQFNDPVIVFEDLKDMRDSIDYGTRMNRRLHSLPFAALREMVTYKAAWGGIPSDNVDPKYTSQRCPRTECLHIERGNRRRKRFKCKSCGFQDHADRKAAVCVVQEWFSEQYGNVPSLETLPSVRKMRRTASGLCEEADSHGAIFASGVHRHGTSAQDSQSQAREELKTGAPVEG

SEQ ID NO: 34983 - protein, 390 aa, unknown
  TnpB Polypeptide
MVVRKVAQRIPFTPSKTQAALLEQCFGARRFAYNQQVEAFNTYDKETNPHPAYPNVTDMKGANEWLRDSPIPSNALSNAIQDFRKAQTTYFRKAQYGKNRPRFASKSDRVQSFRNCSPIRRMEGNRFPLSRKLGSVRIRRRDRIRYPLESLSSWTVKRENGVYYLVLLFNVDVQPRPQVDGQVGIDLGVKDFLTLSTGEKINYPDRLRQLEEKARWEQRKLSRRVKGSRNYRKQKAIVAKAYAKVRYYRENFQHQLSRRLIEDNQFIGMETLAVGNMTRRAKKKVDESGRPTCNGQSAKRTMNRSILRNGWSGLVGKLAYKAQWCGRSFVQVDRFYPSSRLCHSCGHKYAGLLLSEREWVCESCGASHDRDVNAALNILDEALRINQARE

SEQ ID NO: 34984 - protein, 421 aa, unknown
  TnpB Polypeptide
MIRTGIIPCKLNKATCDALNLNSGRIYSGIVSRHWRMFRQKNLWLSEKSLTRLSDMRLAGKNLSMHAHSIDAAQQGFFKACKTVRALRKAGNTDAHFPWRGKKFRTTIWKNTGIKFNAGRLELSTGQGNPKILIVLPEALHNAFRFIEVRLVYDKKARRYNWHVVIENGIEPKQAPGTNTVSVDPGEIHPAVVGDENSATVITCRARRAIQRGHAKNLASFSKALSGKKKGSRRYKKLVRAKSRCKAKYDLVMRDMEHKISRAIVDEAVNRTASTIVYGDIRDIADGIDKGKVHNQRTSQWNHGKVRAYVEYKAQAEGIAVVLQDEHYTSKTCPNCGNRHKPKGRIYQCPACKFQSHRDVVGQINILSAYKFGAPGKIPAPTNVKYRIPQNLRVMRKCRGTGQVVIPVACGEYSSQEAAGL

SEQ ID NO: 34985 - protein, 380 aa, unknown
  TnpB Polypeptide
MRTTVTAKIRIDPTNRVVATIKAYTKSLQFCVNYAWKHKITQNFKLHYAIYRTIRKRFKLPSQIAVACMRQACGMVKKAKTKPIIKNTSVGYNFPRSANIKGTTLVLRLLKTRQEFDFTIPACYEEYFSWDVSESLLRMDKKGRCFFMFTFSKEIIATEQNGCSQNIVLGIDLGVNNLAVCSDSRFYNSAKVKQVKRKFKHLRSKLQVKGTRSSKRLLKKLSGRETRWMAWINHNISKDIVTNFNGNKIVMENLKGIRKRYRGKIMNYWISNWSFFQLQSFIQYKSIMKGIEVVRVKPNYTSQICHRCGKLGSRSDGSFCCLHCGLSNFNADLNASRNLAHPMLVERQALVTVPHSRVDEHKGTSQSVIACETMAKSPPL

SEQ ID NO: 34986 - protein, 467 aa, Vulcanisaeta sp.
MAKQTKNEGTPGRVDSAASNVNNAGRNPARQARALSTEIRATLRKMARATRTVVVPSVVLTRRKYEILRELEESYGHMILELVDYGFMHGIKTFTGLKKHMYRILRNKYPQLPSHYIHMACQDAATRIKSFMELKKRGKAYTEKPIVKNVSIWLDDHLWKPLGYTAIKIATHRGWTVIELQPHKLFWKYINSGWKLRTQPKLKLDHKERRVYVYFVFEKEIEVYSPGGWITVDVNENNVTVLVNEKAYKFITMLGRVIVRYSEHRRRLQERLVIEVNGKKYPLFSIWRKRMSRLRERDRKTDWRRKIAVAIVKTAGSLGYGIVVERLPKRVSEKMINHVENPALRHRIYQAAFRGMIGAIKEAAEKHGVPIVEVDPKYSSQTCPRCGFRPMTRSAGRAMTCPRCGFSHDQDVIACMNLLRRLVNEGSVPLSPKLNDPTPEVAVLPMKEWARANSLPPTHEAVGRNGK

SEQ ID NO: 34987 - protein, 398 aa, unknown
  TnpB Polypeptide
MILRAYKYRIYPTKGQKLLLAKHFGCSRFIYNYGLEQKIKSYKETGKAISRYAIQSLLPKLKANDSTKWLNDVNSQTLQSALKQLENAFKHFYIKHNKFPRFKSKHAGKQSFQIPQNVKIDFSNGRLTLPKFSDTITCHYTRQFTGKIKTCTITKTPTNKYFIAILVEENGELPIRKPIDENKAIGIDLGIKTFATLSNGIEIKNPKYMRKTIKRLKHISRSLSRKQMGSARRNKTRLLLAKLYEKVTNQRTDFLHKTTKWLVDNYDTICLETLKPKNMAKNPYLALDIYDLSIGEFNHLIEYKSKWAGKNVIHIGQYEPSSKMCSCGYTNHNLTLSERNWKCPSCGITNNRDLLAAKNIKRFALEHHNTVRTSEIYAKDNMNPRLSSTLEAITSISA

SEQ ID NO: 34988 - protein, 381 aa, unknown
  TnpB Polypeptide
MLRVVKVRLYPNKSQKQAIHKTFGSCRFVYNILLDAKIKAYECGDNLSAYELKKRLVPMKKAQGGEFLKEVDSTALQNSVLKIDVAYKNFFRRVKLGEKAGFPRFKSKHNAYQSYQTSTASVKENKLYLPKIGEVKAKFHRGQIMEKVKTVTVSYEAGQYHASINYEDGSQERIGTNNGKSIGIDVGVKVFAYTSDNKKIRHINLKKEIANVIKSQKVLSRRKKGSSNRQKAKLKLAKKHLKLKNKRNDFLHKVTNKLSENQTVAVENLMIKNMSKKAKGSIDNPNMRSSAKSGLNRSILQQSWGKFFELLEYKLKRNGGQLIKVDPKFTSQKCSCCGHISKENRQTQAKFICTKCHTTLNADYNASINILNAVGTTVKAS

SEQ ID NO: 34989 - protein, 428 aa, unknown
  TnpB Polypeptide
MIVHWLGLCYHGSVTAINNIVLKAVKVRIYPSIEQQSHLAQAFGCVRFVWNQSLATMSQIYKETGKGISAFTMKKQIPVWKTEHEWLKECYSQCLQSSVLNLSQAFINFFDGRTGYPTFKKRQGRQSMQYPQNVKILGRSEIKFPGNLGVVKAKIHRDCIGTLRTVTVSKMPDGRYYASLLMDDGVENLVPNEDGKAIGIDLGLLDFVVTSDGSKYQNPRHLKKHERNLKRKQRKLSRKKDKITNRRRKAKLAVARVHAKIARVREDFRHKLSRKIVNENQVIVVENLAVKNMVKNHCLAKSISDAGWGMFCTMLKYKAEEIGKVYLEVGRFFPSSHLCSNTLLSLPKMDLSVREFDCAHCGKRHDRDINAAINIKNEGLRILTLGTSVTAKGGNVRPKQYGRKSTAVEAVALEFGSPPHTGTPVEGG

SEQ ID NO: 34990 - protein, 423 aa, unknown
  TnpB Polypeptide
MELRTWKANLKNLTSRQYEFLRELCRLSKNVYNESVYNIRQHYFAEKTYLRYEANYYQMKDSENYITLGSNIAQQSMRAADQSFKSFFALKEKAKKGTYETWKIKLPGYLPKDGFYPVVFSHAGESSFPNKQFQIPVSRKLKEKYPKFKMFLRIPDYILDKKVRQISIVPKHSGRYFEARFVFEDIDSKICSVDSNQALGIDLGVNNFCTCATTQGQSFIVDGRKLKSINQWYNKTVSRLCSIKDCQRLGKKWTKRQYQVTQKRNRQVSNYIYKTAKYIVSYCIQHQIGNIVVGYNDGFQDKVNLGRIGNQNFVMLPYGQLKDRLRYLCSQFSIKYVEQEESYTSKANFWGKDFIPVWNPLNPKQGQFTGHRTYRGLYKTDDGLKLNADVNGALNILRKSNVVSLDALYSRGTVQVPMRIRLS

SEQ ID NO: 34991 - protein, 404 aa, unknown
  TnpB Polypeptide
MLVKGVTFYLESDLPSEANFLLEDFRLAVNNAIRAGLRARVTSRNALNKLAYKDFRREHPRMYSQHLVSAFEVAGSVLKNHRRRFRKGVTSRIPYVRRLMMRAENQAYKLDRKSGVVDLPIRAGCHVELRLIVSQYHRKYLGDMALTLGSLTVLPDRVIVAFRKDAPKPFVPESALSLDTNERSLDGVFVEGDVANAVKAEFPEVAIIQQRHHDRRRRLQKKKAFDRRISRKLCGREGAREHRRINYRLHQVANSVLKFAEERKSAIVLEDLKGFKSKRSKELNRRLSVWPRRKLHQIIEYKAQWKGIPVVKVDPRNSSRTCPICRRIKYSRMGAEFKCECGWCLDRHINASINLLQTAISKGMAGGLWFNPGAFQHDVMMILYEPAMAARSEPNGTSGIVGVT

SEQ ID NO: 34992 - protein, 378 aa, Bacilli sp.
MKIHRAYKFRLYPTKEQIVLIRKTFGCTRFVYNYCLDLKRKNKYLTKFDLMKEMPRLKKEYPFLKEVDSMSLQNTITDLMVGFDKHIKGQGGYPKFKKKGVKESFRTNYITSSYKNSIYENIKVDLKGRVIELPKLKEVKIKGYRNLEELPGRILNATVKEVGTRFYVSLCIEEELELPEMVNKRAVGIDIGVKNLVVTSNNEYYDNPKYLDKYEKKIKRLQLELSRKVKRSKNYNKCKKKIEEVYRKLKNARKKTVEEIVKQVTMNHDIIITENLQVKKMLEKKNCHKKLRKEITNATFSEIIRILKYKCTWLNKIFIQVNPYYASSQICSRCGNRNEEMKDIRVRELKCSKCGLEIERDYNASLNILKEGLKYINN

SEQ ID NO: 34993 - protein, 369 aa, Butyrivibrio sp.
MLKGIKFRIYPNKEQQHIIQKTFGCSRFIYNQGLSLRTNEFKKGNSIGYKETNAMLSSYKKSEEFVWLKEVDSVALQQSLRDLDRAYKNFFAKRAAMPKFKSKHNHNKSYRTQCINGNIAVAGKYIKLPKLGYVKAKISMPVTGKINNATIEQVSSGKYFCVLNVEVEQPIYENAGRIIGIDVGIKEFYSDSNGNTVDNPKYLDKSMRKLVKEQRKLSHMTKFSKNWNKQRIIVARIHEKITNQRNDFLHRESTKLLRENQIICIEDLNVKGMVHNHKLAKNISDVSWSKFFDMLEYKSAFYGSEIVRVPRFYASSQTCNICGYKHIQVKNLSVREWICPECGTYHDRDINAAINIKEKGLSLLAEQVA

SEQ ID NO: 34994 - protein, 375 aa, Butyrivibrio sp.
MEQFIYLRYQYRIYPNITQRKQMSVTADCCRFVHNYYLNMRSLAWRTQHRSMNYNACANDLKYLKLVYPWLKEADSMALQEELKDLQLSFEKFFSHSGGYPKFRSKKESGISYRTRNQNGGIRLSLDKHFINIPKIGMVRIKLSRDIPGEILNATLIRKPSGKYFVSLTLKIESASLIKGNHGMEHGLDLGLRSFYVLDDGTVAPNMKYLYETNGKLIRAQRRLSRMKKGSSNYIKQKRKVARLHEKVCFARHDYLHKESTRLAKMCSLLCIEDLNIKGMIRNHKLARSISDASWSEFTKMLEYKMPLYQGALVKVPRFYASSQTCHICGHRNPKTKDLAIRRWTCTVCGTEHDRDVNAARCLLQKGRTMLPDAA

SEQ ID NO: 34995 - protein, 533 aa, Lachnospiraceae sp.
MADKNAIKQYHKLSDRHILVVETDMSYPDVLKVAAYSDQIRRAGNELVRLMRKNYGQLIRTKRYRKLLKLYRHTKDDRQRRDYAKQLNDMQKAHHVTFEFCRKAMIHIRTKYGIDSVFGLTKAEDVWRGIETCLYDSGKSIHFSKYGDLPCIRAKQINRGIPLSVEDGRLKFKFRGIGFGIKVTDRFQNDEVNAVLAYLAEPEAADQKAVDTLSAYGYCIDTCRPCYATLVPKLIRGKYRIYLHLTIEGKALPKYDKSGNQRHRLGKGIVGADIGTQTVAYTSQTEVGLKNLSERGNSIVKSERLERLYYRSMDRSRRATNPNNYNSDGTMKKGPKKWKYSRHYKRLRSRHRELCRIGAVNRQLAINEDANHIRSLGHVLVTEPKNFSKLARKSKVTTTDSKGRINRKKRFGRSIKNRCPGGFQAALEKKFTNTGGMYKEVPMDYRASQYDHTADGYIKKKLSDRMYHLHDGTIVQRDWYSSFLLYCYDSRLQCIDKVKCKEEFDKQYSREKALIAWIKANKISVLNSGIRID

SEQ ID NO: 34996 - protein, 459 aa, Nocardia sp.
MAEPERVMQAYRYALDPTPEQEIRLRSHCGAQRFAFNWGLATVQANLAQRAAERSYGIAEPDLTPPTGWSAYELRRRWNSVKESIAPWWAENSKEAYASGLANLAAGLSNWADSRSGKRRGRAARFPRFKSKKSAMSCRFTTGVMGLTADDRRHVKLPRIGTVRTWESTRKLARRLTSGTARVRSATVALRGGRWFVSFSVEVERHDRGPRRPAAVVGVDLGVKHLAVLSEAVPGVTDTDGMVANPKHLNRARQRLRRLQRRAARRRRPKGTEPSQRWLRTNRSIARAHARVVNARGNGLHQLTAALADRFGTLVVEDLNIAGLLCNRRLSRAIADTGWGELRRQLEYKARWRGGRVVVADRWYPSSKTCSNPRCGVVKAKLRLDERVFQCEHCGLSLDRDRNAARNLAALARAVTTCPSSSSCGATLNEPDGNPQKSGAVVGSGYGHGNTSMYGVNVV

SEQ ID NO: 34997 - protein, 490 aa, unknown
  TnpB Polypeptide
MAQLTSEVRGISAYATYVTRNDTVLSERLALVGAVQPATAGRRAGVTMPDFLASGRTGKSRKEWLVRYNVVTAFRSWQERINAVNGESDKYISQGWKRTMNAAPPTYGEDYINLGAVDKQYAVIEDNPFIEGEITLKMVIRGAWYRLFFPFDNTRFTEGKVTLPLIKVEDGKPVFIFSVVTDNPIIQFSGDYVLGVDVGINNYATVTIINNGTGRVVYETTLSQRVHSLWNSVRASERQVKQLREKAVSLSLYDRQGRMAALDEADLHRAAASRKKRELAILATQEIAYLSYCYGNAVVAVEDLGWITNTMQNGRWNRGELIKWLTHYVGQNGGWVVAVNAFNTSQVCHKCGEEVAHPTHKVSKCPKHGVMDRDVNAAANIAARAVPKVEKARKTKARNPNLQEGKAPLKTPIAGCSLKYPGRDRTKNCPTPKRKKRVVREVTLPVSPARVVVTTVLADCNTCSINVAETSKAAIKQDNITYECRLYNPI

SEQ ID NO: 34998 - protein, 378 aa, unknown
  TnpB Polypeptide
MKGYITRQLKIGKTEQLDSLVHESGDIYTQTVVTFWRVVRHNRHWLSEYVMKRLIRNNALHSQTVQGIIETFYESMDSWRMLRKTNTNARPPRRRRWYHAIPYKDSAIKLDNGMLRLSNGKGNDPIIVPWHWDKPKFCEISFNGEEYIINATYAIEAQDKIIGDDTAGIDLGEIHTAVVATGNCVLIANGRILRSKRRYQNKVKAHFQRKMDKCKKHSRKWIQVNKAKNRVLRKLNNQINDILHKQTTTVVRAIITDGVRTVGIGDLRELRQNVNYGNKANQRIHQMPCGKTRQMLTYKSQRVGLTVKLIDESYTSRTCPKCGNLHKASTRNYKCPVCGLRYQRDGIGAVNIRQKTMYQGLVPVVGEMAPPVGISYTA

SEQ ID NO: 34999 - protein, 124 aa, Burkholderia sp.
MILVYRYRVKSLNGLLNKQSRAANRTRMAKSVYDASWSLFRNKLRYKAIAHGAMFEKVDESGSTQSCSACGSKDSTARPKGIAGLRIREWTCSDCGVEHDRDTNAALNILRCGRASPGVGILSF

SEQ ID NO: 35000 - protein, 419 aa, unknown
  TnpB Polypeptide
MIILEFKAYGKQKQYLAIDEAIRTAKFIRNSCIRYWIDNKGVNKYDLSKYSTVLGKQFSFVNELNSTARQSSAERAWSSIARFFDNCKKKVLGKKGFPRFKKHCRSVEYKQSGWKLSPDKKSIIFSDKKEIGKLKLKGTWDLWRFDKKKIKRVTIVRRADGYYVQFSVQVDNHKELDPTGNTIGLDVGLKDFYTDSDGNTEPNPRFYRNGEKAIKFYQRRVSRKKKGSANRKKAVNRLGRTHLKISRQREEYAKRLAHCVVRSNDLVAYEDLRVKNLVKNHCLAKSINDAGWYQFRKWIEHFGTKFGRITVAVNPAYTSQNCSNCGEVVKKSLSTRTHVCQCGCQLDRDHNAAINILKRALSTAGHVETWIDRRSRYANVDPFAQRRVSRNACGELASTLPGSGLVEQADSLKQESPRL

SEQ ID NO: 35001 - protein, 269 aa, Archaeon sp.
MDQFQKALRLKGVVIKEYGCGDWKIVLELEVPKPDKKPITEDCDIIGIDLNVSNFLVDSEGREIRNLKNLLYNKYKRIKKEQKKLSKKEKGSNNWKKQKKRLAKAHKKLRDARRDFLHKLSRAYVDKYDVIAVEDLDSKNLSEGEGSVLNRHIANYAWNEFTSLVAYKASQAGEQVIEIRAKNTTKNCSNPGCSNKVDKELFDRVHECRECGLEIDRDLNAAINIVNRAISLVGQGLSEVKPLDTSTSAGTTLVPVSRVVEQGSPFQNP

SEQ ID NO: 35002 - protein, 391 aa, unknown
  TnpB Polypeptide
MQIRTIKVQLKVDKNLFKPTIQAYTDAFNSVCTTAWDNQEFNGVRLHHLTYHNIRETTRLKSQLVVSARVKATEALSSVQALKKKGKKVSCPQSKCCAIRYDERSLTIDFANKTINILTLGGRIRLPLFVPKYFQQYLSWKKCSADLFQVKGKTYLHIIFEKESEDVKPNGNYVGIDRGIKKLAVISDNRFFGGGRIKQLSERYERLRGQLQSKKSRSAKIHLLKIKRCERLMRKDINHCITKKIVGTLKAGTTIVLEKLTGIRGGARKLTLEERQKKVKTLRKPQRKEVNKWNFFQFEQFLTYKAQAKGCNVVYVDARYTSQRCSKCGHIKKANRKNQSIFKCKLCGFQHNADLNAAKNIVLKYLDATGYPDWATVNLPNGGLTTANVPV

SEQ ID NO: 35003 - protein, 398 aa, unknown
  TnpB Polypeptide
VILSTKTTTKFSNKQKRKSLKLFIQEYKKVVQFFIDELWSLDKIPTLLPKEVTSKVTTWLSARAIQAAAKQASGITRGTKQKQKQRLFIYNKLLQDGYKYNAIRLKKLIDKEGVSKPNIENIQPELDSRFINMENDTSFDGWLNLTSLGNKLKIVMPFKKSKHFNEMLKCGKLKTGIRLSNKTLTFMFDITDVPLKETGKVIGLDIGIKNVFTTSDHQKSRQDIHGWNLEKIQQRLSKRKKGSNGFERVQSHRKNYIHWSLNQLNLSDVKQLRLENIKNLRKGNKSSRWLSHWTYTILFDKLNSLCTKLGVQVCKVNPTYTSQRCSQCGWVRKSNRHGKQFKCTACDYICDADLNASNNIAIELPAIGRKQRLQCNNRSGFYWHVVSQEPIVPGAQKV

SEQ ID NO: 35004 - protein, 422 aa, unknown
  TnpB Polypeptide
MEVKAVQLVEQHCIDKRDPRYRVIDEAAFKSKNLYNAALYELRQAFIHEGKYLDYNEMDRHMQSHEAYKALPAKVSQQILMLLDKNWTAFFEAREAYEENPSTFTGRPHVPKYKHKLEGRNILVYTIQAISQGKKGLQRGIIKPSQLPITVKTKQDPATIDQVRIVPRNGHYVVEVIYTKEPVQAKVDPSFCVGIDLGVTNLAAIASNREGFIPRLVNGRRVKAWNQWYNKRMKQLKKRLPKEERERVTKQMERITNTRNRQIHHYLHTASKRIIDFLAKEGVGTIVIGKNPLWKQETGMGKRNNQNFVSIPHARFIDMLTYKAALVGIQVEVREESYTSQASFVDLDPIPTYTPNDEEEHIFSGKRIGRRNRLYRTKDGRKICADVNGAYNILRKSRPDAFAHAGAKGIAAYVVQPVRLAV

SEQ ID NO: 35005 - protein, 296 aa, Mycobacteroides sp.
VAVFSHRGEAWVQRITGGNSIAYTITRKAGRDGVYLTGSWAIPALPYWSGRDDCEADGDVHATGPVVGVDLNDGHLAVRRLDRHGNPVGAAGRIDFDLTGSTTRRDAQVRHAITQLLHYTRRHGITTIAVEDLDFADARATGRETMGRGMRGKRFRRTVSGIPTAVFRNRLTAMTTAADIDLFGVNPAYSSIWGGQHWQHPYLNVSRHQAAATVIGRRAQGLSARRRKGVTPQRPEDRPVRATNQTGPNSPAATGGRREPGTPGTTPRRPHSTRTRQPGRATVTPAPLANHGQQQL

SEQ ID NO: 35006 - protein, 382 aa, Escherichia sp.
MRRFAGACRFVFNRALALQNENHEAGNKYIPYGKMASWLVEWKNATGTQWLKDSPSQPLQQSLKDLERAYKNFFQKRAAFPRFKKRGQNDAFRYPQGVKLYQENSRIFLPKLGWMRYRNSRQVTGVVKNVTVSQSCGKWYISIQTESEVSTPVHPSASMVGLDAGVAKLATLSDGTVFEPVNSFQKKQKTLARLQRQLSRKVKFSNNWQKQKRKIQRLHSRIANIRRDYLHKVTTTVSKKHAMIVIEDLKVSNMSKSAAGTVSQPGRNVRAKSGLNRSILDQGWYEMRRQLEYKQLWRGGQVLAVPPAYTSQRCACCGHTAKENRLSQSQFRCQVCGYTANADVNGARNILAAGHAVLACGEMVQSGRSLKQEPTEMIQVTA

SEQ ID NO: 35007 - protein, 258 aa, Acidimicrobiaceae sp.
  misc_feature (113)..(114): Xaa can be any naturally occurring amino acid
MRKLHRHLERGTGRIVASTVSLRNGKFFIAFNVEVKRAIPATRAPDRIIGVDVGIATLYTGATAGGELVLEVANPRHFKTAQKRLAHAQRIATRRQGPKKGAAPSKRWKKANXXLAKNYDVIVIENLNIKGMVKNPSLAKAIQDASWGEFGRQLEYKTGWYGSTLVRVDTFYPSSKTCSQCQTVKATLSLDERMFHCEACGLVIDRDLNAAINLARKGLPGTSSGTGRGGEVSPAQQKLVATAYPDEASTETPPDVGA

SEQ ID NO: 35008 - protein, 402 aa, Escherichia sp.
VKRLQAFKFQLRPGGQQEREMRRFAGACRFVFNRALARQNENHEAGNKYIPYGKMASWLVEWKNATETQWLKDAPSQPLQQSLKDLERAYKNFFQNRAAFPRFKKRGQNDVFRYPQGVKLDQENSRIFLPKLGWMRYRNSRQVTGVVKNVTVSQSCGKWYISIQTESEVSTPVHPSASMVGLDAGVAKLATLSDGTVFEPVNSFQKNQKTPARLQRQLSRKVKFSNNWQKQKRKIQRLHSCIANIRRDYLHKVTTTVSKNHAMIVIEDLKVSNMSKSAAGTVSQPGRNVRAKSGLNRSILDQGWYEMRRQLEYKQLWRGGQVLAVPPAYTSQRCAYCGHTAKENRLSQSKFRCQVCGYTANADVNGARNILAAGHAVLACGEMVQSGRSLKQKPTEMIQATA

SEQ ID NO: 35009 - protein, 393 aa, Caldanaerobacter sp.
MIVIQAKLIFLNQEDKQTVLDLMRRWSSCMRFAYNRLLEGEKRADLKRKLPQVFNLNSRYVDDAIMKARSTLESAKELGKSPRKVIFGGKKLFRKLQKHHLNGKAYEKLKIRWQEKRKGNLYSRGDKSKKGNLNTRIEVNENGTFLRINVGERKYVYTKIQAGWKKNKNRGEMLQEISKSNIPYSVELKLKNGSIYAYFAIEEKYPEIKITKDKGVIGIDANAYPDNISWAETDEKGNLISYGSMPMPELASGNKNKREYFRWQYAHEIVKIAKEKGKAIVIEELEIKDKGKRGDFSGRKSRRIRHNFSYKSLLKKIKVLAKREGIEVIEVNPSYTSIMGMLKYAPQYMITKDVAAAYVIARRGLGLQEKIPDNYIKFLNALTVDELEELKEL

SEQ ID NO: 35010 - protein, 399 aa, Paraburkholderia sp.
VILAHRIALDPNNTQATYFARAAGTARFAYNWALAEWKRQYEAYKADRTRSKPSQMALRRQLNATRRQQFPWMLEVTKCAPQLAIIQLGEAFKRFFSGQNRYPTQRRKGVDDRFSLSNDQFSIEGSRIRIPNLGWVRMREPLRFVGKIISATVSRKADRWFVSITVEVLEASHLSRAENQGAVGVDLGVSSMATLSTREKILGPKAHTALLDRLRRISRSLSRKQKGSANRRKARMKLAKLHARISNIRSEALHKLTSDLTRRFDTLGIEDLNVRGMMANRRLARSIADMSFYEFRRQLKYKADMRGGRVIVADRWFPSSKTCADCDHKVDVLPLKVREWTCPACGVVHDRDVNAATNLKIMAVSSTVSACGEEGSGRRRKTAVKPASVKQEPDSKLAA

SEQ ID NO: 35011 - protein, 381 aa, unknown
  TnpB Polypeptide
MPAVKQNRAIKYRVYPTPEQQVLFAKTFGCVRFVWNHMLTDAQQFLNEAGAFFIPTPAKYKKEFPFLKEVDSLALANTQLDLKDANKRHLESPKTVGAPKLKSKRKSGMSYTTNNQKMRNKNGKIKDTIYVVGSLIHLPKVGDIKVKVHREPGVDWVLKGATVSCTRSGKYFISLLYEFEKDIKPVVPTKEASLGLDYSSHDFYVDSNGKVANYPQFYRQSEEKLAKEQRKLSRMKVSSRNYDEQLHKVQLLHEHIANQRKNFCHAVSAAIAKQYDAVFVEDINLRGLAGSLKLGKSTNDNGFGMFRTMLEYKLTSQGKTFTKIDKWYPSSKTCSVCGFVKDDLTLADRVWTCSACNTTHNRDHNAAINIRNVGLLGLYPA

SEQ ID NO: 35012 - protein, 412 aa, unknown
  TnpB Polypeptide
MLAIVKDEMLVKGVAFHLESGIPSEAKSLLEDFRLAVNNAIRAGLQARVTSRNALVKIAYRDFREQHPRMYAQHLVSAFEVAGSALKNHRRRFRKDVSRRTPFVKRLMMKAENQAYKLDRKSGVIDLPIRAGCHVELRLIVSQYHRKYLDDVSLSLGSLTVLPNRVIVAFRKDAPKPFVPESVLSLDTNERSLDGVFVEGDGAKAVKAGFSEVAIIQQRHHDRRRRLQKKKRHDRRISRNLCRREGAREHHRVENRLHQVADSVLRFAEERRSAIVLEDLKGMRTKRSKELNRRLSMWPRRKLHQIIEYKAQWKGIPVVKVNPRNSSRTCPICGRIQYSRMGTEFKCECGWRLDRHINASINLLQTAISKGMAGGLRFNPGAFQHDVMMILYEPAMAARSEPNGTSGIVGVS

SEQ ID NO: 35013 - protein, 306 aa, unknown
  TnpB Polypeptide
MEQMTITAKIQIIASETDKVLLDETMSVYRNACNYVSDYVFRTHDLKQFSLNKALYSILREKFNLKSQMAQSVLRTVIARYKTILENQNEWIKPSFKKPQYDLVWNRDYSLTQNRFSINTLNGRVKLSYFSDGMSKYFDNTIYKFGTARLVSKHGKYYLHIPVTYEVEESNISDICNVVGIDRGINFVVATYDSKHKSGFVSGKAIKQKRANYSKLRKELQMRHTPSSRRRLKAIGQRENRWMQDINHQVSKALVENNPKHTLFVLEDLSGIRNATERVKTKDRFVSVSWSFYDLEQKLIYKAKQN

SEQ ID NO: 35014 - protein, 381 aa, Saccharomonospora sp.
MQLRYNFRVYPTPGQRTALAKVFGCARVVYNDALRARQDAYEAGERLSDTEVQRRVVTEAKKVCARAWLSEVASVALVQACQDARAAYRNWFDSMSGKRKGRKVGRPRFRSRKDNRQAIRLTRNGFSVKPNGKLYAAKIGDLDVRWSRDLPSVPSSVTLVKDASGRYFASFVVEVNDEPLHETSSEVGIDLGLVTFAVLSNGKTIESPKFLRRAERKLRKVQQDLSRKQRGSNNRAKVGLRVAKAHAKVRDSRTDWAHKNTTALIRDNQAIYVEDLAVSGLARTKLAKSVHDAAWGQFVRMLEDKAQRHGRVVHEIDRWYPSSQVCHVCGRIDGPKPLSVREWSCPCGAHHDRDVNAAKNILAAGRAERLNACGETVSLSA

SEQ ID NO: 35015 - protein, 344 aa, Enterococcus sp.
MKVLKAYKFRLYPSAEQKAFFIFTFGCVRFTYNHLLKERQQEYQRTGFLGKGRTPAQLKKEFPFLKKTDSLALANAQLNLDRAYRNYFRSQAGFPKLKTKKSLWQSYTTNNQQGTIDLVDGQLKLPKLKEHIPVLVHRAVKGKIKSATISAKYNEIFYVSLLCEEEVAPLPKTEKQVAVVFCQEIGIRTSQKILYPPYAVAGLESSLAKAERRLQIKATSARKRKVKLMDARNYQKQKRRVAQLYQIRYQRKRDYLEKLSFELVQAFDVIFIGKDSIQEQPGPFDQQDWLLFLQKLAYKAKWYQKQLVFVEVPRLLQDPSELERTGTALLNKPNWQGRQGSPRE

SEQ ID NO: 35016 - protein, 389 aa, unknown
  TnpB Polypeptide
MNMDMQRTVRLRLLPDADTAALFAETVALYTSSFNVVAAAGWTAGIANGVELHKATYYPERARTGLPAQLVCAARVKATEALKSARALTVKEMKRPEDKRHLPSLPQSDHCPIRYDARSYRVNLPAGTASLLTTQGRKVVTFRLSPYHRRYADWRTASADLFRDHQGRWWLHVVVTAPTPASEPTTETVGVDLGIIHPATDSRGNHYGSEHWQAVEERTHNLRRRLQAKGTRSAKRHLKRLSGKQGRFRRDCDHVLSKRLVTSVQPGATLVFEDLTDIRGRAKARKQQRRRLHSWSFAQLQAFAVYKAQARGVAVAYVDPRYTSQKCSACGHRERANRPNQADFRCVSCGFVCNADHNASLNIRQDYLSRAAVSPPIVSALCQGQAPGL

SEQ ID NO: 35017 - protein, 455 aa, unknown
  TnpB Polypeptide
VYRVNAVKLAVDEGADERLRGVNEVIRTVTVRSEQLPRRTFRIFVELEGMYRNIVEQLVLHAVNNNITKFTRLKAERYREVRSLYPQLPSHYAYTACQDAAERAHSFLRLKRMGRARKPYPEVRSVSIWLDDRLWRAEGLTSINIATHKGRVRVSFELNKHLLRYVNRGWRLTSEARVKLDHKERRLILYLTFRKEVSEYRPKGYITVDVNEDAEAVLIDGVVYLFETGLSRITLGYYYRRKRVQERYDRVYGPGSRPARKIFKRLSSNEKALKREVRWKLATLIVREAARRQAAIVLERLGKEPARSMIEHIKNPQLRHRVFQAAFKGMQRAIEEKAREYGVPVIYVNPSNTSKVCPIHGAKILYGKDRRGVCSKGGETWHRDVVACYNLLLRALGGDGGHAPSRLRALVPVDGGPVPLGPTAAHEPTGVPRALWARWRSLRPIMNEQMIEVKA

SEQ ID NO: 35018 - protein, 251 aa, unknown
  TnpB Polypeptide
VTGATLQYRDTTDTFFLHIGTKADVESEIPDDGDAENSTVLGVDLGIEQIAVTSTGMFWSGDYLTHRRREYERVRGDLQQTGTESAHRTLERMGDRETRWVEDYLHRISKAIVQEAVAHECDRIAFEELTDIRDRMPGAKKFHAWAFRRLYDYVAYKAEAAGIDATQVDPSYTSTRCSKCGTTLEENRQSQATFCCQKCGYEVNADYNAAKNIGFRLLRAGQKSPHGGATRHLALKSGTLNVNGGYSPATQ

SEQ ID NO: 35019 - protein, 402 aa, Escherichia sp.
VKRLQAFKFQLRPGGQQECEMRRFASACRFVFNRALARQNENHEAGNKYIPYGKMASWLVEWKNATETQWLKDSPSQPLQQSLKDLERAYKNFFRKRAAFPRFKKRGQNDAFRYPQGVKLDQENSRIFLPKLGWMRYRNSRQVTGVVKNVTVSQSCGKWYISIQTESEVSTPVHPSASMVGLDAGVAKLATLSDGTVFEPVNSFQKNQKKLARLQRQLSRKVKFSNNWQKQKRKIQRLHSCIANIRRDYLHKVTTAVSKNHAMIVIEDLKVSNMSKSAAGTVSQPGRNVRAKSGLNRSILDQGWYEMRRQLAYKQLWRGGQVLAVPPAYTSQRCACCGHTAKENRLSQSKFRCQVCGYTANADVNGARNILAAGHAVLACGEMVQSGRPLKQEPTEMIQATA

SEQ ID NO: 35020 - protein, 388 aa, unknown
  TnpB Polypeptide
MIQIAYKYRIFPNKEQQKLLEKHFGSVRWVFNWGLEKKIKAYQKDKQRLTCFDLINKLTKLKKEKDFQWLNEINSQSLQMALKNLDKSFTNFFRKQGRFPRFKSKKNNINSFQIPQHLKLANKLTLPKIPEIKIKQHRKLEGIIKTATVSRTPTNKYFVSILAEQDKEFPKKPKVKEKTTIGIDLGIKTFATISDGRKMENPKFLDKSFKKLKRQQRQLSRKVKGSNNRTKHKMKVVLIHEKVKNQRSDFLNKISHQLTHENQVKSIAIENLNVKGLLKNHYLARAISDVSWQEFRRQLEYKCDWYGRNLLVIGRFEASSKTCSCGYVNQKLKLSDREWTCPECKTKHDRDLLASQNIKRFALIPQGLRKFTPLERTTLVGSVKEEAT

SEQ ID NO: 35021 - protein, 413 aa, unknown
  TnpB Polypeptide
MSRLDKNRAISEAGKATRVRHRNMTCKTFKFKVNRSSLSRDQKEALKMYFIEAKRIYNYIIASDIDPFKASYKDFKTITYLDKNRNPVEYKIRYLKSSIIDEISVMMRESIIGLSASKKTGNKIGVLRFKSECNSIRLRQYGVTHSIKGNSIKIQGIKKPIRVGGLKQLDGYKNIDYTTANLLYDGYDYYISLTCFIDKEHKITNNKIIGLDFGCSTTITTSDGERIYIEVGESERLKGLQAKLARQIKGSNNYYRTRSKIRKEYNRINNKKNDAANKIVHRLSEYGTVVIQDDQFREWREDEHLSKTVQHSVLGRVKAKLRRKDNVFVLDQWFPTTKRCLSCGTDAAMDLSQRTFVCPKCGETGDRDVHAAKNMIGFYKAIQSAGTVDLKPGKKISYDKCKDLFKDGKLSCL

SEQ ID NO: 35022 - protein, 518 aa, Mycobacterium sp.
LRPTGTQCREIGIRFFTGVRVYNAVLGEFLTRSRAAKADPAWEAAGELPHRSPAERQVRRAAFRAVETAHGFSADAAQSFASSLRKSWVREHLPAQETQSLGARAFDAVRQWHVGRKGKPRFKSTKRGLRSLSAKDGNGALRPKTDRQGHLVALQWGAGFVIPIAAPAASGRRGAEQQSELAEIEALIAAGKVLSTRVVRTVIGCRDTYRMQLVCDGHPPRRHPIGEGKVSFDLGPSQIAVAVQRADGSWSGWVEPLADAIRLDTTGLRRTQRQLDRQHRAGSPACFDKDGVHTLGRCVWQRSAAARRTAMRVAELQRRLAEHRKSLHGALANRLLGYGTDVACERLDYVSWQKNFPRSVRDRAPGLLVEMLRRKAESAGGQQLYEYHPQTTALSQTCLCGNRRKKPLWQRVHRCGCGTREDRDLFSAYLGLHVRTGADGVDRLDLQPAREGWLHRQDVDESPKSGRSASARKRRGRRHPPSRRSVARINARRKAKTVMRQSRSARTSADDQPTAVAA

SEQ ID NO: 35023 - protein, 332 aa, Lactobacillus sp.
MKNMKQMSSLAYHFGIKLRFYPSSKQKKIIKLNYDAQRFVYNSYAERNRTNYHARRFLAVKQINAMPFAFPILNDYEAKLAETVVANDELLAKPKNIRDAYSFLRVKEIDSLALANAIQNYRKAWNHYRKIGHGIPTFHKKRSDWSYQTNCQYPKQKEAYLDNGTAKFIDAKHVKLPKLGVICIAGLRKLIKDRLLKRVSTRIGTVTIKKTAGDQFYLSMQLGSDIAFAQKLPKTQSQIGIDLNLDNFLTDSNGAMVANPCFYRQVKKKLAHAQSVLSRRQRRAKQEGHNLRMAKNYQKQRLLVAKLHAKICRQREDFLQVLSTALIKNSSC

SEQ ID NO: 35024 - protein, 530 aa, unknown
  TnpB Polypeptide
VGEHLGHLASVDISWRCRLGQAQEQRTVRKRTLTISSSSRWAGSITRTSNNQWEQGWANLVGRRVGLSRAIRTIQARLAVPVGGACGRIRGYASQAERFAKQQRLQHLQAQLTWVDSRLATGRVSVCRGGRRLARHRHNLNEPSLSIEQWRGQWQAERWFLSADGDAVKRWGNETIRVHPDQHWLELRLPTPLAALSNTPNRACTYRLGCPVVFRHRGEEWAAQAATGAVRYDISFDSAKARWYLDASWRIKPEQPPSLQELRRHRALGIDLNADHLAGWILDPSGNPIGPPQTIPLQLAWLSASTRNGRLRAVITSILQLAATSGCRSIVIENLDFADARQTGRETLGRGRPGKRFRRVIAGIPTRSFRNLLVGMAASRGLWVIAVDPGWTSKWGRRYWQAPLNHSTKSSIAVSGHHAAAVVIARRGLGLRARRRPGVPGHDRRIVVGELPARPDLQRPGCEGPGPPVGQRAVENPHKTRLAELSRLGDQVVQDRSGPPEQDSNLFAFKERSPGCRSRRQGPSRTARGW

SEQ ID NO: 35025 - protein, 465 aa, Paraburkholderia sp.
MSIILQSGVRFQALVSGSLAAVLRQWIGCQRCIYNGKVSEDHLYAAQRRMLIASGVTDSEKLKTPLDQEYSRFKSRELSPWLYDVPSQVLRNGAYRWMCAKTRQIKGLAKAPTHRTRKNFNTVMLTGELFRFVPSNGEVVLEIGTAKNPVGLLRFKAHRPYGIPKTIVIRNEAGRWFVSFSYAHENDRIVRERHEIAYEINGLDDDALDAATIGLDRNVRENCFTDSTGRQHQIGHVNLARIERREAGARRYQKKMSRAKEHSANRRELAQKIARRKNYGQRVRRDFTHKTTHGLVTADARLFVLEDLRIRNMTRKPKARQDPVTGKWLRNGACAKAALSRKILASCWGELDRQLQYKSAWHNKLAVRVSAAYSSQECSQCEHTHPGNREGARFSCQRCGFEAHADRNAARVIKARGIKALRDGAYDAPKTTKRVAFRRKHSGTGGSPGALRSYVGRAGRPQTDT

SEQ ID NO: 35026 - protein, 391 aa, unknown
  TnpB Polypeptide
MKSIKIRLELNNKQTTLANKHAGVARYAYNWGKSVCDNAIQNKEKRPTAIDLHKKFVAEEKQTKDWLYDVSKCSPQQALRNLDEAYKRTFKVKGTKYPRYKKKGQHDSFYLEGNIITDGNKIKVPIFGWLKCSEILPECQIKNVVISKKASHWFIAFKIPFEPQIYPKNNGVIGVDLGIKTFATLSDGETFENIKPYKKNKRKLKLLQRKLSKKQKGSNNRKKACAKVAKLHCRISNIRKDNIHKLTTYLAKNHSEIVIEDLNVRGMSKNHKLASAILDGGFYELKRQLEYKVKWYGSVLTVVDRFFPSSKQCSGCGNIKSDLKLSDREYICECCGLLIDRDLNASINLKNKAVSYIASACGASKQLSSFEFDDAVNQEVNINVQHCVSFM

SEQ ID NO: 35027 - protein, 376 aa, unknown
  TnpB Polypeptide
MWSGDLSGFDPSCNNLKCLSMLPNDYLKRHDSWFTARMKQCAGKQACSMVRASVKKRDKQLYMLAKLQRKQENTKYLQRKIDIQPLVKPSAEFAKVELDPRFIDFEDGSTFDLFVRVRTIGDDVTFNIPIKHTKVSRKWLDRGELKHSIRLDEHCLTLIYEVPDVPKHSGETVGADQGYKTVLTLSDGQVTKPDKDGHNLGTIQARLSRRKKASNGFKRSQSHRRNHINWALNQLNFSHIGEVRLEKIKGLRYRKRGQGVLLYWTYPLIKQKLVSLGEVEGFRFVEVSNQFRSQRCSRCSLVCKSSRKGKTFQCAGCGYTLDADLNAASNLEIDLFEIPWWVQRSRINRDGFYWESDGIFSVGHEPIVRDTIRAVE

SEQ ID NO: 35028 - protein, 176 aa, unknown
  TnpB Polypeptide
VFRKLNKRFSNTKKGSNNRRRRLFELQQTYRKINNLRSDFQWGLAHQLCKQYDYIFIEDLNIEGMKRLWGKKVSDLSHSSFINKLTYVASKYGVTVHKIDKWYPSSKTCECGCINKGLSLRDRTWVCPACGAINDRDILAARNILRKGISELESKSNSSDSNIGVSCVCIQESHSL

SEQ ID NO: 35029 - protein, 351 aa, Cetobacterium sp.
VNPLKTIKIKLKPNKFQAQELARLSKEYIRQANLLIETAVVDKKFPKATSKHIGAELPSVIKNELIRYAKTKFKQFGNCTFKKPTISWNNQNYSLSENSIDFPIIVDGKVKKTRFKAIIPYETFEELKSSKLGSLRISKKGFHWIAQISIETKPLVCAGTDTLGVDLGILVPAVGVVNSTGKTKFFGNGRSNKYLRRKYKELRKKLGKAKKLNAIKRINDKESRIIKDINHKISRQIVDFAVENNCGTINLENLSDIRQTSRTRGKNKQSLHSWTFYQLASFVEYKAYNLGIKVEYINPQYTSQECPVCNTCNKTNTRKYKCACGYKTHRDRLGALNIAQKSNLDGKSLSA

SEQ ID NO: 35030 - protein, 404 aa, Microcoleus sp.
VFNLVYEFKLKPKAAQVAILEDWLEQCRRVYNYALAERKDWFKSRSCPINACSLQSEYIIPADTKRPTYASQCKGLTEARAKIPALNAVQVHVLQQTLKRLEQAFVSMWEQGHGFPRFRKAGTMRSFVFPQMGVNPIKGGAIKLPKIGWVKFRQSREIPDGATLKQVRIVRRASGWYTMLTLQWDVNVPDVMPHGEAIGIDVGISHFAAVSNGKLFPNPRPFKKLERKLKLLQRQCSRKVKGSINRRLAQVKVSKLHERIANTRKNYYWLLAHNLCDWAGMIFVEDLNLKGLARGFLGKHCLDAGWGQFFQVLEQCCRKRGVFFLKVDSKKTSQICPNCLVETGKKELSERVHSCEYCGYTTHRDVAAAQVVLVRGLAAVGHTVKMLCEGKFIGIPVTKESPSF

SEQ ID NO: 35031 - protein, 500 aa, Ktedonobacter sp.
MAKATTTIKQVLNYGPEHAAWFAANQTLFNQVCAFYFDVIQAHVKILELSNKEALTALEKLTHITQRNPAPVMPLDEVAEDIPAMFRRAAINAALGSARSFFSHLARWQKAKEKAEAKGKKFHERPPVPPRTWNKSASLYAGMWKERSDSSIVLKVWTGTCWSWMKVRITGRELPIDAELGSPQLIRKGNQWYLHTPIERQFKSSGTIEKQVTTNKQTKICSVDLNINENIAVCTIRTVEGSILATTFIHGGQRVNGFRKKLLGRIARNRHKTGILAENEQDNVHLWNTIRHVDEQGAHLVSNRIVQFAKQHEATVLVFEHLGNLKPTKGKYSKRGNEKRAFWMKGRIFRYAKYKAYHAGILTSRVNPRNTSRECARCHSLVARYAEGQPAEGYTYGAPLVACHQCGMRGNADRNASLVIGQRLTQRYQKQEKPPTPLLAKREPKGSGVGLPQDAKSRNRPSLQSARHGDSNEHGTAQETGMRMVEPVSDSAHQLRLPLE

SEQ ID NO: 35032 - protein, 399 aa, unknown
  TnpB Polypeptide
MILSHKIALDPNNTQRTYLARAAGTASFAYNWALAQWQEQYQACQDNPLLAKPSEGALRRQLNAIKREQFPWMLEVTKCAPQHAIMQLGEAFKNFFAGRAKYPRFHKKGRNDSFALDNGQFVLDRSRIRLPHLGWVRVRETLRFPGKILSATISRTAHRWFVAVVVDTDQTLTRPAENQGVVGVDLGVTTLVTLSNGEQVIGPKAHKAVLKRMARLNRRLARKVKFSRNWRQAKARLARLHARIANVRLDALHKLTSDLARRFHTIGIEDLNVSGMVQNRHLARAVSDMSFFEFRRQLDYKIAMRGGVVVSADRWYPSSKICSGCGHKMDSLPLSIRHWDCPACGARHDRDLNAAINLAKYAASSAVSACGGEGAGAGRKARTKPAPVKQEVNFVHVCA

SEQ ID NO: 35033 - protein, 203 aa, Salinarchaeum sp.
LVTVCHRDEQDSPTAPKLWNEDGKRVRHLRETYSTATRRFQTRGSERNVESFGDIPWRHIDHILHTVTSEVLAYTDQFENPVLVLEDLTHIREHMDDGTFMDRGLLGWGFAKLYAQLRYKAAAKGIRVETVHPAYTSKTCHCCGARGCRPTQATFTCSNSACWVTAYQADINAALTIADRYRSGASHSREYTSGDDSTADGAA

SEQ ID NO: 35034 - protein, 511 aa, unknown
  TnpB Polypeptide
MKTGSKPGTKSKSKYKPFWNATCTKLSENLFALPNTGLDPKHNPFIDLNDYKKRLDAKINAVGNETNLKTVMLRLNTTDEQVKTLNKWFDTANHVYNKAIECIESRGKGDSISKFSVRNKLVTDDTITLTPVYFALEKEISDIRKLRNKLDKENVNELKWHTYYTNKIAALSASKKAIKPEKNPNVQSWELETPKDIRLGEVFSACSAYKTGFTQIKNKTITHFKMAYRKKTRHYKSITVPKVFIKIVDSKFSIYGSYFSSKINGLFSVGKYALKDVKELVISHDCEIVKKRDEYWLHVPVKVETSNKPVKYDTYCGIDPGVRTAITTFGNNGFTEIEHDINKLTSLNRKINALKQRRMGPLLRGKRTRTRRRNIAKYEKRKNNYITNFHWHTIKTLLSNNDCIFYGDIKSHDIVKDGINATLNRDLNDLKFYQFKQRLLFKAKCLNKTVFEVDEPYTTKTCSFCGELNDPGTSKIYECSKCNRSIGRDINAAKNILIKGILENLLTPKTK

SEQ ID NO: 35035 - protein, 239 aa, Bacillus sp.
MGIDLGVDNLATIVDNTGLKPLLIKGTRLKSINQYYNKLKAKYTSIIRNGKGPKEGVFNTNRMISLDRKRNNRVMDFLHKASTKVVEIAIVRNIDTIIIGRNVGWKLEVDMQKANKQTFIQIPYSTFIQMIRYKAERKGVQVIDREESYTSKSSFLNHDHIPTFGEEHQTIFSGYRSTRAFYKIKGSKVLIHADVNGAFNIVRKHVKNAFEGLERKHFLQAPQKIIIMKNSHAKLKASA

SEQ ID NO: 35036 - protein, 416 aa, Lachnospiraceae sp.
MYLTVKQQVKHLSKNDYNSIKYLCHIAKNLTNEAIYNVRQHYFKEGKYLSYHQNYSLLKSSPNYKTLNSNMAEQILREVDGSFKSFFGLLKLAKKGEYSFKDCKLPYYLPKDGYTTLIIGFVRLNGNKLVLPYSNSFRKDHDPVEITIPPILVDRKIKEIRIIPKSKARFFEIQYIYEAECIQRNLNPNNALALDLGVNNLVTAVSNSGKSFIIDGKRLKSINQWFNKKNARLQSIKDKQHFGKVTTNRQKDIARDRNNKVNDYMNKAARIIFNYCIENDIGTLVVGYNETFQRESRLGKNDNQNFVNIPFGRLLKKFEYLCELNGIVFVKQEESYTSKSSFWDKDEIPKYNADTLTKYNFSGMRIQRGLYKTASGYIFNADVNGALNIMRKSNVVDMNILYTRGEVDTPIRIRVA

SEQ ID NO: 35037 - protein, 478 aa, Desulfurobacterium sp.
LLLTLSISATKKSIYNKLGRASKTFQQFKNLIYLCVLEYHKNSNDIKPFLSKTFLEKFVKGRENLPFENEKIKEWKKELVILWTEKIGSDTTKALVGVVAKEFKSILEKWKKGEKASLLKPRKLNSLYSFTLETNPNMVVDKRKLQGKRNSNHIVVRIGKDFGAVKFKVPKNLKIKHIKINWSASGKVTYLISYEVPESEGNLNKNLFLSIDLGVKNLISAISNKEDLPSFIINGNPIKAFNQWINKLSAKLQSEGKEIEHRKLWNYRKKRIEQIFGMVSNFIVTICLKEGIGRVIISDSLTEEYKKEGTKGKRLNQEFRQIPLGKLIQKLEYKCKLAGIEFLKEPEPYTSQVSAVTGNIEEISGKSKEGITEEEIKRLQFTGKRIKRGLFKDLKLNKVFNADLNGALNIAIKKLGKRVREEFLKLSNWIDKLSRAVKLTLFPHSKYSASPLFQGIADSSSYLARGSEGHLLTIANEC

SEQ ID NO: 35038 - protein, 463 aa, Clostridium sp.
MGTIIKTVKQYSYELDDDILQELKFIANQYKNVKNYIYSRYSGINSIPLLKKHREIRNEWTKNKFYEQWKLPARYWKLALTEAISNIKSEWSNIKRRVKEQCKENNNLSNEDKYYINYILKFDNYYWKVLTNQSFEIPKTFQDKELNYKYLNSLIKRYTRRYKGCIPYSKISNSFSIDKGLYSYKDGYIKIACIEKYKRLSIKLTDNNKYDKTMTVKIINNKIVINCPLKIKTRKNKNTNIIGIDKGYRYLFAVSSENFYGENLNNYLSKETERLNKVNAQRNRFWALYNQYLEQDNIKKANAIKENNLGKVKYNHNKQKHDQTVKSYINYSLNQLIKEEKPKEIVMEQLDFINWNDRYPKGVKRKLSRWIKGYIRERSEYKCDFYSIKYTYINPAYTSKVCSVCGSFGKRDGDVFTCPKCGETHADTNASKNILNRKYDNDIILYTNYKKVKEILENRVKVS

SEQ ID NO: 35039 - protein, 163 aa, Bacillus sp.
MTKHNKAYKFRLYPTEEQANLIRKTFGCVRFVYNKMLAERKKVYEKYKENKEELKKQKFPTPAKYKVKYEWLKEVDSLALANAQLNLQTAYKNFFSGQSDFPTFKSKKSRKSYTTNRVNGNIMLFHGYIKLPKLKLVRLKQHREIPQNHIIKSCTISLTPTGK

SEQ ID NO: 35040 - protein, 387 aa, unknown
  TnpB Polypeptide
MCPTRQQEAVLIGHCAHARYVWNLCVEQESWWRQGRGKVPGLADRCRQLTEARADNPWLAAGSVTVQQQAIRDHDQAMASFFAGTHGQPSWRKAGRNEGFRIVHLKPGDVRRLSRNTGEVRVPKAGWIRFRWSRRPPDGMKSFRVTRDRAGRWHVAFAVIPDPVGGPGTAAVVGIDRGIAISAALSTGEMLRVPALTGREQDRLRRLQRSLNRTQRRSCRHREVKTAIAKLKARETDRRKDWCEKASTDIARRFDVIRVEDLHITNMTRSARGSGDNPGRNVRAKAGLNRGILGSGWGLLVRRLQDKAPGRIEQVSPAFTSLRCSACGHIAAESRKSQALFRCVACAFACNADVNAARNIAAGHAVTARGRSPLGRRKNREPQLSTP

SEQ ID NO: 35041 - protein, 374 aa, unknown
  TnpB Polypeptide
MRKTYLYKAKINKQTEANCNQWIDLCRRLYNQSLEQRIKAYKEEGKFISAYSQMSQLPNLKKEHPEYKIVGSQCFQDVIQRLDKAYKSFFQRVKQGNSKVGFPRFKSQNRYDSFTLKQAGWKLEGRYLYIKNIGRFKLFLSRPIKGDIKTVTIRRNSTGKWFIAFSCDNVPVKEVPEVTANVGIDVGIKSFCVDSDGNQIQNPKFLKQSLKLLRRRQRSLSRKKKASVRRSKARLFVAKAHEKVANQRKDFLHKVANFYVEAYKTICIEDLDIKGMIKNRHLSRSIADSSWGLFFNFLSYKAEEAGRTVVKVNPNGTSQICSGCGEKVPKSLSVRTHQCPFCNLVLDRDYNASLNILRVGQTLQASTPTMVGVA

SEQ ID NO: 35042 - protein, 390 aa, Exiguobacterium sp.
MLTHKGYRFRLYPTKEQEVLIIKTLGCARFVFNHFLAKWDETYQASGAGLSYGACSEVLPSMKEELSWLKEVDSTALQWSLKHLADGYDRLLTKQNGHPRFKSKRNPVQSYTTNIQGRSQNPEVSIVGERLKLPKLKWVRFANSRRVEGRILSATIRRNATGKYFVSLKVEQEIEELPKTGSSVGVDVGLKHFAILSDGTVYPNDRYFKSLEKKLAREQRKLSRRRLIAMNRNVKLSEAKNYQKQKRKVARIHEKIANRRNDLLQKVSTEIVKIHDVIGIETLQVKDMQQNRQLSKAISDVGWSEFHRMLEYKADWYGKTVVKVGRSFASSQLCSSCGHRHKDVKHLALREWVCPGCGTRHDRDINAGLNLKQEAERILASSTVGTTGLA

SEQ ID NO: 35043 - protein, 370 aa, unknown
  TnpB Polypeptide
MARKTLKFRLYPNRQQQERLTATLDACRELYNAGLQERIEACKNRTPVRVFDQINQLPDIKQIRPDVAGVFSQVLQDTLRRLDKTYKAFFGRAKRGQKAGFPRFKGRNRYDSFTYPQSGFELGAKLQLSKIGSIKIKQHRDIEGEIKTLTIRREAGCWYACFSVEYEPTKLPHNSNNIGVDVGLEAFATLSNGTRIENHRYYKAAQAKLRRAQRKVARRANKKSKRRRKAILLLQKAHQHVANQRKDFQHKLAYWLVQHFGMIAVEDLNIKGLSAGILAKAVHDVGWSSFLNMLAYKAENAGRQVIKVNPKYTSQECPQCHALEKKSLSERVHRCDCGLTIGRDHAAAFVILGRGLRLQALTVGQLAPVA

SEQ ID NO: 35044 - protein, 445 aa, Chamaesiphon sp.
MYLTQKNQIRDLSKTEFLALRELCRLSKNLYNVGLYTVRQYYFQEHKHLRYESAYHLCKDNENYQILNTDIAQQTLKVVDRTFRSFYGLIKAVRSGTFSQKVRLPHYLPKEGYFVLIIPRIKVKDGKFKVPMSNAFKKEFGEVVIDFPERLDPAKIKEVRIHPKYDARFFEVEYISEGEIEAVETVKDSALAIDFGLNNLATCVDTNGASFIVDGRKLKSINQWFNKENARLQSIKDLQRRAPVGFPDAKSATRQGIKQLTERQSRLYINRTYQVRDYLNKAARLIVDHCINTKIERLIVGFNIGMKDGINIGSRNNQNFVQIPFYSLRNKLKSLCERYGLLYQEQEESYTSKASALDGDDLPVYNADKPSTYQFSGKRVKRGLYRSKEGHLINSDTNGAANIGRKAAHRTGGSLPFVCDKTSKQNGFTGLSRGCLAQPLRIKVY

SEQ ID NO: 35045 - protein, 370 aa, Chamaesiphon sp.
MRISFKTELKLNNFQLTQLAKHAGVARHAWNWGLDLCKMILDYNRANPDEKMKFPSAIDLHKFLVSWVKVENPWYYEVSKTSPQYALRHLSSAFSDFFRKKTANGRKVGFPRFKRKGQHDSFTLEGTIKVEHRSIQLPKLGVLKTYERLPQGLTPKTAIISRTANSWFVSFSYEIEPTITTKLIDVCGVDLGIKSLATLSTGETFSNPQLTLKSQARLARLQKAASRKIKGSNNRRKANMKVAKQHARTANIRKDTLNKLTTYLAKNHSQIVIEDLNVSGMMANHCLAKSIADLGLYEFRRQLTYKSELYGAEVITVNRFFPSSKTCSCCGHIQDMPLKERVFNCQHCNISIDRDLNAARNLEHQALVLA

SEQ ID NO: 35046 - protein, 465 aa, unknown
  TnpB Polypeptide
MTILSGGKLKLYPNKAQKQIIEQTFGNSRFVWNQFRSMQENRYNAMIDDYNQYKEQAKENGDKIINPIYIGDYDMQKVLTQLKKEQPWLHFSDATVLQKTLSNLDKAYKNFFKKPNQFEKPKFKSRKHRSQAFTGRTNKLASGKTSVYVAGPRYVYVPKLGFIKTSKTTRINGQIKEYTIIRESFGDYYISFQIEEPDRELLVKTKQVMGGDLGLTDLLTLSNGLKFPKFSPGQTLALSLNAQSKASKSMNRNSKILNTKELIYLIEKGIFDEDKYEASELSEFKNHEKHMKKSAKAQRKVANKRHDYLHKLTTALVKAYDVIVLEDLKVKNMLKNHKLAKAISNASWATFVRFLRYKCEWYGKLFILIPPHYTSRICHQCGWDSGKKPLDIREWTCPHCHETHDRDINAAINILYRGLETYFQSQLLLLNEQAKNGYFSTIFFQVASQWLKQTISYFNQALKIA

SEQ ID NO: 35047 - protein, 304 aa, unknown
  TnpB Polypeptide
MSLLKSEKIKYVQIIRKTIRGKNVYILQIVCQGFPLTKVRRGEGTMGIDPGISTVAYVSKTNLALVNLIPKDVNRKEKLMRYLDRAIERSRRINNPNCYNSNGTINKGSKFKHTSNRQVRLQVRRIKSYRSLSEERKKIQGQLVNHLVSQASLIKIEDLNIKGLQRRSKEIRINPKTNRPFSKKRYGRSIFRAAPSFFRQLLQTRARQLGVDVEIIQSKDLKPSQYNHITQTFEKKTLLTRLYDLSDKWTSVQRDLYSVFLIGHIENGSYQQEKLTEDFPDFYKQMKTFLQKPRKTNRLDWYLN

SEQ ID NO: 35048 - protein, 348 aa, unknown
  TnpB Polypeptide
MKVTMELKLLPDKQTAALLDFTMAEYISLVNDILDYAIACGKMPELSSKNLRAPLPSALKDQCRLDAKSIYSKVTKPNSKLKGRFPTLRKPVSIWNNQNYEVGVDYVAMPLFVNGKSHKTKISAIVPDEALKILQSAKKGTMRITKKGNKYIAQIAYEKPEAKPSTGTHVMGVDLGLKCPAVAVSDGGKTKFYGNGRQNKFIRRKHNARRKKLGKAKKLRAIKKSRNKEQRWMRDQDHKVSRAIVNEAIAQKVKTIKLESLSGIRNSARTSRKNNHSLHGWSFYRLGKFIEYKAQLAGIAVEYVDPAYTSQRCPHCGCLNHAHDRNYTCSCGYHTHRDRVGALNILNA

SEQ ID NO: 35049 - protein, 398 aa, unknown
  TnpB Polypeptide
MHKAHKIQLSPTKAQEIFFKKSCGVARFSFNWALDKWKTDYANGIKQSAYTLIKHLNSIKKTEFKWMQETGKCAPQYAIHNVEAAYKKMWKEKSGYPKFKKKGIKDSFVAIENEISFKQSDFRIHIPRLGKVKCCENLRFEGKVLFVTVKRIADKWFAVVQIETPNEASVTYENQVVIGVDLGIKTLATCSNGKVFENPKALKSNLKSLKRSQRSLSRKVKGSSNRKKQQILLAKKYYRVSCIRKNALHQATAKIVNSANVIIVEDLSVNGMIKNRNLSQAIGDVGFGEFRRQIEYKAAWQNKTVIIADRFFASSKTCSCCGLKKEKLNLSERTFCCLSCGLTIDRDLNAAINLANYSPTSKGEGSKACGERVVETQNTSVKHEIVNKIENYSQFNTL

SEQ ID NO: 35050 - protein, 365 aa, unknown
  TnpB Polypeptide
MERTIQITLPYDNDLVETIKEYNSAVNYCMVVGKEHLTYNKNDIHKMTYYEIRGESDLPSSMVCCARDQASEMLKREKLKGLPIKKELSGIRYNQRTFTWKNNNLSLCTLGGRKNYTPKIADYFLKYLNKNNEMKAITLYCKDNKIFGQLVIKIPDVEKLEVKNVLGIDRGIVNPVVSSNNKFFNSRNTRRVTGKYSWLKKKLQHKGTKSARRKLKKLSGKQKRFVTNQNHIMAKKIVEMDFECYALEKLSIKRKKKVGKAFNRKLNGWSYFEFQKFLEYKAENVGKQVIYVNPAYTSQCCNNCGKIHKANRNGSTYKCKKCSFELNADLNASRNIAELGKAFFSRLSVNEPIVASLVSATSHSL

SEQ ID NO: 35051 - protein, 476 aa, unknown
  TnpB Polypeptide
MIVLAVELHQFRLEVAANLGEDAAQVVENGFGEHATPIFRHKDQMDMHHKYTVPAASNILVMVHRPNYTLDMKHQQAYKYELQPNGDQQRRMRRFAGSCRFVFNKALALQKQRYEQGEKKLGYAGLCKRLTEWRTSVDTAWLSDAPVHPLQQSLKDLERAYANFFAKRTDFPRFRKKGRGDSFRYPDPKQIKLDQANSRIFLPKLGWLRYRNSREVLGTGRNVTVSRSGGKWYFSIQTEREVKPPVHPSGSMVGIDMGIVRFATLSDGTVFEPLHSFRKHQQRLARHQRAMSRKQKFSNNWKKAKAKVQKIHTRIANARRDYLHKATTTISQNHAIVCIEDLQVRNLSKSAAGSGEKPGRNIRAKSGLNRSILDQGWFEFRRQLEYKQAWRGGSVIAVPPRNTSRTCPACRQVSADNRRTQARFACVECGFEENADLVGAVNILAAGHAVIACGEPVQSGRSAKQEPTEATQAVSA

SEQ ID NO: 35052 - protein, 413 aa, Clostridium sp.
MKLSFKFRPNVSSKQLEIIEELSYHTTKLYNIINYALRENGFKNYYNIELEFKNNWHCDFLHSHTRQQMFKVLEQNWKSYFASIKDYEVNPSKYKGIPRRPKFKNVDKNKNEIIFTNIAIRFQDGILKLSLSKAIQRLFEVESLNFEVSNKLQSLIDWNSLQQARLTYDKVQKCWCLIVIYNKLEKENNNSNIMAIDLGLDNLATLTFKEGNETYIFCGKKLKSVNAYANKKIAYLQSIEMQKCGSDKFKNTKEINRLRRYRNNYIDDYLHKVSKNIIDKAIEHEVKKIVIGKLKGIKQDMNYNKSFVQIPIQRLAELIKYKAKLQGIEVKFKEESYTSGCSAFDLEPINKKYYDKTRRVVRGLFKSSFGLVNSDINGSLNILRKEEKCIPQLVKTMRDKGKCSRPLRIRVAC

SEQ ID NO: 35053 - protein, 203 aa, Microcystis sp.
MDRSDLKLALKGARLSMSEDITAHFKVIRSLRLCYHLDDLSFRSTKVKAKTCKCHHNTCNRLRLRIRNLVDELHHKVARFLVENFDGILLPTFEVSEMVLRSGRKIQSKSVRQMLTWSQYQFKIFLRSKAFEYGKTVINCCEAYRSKTGSRTGELIDNLGGKKVIKSEIDGRQMDRYPKGVRGFFLLALVDTPSFKDSLSVHC

SEQ ID NO: 35054 - protein, 380 aa, unknown
  TnpB Polypeptide
MKTFQYRLYPTRVQREQLLSTLIESRHLYNEMLEMVKAHYEETGKFLSKYDLNMAFKGRGGECVPQTVVQTLSDRLGKALKRFFHRKELGCKVGFPRFKGANRWHSIQLRQYGSGRDAFLDPDTGRLRVPKKLGSRIKVKQHRSLEGEPKTAHLILRADGHWYVLIVCDMGDAPAKREGPAVGLDVGLKNFVADSEGEIVDNPRCLKQASSKLRRAQRKLSRRTKGSQRRKKAARDVAKQHLKITRQRKDHAHKTARDYVDRYAFIAVEDLQVSNMLKNHHLAKAIADASWSAFKNILVLKAESAGVRVVEVPPHFTSQRCFSCGEIVQKSLSVRTHVCGSCGYVGDRDVNAARNILAKAEAGAPPSYLNVDASLHGARS

SEQ ID NO: 35055 - protein, 390 aa, unknown
  TnpB Polypeptide
MRQSIYSHNHIRIETMIKAYKFRIYPTKSQKRKLEDTLELCRQVYNRTLAYRKDAWEKDGKSVSKYETHQLLPDWKRDRSELKEVFSQVLQECQQRVDLAFQHFFRRVKNGEKPGYPRFKGKGRYDSFTYPQMGFKLKSGKLYLSKIGDVKIKLHRAIEGKIKRCTVHRYPTGKWFICLTVELPDPDVPFNDGSVVGVDVGLSSFITMSTGEKIDNPRFFRSEERALAKAQRRLSKCANDTPERRKALKAVHRVHERIANKRSDFAHQLSKTLVDRFGVIAFEDLNIKNMLQNHRLAKSISDAAWRMLVTTTQNKAVEAGSVVVLVDPRNTSQMCSRCGLKVPKSLSDRVHECPQCGLVMDRDENAAINILRLGLQSLRIESMEALPLQG

SEQ ID NO: 35056 - protein, 389 aa, unknown
  TnpB Polypeptide
MIKTYTYKVKHTDKFVDKFNKWIGVCRFVYNCAKELKEINYKKGVKLSSFDIQKQLTEAKKDVKFISEVHSQTLQSMIDRLDLAYQKYFRDFKSGLVEQKKQQYIKKKTKNGGVVSMNKLINLCKPKWATKKKYNSIPFKSITIKENGFYLPKFGKIKVFNFKSPKGVLKTATLIKEADGYYIKIVVDEIKEKKKIEDRDKQSICSIDMGVKYFMVTSDGEFFENPKHLFDFLKKIRIENRKLSRMKKGGANFNKQVERLQRLYQKLTRVRLDYLHKTSTYIANNYDYVIVEDLNISGMVKNKNLSKHILDCSWSTFFNLLSYKTEVIKVNPKYTSQKCFKCGHTEKANRPTQSIFECVNCGHSDNADLNATNNLMELGQQLLYDNVNH

SEQ ID NO: 35057 - protein, 286 aa, unknown
  TnpB Polypeptide
LETQYFEILLNHHAREILCNHENNSTFKVNSFVLTPDHLSISYSKDVPEVQCKNTTGIDRNLRNVTVGDCNQVVQYDIAKAVRIAENTKSIVSSFKRNDHRIRKKLYSKYGTRRKNRVNQMLHKVSKDIVQHAVQRKHALVFEDIRYIRKMYQKGNWQGKKRRGTMNGWSFSEIKCQIEYKSRWSGIPIIQLSKSDTRGTSTLCPRCGKRLQDKGAWNDPIRKRELWCDTCQRWQDRDVIAVMNQSLRGLPRLGSSKGDAGEAMKWNVDNALPLILRVDASKLQSV

SEQ ID NO: 35058 - protein, 381 aa, Clostridioides sp.
MIQMRAFKFRIYPNQTQKEIIEKSFGCSRFVYNRMLALQKEKYENEGESYSKYDLIKKLPSLKKEYEWLKEVDSTSLQATIDDLDSAYKNFFREFKKGNKQGFPKFKSKRNPKRSFESKWVNNNITIKDNLIKLPKLKWVKAKVTQNINGRILNTTVSKTPTNKYFVSICCEVDIKPLKESNEYIGIDLGLKDFAICSNGSIFKNPKWLRKANYRLKLEQRRLSKMTKFSNNWNKQKNKVAKIHERISNQRKDYLHQISTKLIRENQIICLEDLKVSNMIKNHKLAGAISEISWYEFRRLLEYKATWYGRLVSVIGNTYPSSQLCSVCGHRNKDVKNLALRKWICPDCNTQHDRDINASINILREGLRLVGMEQPLEPMNA

SEQ ID NO: 35059 - protein, 363 aa, Escherichia sp.
VKRLQAFKFQLRPGDQQECEMRRFAGACRFVFNRALALQNENHEAGNKYIPYGKMASWLVEWKNATETQWLKDSPSQPLQQSLKDLERAYKNFFRKRAAFPRFKKRGQNDAFRYPQGVKLDQENSRIFLPKLGWMRYRNSRQVTGVVKNVTVSQSCGKWYISIQTESEVSTPVHPSASMVGLDAGVAKLATLSDGTVFEPVNSFQKNQKTLARLQRQLSRKVKFSNNWQKQKRKIQRLHSRIANIRRDYLHKVTTTVSKNHAMIVIEDLKVSNMSKSAAGTVSQPGRNVRAKSGLNRSILDQGWYEMRRQLEYKQLWRGGQVLAVPPAYTSQRCACCGHTAKKIACHKVNSDARYVDIQRTPM

SEQ ID NO: 35060 - protein, 435 aa, unknown
  TnpB Polypeptide
VVFEAVKVALDPTPAQERLLLSHAGASRFAFNAALAHVKAGIEAGEKPEWSFYSLRKWWNASKDALAVGEDGVIWWRENSKEAYSSGLESLAKGLSNWVKSRKGARKGRRMGFPKFKSKDKAVPKFTYRTGSFGLVQGDPKALKLPRIGRMHCMEDVAERVDGARVLRMTVSRRAGRWYAALTVERDDKPVTKPPRGGAVGVDLGVKTLATLSDGTVIKNPRYLRKAERKLKRAQKVLSRKTTGSKRRAKARAKVARLHAHVANQRGDAIHKATTWLTQTYSEISIEDLNVAGMVKNHHLAKAVSDAAFGEFRRQLEYKTAKTGARLHVVDRWFASSKTCSKCGRVKAKLSLAERTYKCDGCGLVIDRDLNAAINIKVAGSAPETINAHGGTVRRSNQHGCATQVPTKCEPSKRRPGAVRLGAGVRKDTLQTTVK

SEQ ID NO: 35061 - protein, 269 aa, unknown
  TnpB Polypeptide
LTTLSGTVKVPFQAPDCWQKRLDEGWTLGTGKLVKQGKHWYFCVPMEIQTTPVAIESIERIVGIDRGLNFIVATADSDGKSFFKSGHEIMHRRHCFAKLRKKLQIHNTRGSRRKLKAIGHRENRWMSDVNHQISKALVDHYGPNTLFVLEDLTGVTFEEENLHGTAKARQDKRSWAFYQLEQFLIYKAEAAGSLVIKVSPRYTSQRCPHCGIIDKSQRDHDHHEYRCRCGYRTNDDRVGALNLLELGRRYLKGESKPKYTKSKVLAIAE

SEQ ID NO: 35062 - protein, 432 aa, unknown
  TnpB Polypeptide
LEKLLKTLTRTVVLECYANRYARRALREIESAYREMLVEMVEYAVKHKASQNTLHRVFYEKFRKRYPWLPTRVIKGAYRDAARRAKSFRERVKKGKAYKDKPEVRSVTITYSDSQDWRLEDGVIKLRTHRGWVELHYRNHKQLHRYLYGGWRLASELRFKILGRKVVVYLTLTREFKVDYDPRNVVAVDVNENNVTIALFKGGVLSDVYRVETGLGRIVIAYSERRKRITQGKSTKTREVKKKLKKLREKERKQDVLRKTAKLIETLAVENRAVVVVGNINEKAKERMEEDASSKLRHRIHQWSVKKLIDLLDEKPVHVVKVSEKGTSPRDPFTGLVINEYRPLVIRSAVKGLKRVKVVKIILRVASAGGRVLERDVVGAVNIGLRYLRSDGSPVALGSTGTHEVWVKPVNPHRGATPLTGLQVFTNTVKYR

SEQ ID NO: 35063 - protein, 372 aa, Bacillus sp.
MILAKKVRLKPTKEQERQLWKSAGTARWAYNWTLGKQEENHKNGNKFISDGILRKELTVLKQTEEYVWLYEVSNNITKQAIKDACDAYKKFFAKQAKRPKFKNRKKSKPSFYNDNVKLKIKNNKALIEKVGWMKISERIPMDVKYYNPRISFDGKYWYLSVGIEEEPQTTELTDVSLGIDVGVKELAVCSGGQVFENINKTNEVREVEKRLRRLQRQVSRKYKMNKEGNRFVKTSNIIKIENEIQHLHRRLSNIRTNHLHQTTNDIVKTKPYRIVMETLNIKGMMKNKHLSKAFANQKLHEFKRQMKYKCEKYGIEFIEADRWYPSSKMCSCCGSVKKDLKLSDRVYRCDCGLVMDRDLNASINLSYYQLAN

SEQ ID NO: 35064 - protein, 224 aa, Micromonospora sp.
LTAQSDRSKERNRRRARLRSIANTAALRGDHAKARRITVNNLGTVKRDRQAARHRARVRTEVFSAVHRVVDKAAAVVAEDLTRRFPGRNPLGKNSNRRLAAWTKGVTAEALVNVSERRGSALVHVNAAYTSQACHRCGRLGRRSGDRLHCTSCGVVWQADVNAAINILQRAGDPDIALHTPHQTVKQILQDRVDRHRTRLPVQDSSPALAARRAKHPNRSTSIQ

SEQ ID NO: 35065 - protein, 361 aa, unknown
  TnpB Polypeptide
LNLTAQLKLEATAEQSAALARTLVASNAACDYISGLAWDSKTFRQFDLHRLCYRRVRERFGLSAQAAVRCISKVADAYKVDRKAKHLFRPIGSAAYDQRILSYDLEASTVSIWSLAGRLRVPFVCDERQRAMLANRKGESDLAFVRGKWYILANCSMPDPIVAAPRGFLGVDLGVAQIAADSDGNLYSGSEIKSVRHRHRRVRAKLQAKQTRSAKRRLQKLSGKERRFAKHVNHVISKQIVAAAERTGRGIAVEELTGIRDRIRATRQQRRVLHSWAFAQLRAFLEYKAKQAGVRLVAVEPRNSSRECSACGHAERRNRLNQSTFRCAACGFATHADTNAARVLAGRAAVSGPNVAGCAAV

SEQ ID NO: 35066 - protein, 274 aa, unknown
  TnpB Polypeptide
MSVQLLRRLKRYVNIYKSYTLKTSGWKLLGGNVVRIANQKYRYFKSRDIDGKVKTVTIKRDALGDIYLYFSCETNENEVLTRTGESVGFDFGLKIFLTGSERKNIISPLFFKQNANLIAKANRNLSRKQKSSNNRKKARLNLARLHKKVANMRRDFHWKTAQYLTGKYALISIENLNLKAMQKRFGRKISDLGFADFVNKLKYEAQKAGSNVVEVGKFFPSSQLCSNCGYQNKELKDLRIREWTCPKCGKHHDRDLNAAINIKKEGERIFFSRK

SEQ ID NO: 35067 - protein, 209 aa, unknown
  TnpB Polypeptide
VKGKPIKAINQYYNKLKANYTSILRQGKETKEGPHTSKRLERLHRNRHRTIKDLFHKASYQIIKQAIEHNIGTIIIGQNEGWKQAISIGRRNNQSFCHIPHHMLITMIRYKAAEQGIEVRVTEEAYTSKASFLDQDPVPVYEEGRTRTFSGRRIYRGLYQSVKGLINADVNGAANILRKVFPTASANGIAGLDGSQSVNVSTPLVLSIR

SEQ ID NO: 35068 - protein, 371 aa, unknown
  TnpB Polypeptide
MRKMYQYRMYPTRKQQKALEAVLEECRWLYNETLAYRKDAWEQRQEHVSWYESKARIPLLKAERPSLTHVHSQVLQNVTERVELALQAFFRRVREKASEPGFPRFKGKSRYDSFTFPQSGFSITHDDRVCLSKIGSIKMVYHRPVRGTIKTLTIHKSSTGKWYASFSCEVEPLRLPERSEQVGIDVGLLTFATLSTGEEIANPRFFRKEEKALVKVQRKHSTLAKGTPERHKQRKVVARVHERIAWRRDNFTHQASRSIVDRFGVIAIEDLTVNRMLHNHCLAKSIADASWSAFFSRLTSKAAEAGRHLVKVNPAYTSQTCSQCGHRQKITLNVRIFACPCCHVQLDRDLNAAYNILALGLQGCVIPEAPA

SEQ ID NO: 35069 - protein, 182 aa, unknown
  TnpB Polypeptide
VLSDGTKYTNPKELNKREKQLKRLQRKLARQINHSKNYNKTKIRLARVHSKIKNSRKHNIINIVNEIVKEYDCIISEKLNTKGMSQNHKLAKSIIDASFNKICQLLKWKTKILGKYYYQVDTYYPSSKTCSHCDYKTNITNNLNIRNWECPKCGNLNDRDINASINIMFEGLKIHYLNKVNN

SEQ ID NO: 35070 - protein, 276 aa, unknown
  TnpB Polypeptide
MLEAVKVALDPTPTQERLLLSHAGAARFAYNAGLAHVKDMLEAKEKPEWSLYALRRWWNQAKDALAVDETTGEPWWPENSKEAYNSGLESLSDALKNWSKSRKGERKGRRVGFPRFKAKDRETPRFAYTTGSFGLIKDDPKALRLPRIGRVHCMENVTGRADGAKVLRMTVSCRAGRWYAALTVERADNPTPEPPKGGSVGIDLGVKELATLSDGTVIRNPHALKSNLTRLRKAQRSLSRKRKGLHTSTKFIYLLVRSPFVLSSLPFCTKFAPLLY

SEQ ID NO: 35071 - protein, 449 aa, unknown
  TnpB Polypeptide
MSNVYTYTTEIKNREYNVDLIKYITEYKGLFNFIQRKAFHIIKNSYINTGEFTLKDNGILTKSIATTYNLTARAAASIVYNMTGRFNAIKELKEYEQQQLETKIKSLEKKIAKTEAARQGLNLRMALNTATKKEQEKYEKLKISLYWRRNKLNKLKRKIKKIENEIKTQRYKVCFGTKKLLKTDFSKFIEQRDSELFYVGRVSDTACNNNFQMRYNRKDNQFYFKIRKEINTGEGKWIKGKVYFSKSQTKKIKELLISKESPLTYRIKVKNGRYYLQIIFQYKHTKAMCDTRNSNGVIGVDFNKGFVAVSETDRYGNLINTFNIKYRFRSGTKTESDFQWVAKILSEYCLKDKKDLVIENLKFDKAIANMVRGHFKIYNEMLSSLAYAKFSKIIESKCAKKRIFLKKVNPAWTSYIAKKKYCKKKKLNIHSGASYVIARRGQGLKDEVQ

SEQ ID NO: 35072 - protein, 393 aa, unknown
  TnpB Polypeptide
MKIVHKIRLEPTVKQFILFNKSAGVARFSYNWALAKWNELYEAGEQTSEISLRKQLNSIKKVDFPWMYEVSKTCPQQAIKNLGDAFGRFFKKKSKYPNFKKRGIHDSFRADNGPGTFSITGNKIKLLKLGIVKLSENLRFTGKLMSATVSRRAKHWYVSVLIETEVKPVTHKNQGVVGVDLGIKSLAILSNGEVFENPKALRRNLCRLKRMQRRVSRKVKGSYNRRKEIQKLATLHAKIRFIRQDILHKLTMHLAKDFKTIVIEDLNVKGMVKNHCLAQAISDVGWGEFRRQLVYKCDWYGSELIVADRFFASSKTCSACSFYYGDLTLDIREWVCPCCGILHDRDGNASQNLKQIGTVRPESTPVEMEALAVSNNSETIVCETGISLWHKTP

SEQ ID NO: 35073 - protein, 392 aa, unknown
  TnpB Polypeptide
MQDFRLMVNRSIRFALENDLTAKGSLVKLAQSMAKEYHINFQHARTATEVALSLSKGHRRRLRKGRECKVPYVYRPFLRADNSTFHLSTENGHVRLSIRAGEWSGLDVQLSPYHLKVLAFGKIKQLVLNEKKAVLVIEKKAPEPYVPASVIALDTNERSLDGVAISTSKGSPITIPFSEVSVVQHRHFFRRRKMAKKKRRDQRVMRKILSKEGKREHDRVSQRLHLVSKGLVEAALEAQAAIALEDLHLPKGGGRGGRMRRRLSSWPQRELHRQIEYKAEERGVPVIKVNPRYTSKTCPRCGEIKERRSRVGRVFVCDKCGWRMDRQLNAGLNICRTALAEIPEAMRRGLGGLRLDPDALTDDAMILLYSSGSAGAHGVSGRSGSTGRVATE

SEQ ID NO: 35074 - protein, 400 aa, Actinomadura sp.
MRTAYKVRVYPTPQQAAVLNRTFGCVRLVWNTVLTWRHARYHTEGKRTSYAETDRYLTELKRDGSHDFLYEVSSVPLQQALRHQYTAFVNFFAGRARYPRHKTRHGRQSATCTRSAFRWKGGRLHLAKTEGPLAFAWSWPGIDPATLTPTTVTISRDPDGRWYASLAVETTADPEPPPTTGAAVGVDVGVSDFAVLSTGEKIANPRHLERKARNLARYQRRMARKQRGSHNRTKTKAKVARAHRKVRDARRDFPHRTSTRLVRDHDVIVTEDLNVCGMVRNRSLAKAISDCGWGEFRRLLEYETARHGHHLIVIDRWYPSSKTCSACGHLLAELSLRTRHWTCPACRTRHDRDINAAKNILAAGRAVSACGADVSPQGSSLRRSAVKQEAQPVRAGIPRL

SEQ ID NO: 35075 - protein, 527 aa, Nocardia sp.
VRVRTRLHPTPSEAATLTEIGAFVGGVYRRELAARVAHGALDRKRQADYRAQRKRALTTQTSSRWAGAITRSVEDQYQSGMRALTAHTTSLDAAIATLSARCALAPGKRDGKVTGYRDGGERFQKNRRLTVLRDRAARAQERWAAGSPSIVVGGKRLWHTRNHLAAADLTEDRWRQQWDAARMFLTADGETGKAGGNETLRVTSGTGQVRIKVPAALAQRFGTHITIAAPVDFRHRHEEWRDRVHTNRAVRYDISYDPTRRRWYLDASWSIAPAAPVPLSTLRAGQVLAVDLNDGHLAMCVLDASGNPVGQPDTIAIATEGLPASQRDGHLRAALTTLLDQAEHTGCAAIVIENLDFADARATGRETLGRGKRGKRFRRSVAGIPTAKFRERLRGMAARRGIAVVAVDPAYTSKAGGKHWRQLLQQQSKTSGRAVTVHHGAAVAIGRRGLGLRLSRHSSGPRHAQRSVPGQPASSATPAPRMRVACAKRRLTLGPHGRPDGSGGKQPTLAARTVRAATERCSLSLTD

SEQ ID NO: 35076 - protein, 340 aa, Gammaproteobacteria sp.
MKRAYKFRFYPTPDQVELLAQTFGCVRFVYNSILRWRTDAYYERQEKIGYPQADKQLTALKAMPEYAFLRDVSAVPLQQAIRHQQEAFKNFFAGRAGYPAFKSKRHKQAATFMNTAFKYRDGALYMAKSTTPLNVRWSRPLPSSPSSINITRDAVGRYFVSCLCEFEPVSLPITVSTVGIDVGLKDLFVTDTGFKSGNPRHTAKYAARLALLQRRLSKKAKGSKNCAKARLKVARLHAKIADCRTDALHKATRKLINENQVVCVESLKVKNMIRNPSLSRAIADAGWGEFARQLQYKGEWAGRSVVAIDQFFPSSKRCSCCGYIMQKMVMLPISRTCVFQ

SEQ ID NO: 35077 - protein, 266 aa, unknown
  TnpB Polypeptide
MRTVSSYGVELRKQNIPIRQTLDIYRSAVSCLIEIYSQAWDELAVITESKKRFNTAEHLVHTTKKNQARFDFDLRFPKMPSYLRRAAIQHALGSVSSYKTRLELWKKMDKKGGTPKLVCGNHAMPVFYRDVMYREDTEEKDGAYLKLYDGHDWKWFRVSLSHTDMEYLRKYWAGKRAAAPVLEKRHRKYFLRFSYTEEVPLTKTPVKGQIICSVDLGINTDAVCTIMRSDGTVLGRKFIDFPSEKDRMYVCWDGYADSSGNMVLYR

SEQ ID NO: 35078 - protein, 415 aa, unknown
  TnpB Polypeptide
MPAGSSSSPVGSVWDCENYYEEYVDVLGSATTQQVTRVNDAAWRSVFETVEEADQEVSPPGYWGNQADGRDLRTYIRNDAYTISWGERSRLEVPIGSQLKDEYGFGQFERLRVAVRGEPHWQGEQGRLHLTYDDVDETYRAHQPVTVSETEQATSTGTDAAALDIGANVLVACTTTAGHQYWYSGQEPFRQFRETTERIADAKAKLPAGQQTSNRIQRFYRKRSRQRDHAVNALLRDLVKRLHDDGVETIYHGDLTGVLGEFWSVEAKLKVRTFWAHRQCLNQLANVCEEYGIEVASLSEAWTSQTCPECGERERTRRHRETLRCPCGFDGHTDLVASRTLLEQATNTEVRPTARPVRFQWDDHQWYSVKEAVVAPTNSAQTRKVPPWCCRDTSERTLRVRGVDVDPLVARFSSC

SEQ ID NO: 35079 - protein, 428 aa, unknown
  TnpB Polypeptide
MAAERTVSKTLEATTVPPTAHKQRRLEDTVATYRDALHTAFESGADTQSAVNDIVTDYDLTSYAKDALKQYVPQLREAFDADELADDHPVRFTNRGFRLDHSPSREYEFCWRVPQAGRGNAFWIPLRINPAQESLWFDVLDGEVSVGEFRLIQNRSTWTLHVSVEYTVDDPEPDEDPTFIGFDIGESALITGCALQRETPTKPLLIDGGRARHLRKEMYTTLQRLQERGTADWRIEERFGYHQNALTDIVEKASHEAVEYARQFDDPVIVLEDLSYIRENLDYGAYMNRRLHSWAFARLQGRIEDKALEAGIPVEHVQPHYTSQICHACRHVGRRDEQAEFRCTNDECHITTFQADINAAANIARRVDPWGESVPWKSERDDTPRNGSPCDRATERRETSREPRQMTLSEYGSETSETEFSLVGSSVR

SEQ ID NO: 35080 - protein, 471 aa, unknown
  TnpB Polypeptide
MSKLLVRSEKWRVGLSLEQRVFARRTTTEYRAYCRALMGVVMTHWPQIAAAKSQSSVVEALTHRTKRNPDPKYAYFSRRFHKFPSYLRRAAIRFVIGQVSSYLSRYDAWQAGERRFPEERPPRLEANGGANPCLYRGQMMKWGAGYASVEVKLFDGREWLWHTAPIKRRGRRDPNLSKLLNPTLLAMGKKVWLSVPHQLEKPSSPRWEDPTADKALGVDLGINKSASMAVVDRVGTVTHRGFIHPGADMDQRDKLLDAIRKKASLTGKLSEGFCKNLYRKAVALNTEIARKAARGILDAAIHYGVRVIVFERLKGFRPVGGRYRSSLRKRFHTWLHRLVHRIVTQQAEELGIRVVTVSPWGTSKYAFDGSGRVQRDSQNAALARFSTGKCYDADLNAAYNIAAKHHYYRYWRYVLQLEKSPNFGGQGNRDEARPGRSSGRAPRTPVTLSTLWRLAEGMAEGEAPPTLAKAS

SEQ ID NO: 35081 - protein, 379 aa, Lachnospiraceae sp.
MANKAIKFRVYPTAEQSVMFAKTFGCCRKVYNLMLSDKIEGYKATGKFPAVTPAKYKKDYPYLKEVDSLALANKQLDLQEAFRNRFSKSRKEKNGFPKFKSAKHSRKSYTTNNQHGTVTIIDNRYIKLPKVGKVRAVIHRIPDNAWIIKSATISQESDGKHYISILFEFENAANPYVADKTNAVGLDYASDGLYVDSNGKVGTNHKYYRESHDKLAKAQRKLSHKQGSKKHEVKSNNYIKQLRKVNKIHRHIANQRLDNLHKISTEIANQYDIVCVESLNMKSMSNKGFGNGKATLDNGYGMFLSMLEYKLSDRNKYLVKVDKWFPSSRLCHRCGILHPEMKDLTIRKMQCDCGLTISRDQNAAINILNEGLRLLTEVA

SEQ ID NO: 35082 - protein, 102 aa, unknown
  TnpB Polypeptide
VEDLNIKGMSGGLHLGKGVQDNGYGQFLFMLGYKLEECGKYLIKVDRYFASSKICSVCGHKKKELALSDRMYVCECGNRMDRDVNAAVNIREEGKRIYKECA

SEQ ID NO: 35083 - protein, 367 aa, unknown
  TnpB Polypeptide
MKRYRDALNYSIRVIIENKALSLGKAHRLLYNTLKKKFGMSSKMAQDCYREALAIAKSWLKNPKRHRMPMAKTPRIWLSYGYSYRVKDGYVELLGGVKLRIIGWDRRYDSYPSGEARLVFKEGRFTFYISMHIPRPDKHAPREVLAVDINEKHIVVGNSKFEHRFETAIENALHYKRLAESLQKRYSSPRYMAWLRRRGIRERIRCFHRKAGNVVEDWAKKTSHKIAVLAKQSQYAVAREDLTGLVESLRKLLKDHRVALMMLSYRRLEFWIDWQAEKHGVPVVVVEPRGTSTTCPKCNNKMRETGYRVFGCPNCGFEADRDTIAVLNIERKILSKMWGSLTTPNTPQMTDVAPNRWGEPMNPRREP

SEQ ID NO: 35084 - protein, 320 aa, unknown
  TnpB Polypeptide
MVVYKTYKYRVYPTQEQTAQIELTFKMCAFVWNKFLERLTKAYRRRGESLTIFDCDHILTQMKDYYPWLAQVDNKAMRCTIRNLFDAKKAFYRRLHAGEKPGYPRYKSEHNPVSSYTTNAVIHVTDDYIQLPKVKRLKYKRSRPIEGSIVEATVTRDVKGRYYVSICCAVEMEPLPTLDTSVTICRDDVDFAVDSNGTCYAQPENLDQQYRRLRREVRRLHRMVPSSQNYQKQRQKVEGIYQHINNIQSDHRNKLVREIIRKNQVITVEAVDDARMHRDREYAEAVKKTAWRDFIRVLDYQARCTGRELVVAPTATLNVS

SEQ ID NO: 35085 - protein, 399 aa, unknown
  TnpB Polypeptide
MGKKFAGQMDKGKAAAVEQRAYRFEGFPSQGQAHLLSQFIGSARFLWNRMLADWKDSYKETGQSAPVRTPASYKEEPDLAWLKGMDSLALANVQRNFQRAVEEFFSGEKGFPKFKKKHACPDTYTTNLSNRKQPNLRLSGCLLKLPKVKDSVRLRVHRRVREGGLLKNCTVTREPDGRWYFSLLFEYPKQEVPKKAAGKGPEALEAIGLDMSLPELYVDSDGNTPAYPKPYRKLERKIAREQRKLSRMEKDSRNYTKQLKKIAKLHAKAKHQRADFLHKLSYRLVSHYDIICIEDLDMSAIKKALSFGKSASDNGWGMFVRMLSYKAEWYGSIVIKVGKFFPSSKTCCACGHVHKELKLSDRVYVCPACGHVMGRDHQAAINIRNEGMRIYTETHPFAA

SEQ ID NO: 35086 - protein, 378 aa, unknown
  TnpB Polypeptide
MISYKYKLYRTKHTRHLDNMLSEACFVWNHALSLQKRYYRLYGKYVSSARMQKHFTKRIKRTYLHSQSVQEVLQRLDAAYTRFFKHLAKRPPKYKKTKDFASFCYKQGGFSLCGNVFHVNSVKKDYRFSYSRPYMGKVKQVRVKRSHLNEWYIYVITDASPKSYTKTHDGASVGIDFGLKTYMTFSDGEKLSHPQFLKRDIKRLKKISRRHSRCAKGSHHREQARLALCRFHEYVSDKRRDFQWKLAHDLCRRFDMIFIEDLSLNGMSRLWGRKMSDLGHSLFCNILEQVADKYGCTVHRIDKWFPSSKLCDCGYKNDNLSLNERTWVCSQCGQIHDRDVHAAEMILRRGIYELASNGKTIEPFGFEAVVSEPRIPLL

SEQ ID NO: 35087 - protein, 369 aa, unknown
  TnpB Polypeptide
MLKAYKYRIYPNKRQEIQIQKTFGCCRFVYNQCLSLKISKYKDENISMSKFDLNNYCNRELKKQYEWLREVDKWSLTNSIYNMDLAYQKFFKEHAGYPKFKSKRSHKESYKTNFNNNNIKISFENNKIQLPKLKWIKAKIHREFIGKIKSATISQVPSGKYFVSILVETEHFPMKSTGTAIGIDLGIKDLLITSDGEKIDNIRTTQKYEKKLAKEQRKLSHKVKGSNNWNKQRIKVARIHEKIHNTRIDNLHKISHKLINENQVIVSEDLAVSNMVKTNNLAKSISDCGWYELTRQLTYKAEWNNRQYIKVDRYFASSQTCSCCGYQNKQTKDLSVREWVCSQCGTVHDRDVNAAKNILNEGLRLLNAA

SEQ ID NO: 35088 - protein, 405 aa, Mycobacterium sp.
MARFEVPEGWCVQAFRFTLDPTEDQARALARHFGARRKAYNWAVATLKADIEAWRVTGIGTVKPSLRVLRKRWNTVKDEVCVNAETGAVWWPECSKEAYADGIGGAVDAYWNWQNSRSGKREGKTMGFPRFKKKGRDQDRVTFTTGAMRVEPDRRHLTLPVVGTVRTHENTRRIERLIATGRARVLAISVRRNGTRLDASVRVLVQRPQQPNVAQPGSRVGVDVGVRRLATVANEAGAVLEEVPNPRPLDAALKELRYASRARSRCTKGSRRYRERTTEISRLHRRVNDVRTHHLHVLTTRLAQTHGHIVVEGLDAAGMLRQKGASRRPRPPARTVGLGPGHSAPALVLQDGLVRVGAGGRRPLVPVVKRGADRKTGPCPAGGCEARKGGSRMAAEQPRDGVQVA

SEQ ID NO: 35089 - protein, 423 aa, Cenarchaeum sp.
VYNRAVSEYLFGGEYMERVVVDILQSFKLPGKLDDFTSGTLDDDYHTYDFGPSKRALKYGMFKQLTGWRAEHTWLRECPASFGRGAIQDASVACRRVMDGNSSHTPYRRKDGRIILSCINPPVRKGEHTIHIPGYGVVETAKPIYVSWDMRSFKIVDVTKRVDKHTKPSDHMFELHIAVRVPVEPHRNTGIMRGIDVGGKHLAVTVDTNGNVTIHNTRHRAILLEIDALKSLRDHKVRHGRKWGVLNDQIKQLYRKADGIAVNTINQTVSRIVQGVDAVIAEILSIKDMTTHGGNYKRAMNRSMRENRLGEFLRKLAQRCEREGIPLYGVMARFTSQTCHMCGHVDSESRISRDKFICTNCTRVFHADVNAAWNILYRAAGNVILRRSGHKEGYKPTPAILRSIQKSRQKRDKRAAAAVFLSI

SEQ ID NO: 35090 - protein, 419 aa, unknown
  TnpB Polypeptide
MLTMNYRYRIYPDATQQDTLFGWMEVSRNVYNYALREIKDWFNSRKCLVDRCSIVQEYILPANLKFPNEVNQLNALPDAKREFPRVAEPPSQMLQQTIKQLHRALENFRERGFGFPRFKKYGQLKSLLFPQFKESPVTGQHIRLPKIGGIPINLHRPIPEGFVVKQVRIIKKADRWYASINIQCDVNIPNPMPHGYPIGVDTGLEKFLATSDGVLVKPPKFFKSLQSELKLLQRRLSRKQKRSKNYEKQRLKVARLHHTIDNTRKDFHFKQAHALCDRADMVFMEDLDYRTMAKGMFGKHMLDAGFGQFRNLVKYVCWKRGKFFAEVDARGTSQECPECGAEVKKDLSVRVHSCPHCTYTTDRDVASDQVIKNRGIALISTPGYGGMETVCAVDLPGVGATQSRQVAKSRKGITRKSQK

SEQ ID NO: 35091 - protein, 360 aa, unknown
  TnpB Polypeptide
MLRCTAPPGCCGELAAVGMARFEVPDGWVLQAFSFAVDPLPQQARILARQFGGRRYACNWAVRQLKEGIEAYQCGLAGLDAVPPSFYGLRRRWNQVKNDECVDKQTGEVWWPEISKEAFADGIRGAVDAYWRWQNSRNGEAGGKRAGFPRFKRKGRDPDRFTITTGAMRVNPDRRSVTLPKVGTVRTCENTRRLERLISLGRARILAVTIRRRGTRVFAIFRVIVSRRARTPGRPGSQSRRAAPRWPGSLTPQARINPLPAGQPRDHPAAPPDRRHPHRCDQQADHPPGQNPRHGGGRDAERGRDAPAKGPARSPLTPAQAGRRRARPDQDPAALQAGLVRMPPDRGGPVLPQLADLLEV

SEQ ID NO: 35092 - protein, 412 aa, unknown
  TnpB Polypeptide
MVRRLKVGQSAQMDTLARASGELYSRIVTSYWRTVRHKGLWLKAKHLMRWHTSDALHAHTSDACVQSFFAALDSWRARRTTDAAAHPPRKRRSYYRVQWKASAIRVKGDSLYLANGRGNAPLIVPWAHGRPLQVEMGWDGRQYEIRATYGIEAADAISVKGCKIAGVDLGEVHPAVAHDGERAIVMNGRFLRSVRRYQNKTKGKLQALLDRKRKGSKRWKRLVRSKKRQQRRWDHQVKDIAHKITGRLVSTLHENGVQTVAVGDIRDIRKRVDVGHAGNQRIRQMPSGMIRHMVTYKAERLGMAVVVQDERYTSQTCPACQARHKPRGRVYRCTACGFTMHRDAVGALNIRQKYLGAIPVVGAMASPTIGVRYHAHLSRSPLPHWQWERIPTLKLGSTSIEHDGIESAKSAK

SEQ ID NO: 35093 - protein, 393 aa, Thermococcus sp.
MPSETIKLTAKFKLKETPEGLDELFETYREIVNFLITYAFENNITSFYRLKKETYKSLRRGYPELPSHYLYTACQMAIAIFKSFRKRKKKGKAKGKPVFKNEVIMLDDHLFKLDLENKTVKLSTPNGRTQLEFYPAEYHERFKDWKVGQAWLVRTPKGLFLNVVFSKEVEVKEPKAFVGVDLNENNVTLSLPNGEFIQIITHEREIRTGYFVKRRKIQRKIRTGKRRKELLEKYGRRERNRLNDLYHKLANKIVELAEKYGGIALEDLTEIRESIRYSAEMNGRLHRWSFRKLQSLIEYKAKLKGVKVVFVNPAYTSSLCPVCGGKLSPNGGRVVKCSNCGFEADRDVVGSWNIRLKALKMWGVTVPPESPTMKKGVGKVSRNDVYELYTSYG

SEQ ID NO: 35094 - protein, 418 aa, Shigella sp.
  misc_feature (308)..(404): Xaa can be any naturally occurring amino acid
VKRLQAFKFQLRPGGQQECEMRRFAGACRFVFNRALARQNENHEAGNKYIPYGKMASWLVEWKNATETQWLKDSPSQPLQQSLKDLERAYKNFFRKRAAFPRFKKRGQNDVFRYPQGVKLDQENSRIFLPKLGWMRYRNSRQVTGVVKNVTVSQSCGTWYISIQTESEVSTPVHPSASMVGLDAGVAKLATLSDGTVFEPVNSFQKNQKTLARLQRQLSRKVKFSNNWQKQKRKIQRLHSCIANIRRDYLHKVTTAVSKNHAMIVIEDLKVSNMSKSAAGTVSQPGRNVRAKSGLNRSILDQGWYEMXXXXXXXXXXXXXXXXXXXXXXXXXXXXXXXXXXXXXXXXXXXXXXXXXXXXXXXXXXXXXXXXXXXXXXXXXXXXXXXXXXXXXXXXXXXXXXXXXVLWSYSEREPPVTK

SEQ ID NO: 35095 - protein, 381 aa, unknown
  TnpB Polypeptide
MSVVNRAIKYRLYPTEEQKVFFAKTFGCVRKVYNLMLSDQIKSYQDTGGFCKATPAMYKERYPFLKEVDSLALANAWINLQAAFSNFFGRTRKKKNGFPKFKSFKRSKRAYTTNNQRGRSDIAILKGSIKLPKVKSVKAEIHRVPDENWVLKSATISQDRDGKYYASVLFTFEEEKLTYKIDAKNAIGLDYASDGLYVDNNGNIGTNHKYYRESHEKLARAQRRLSRMKGSKKHEKKSSNYRKQLRKVNKIHRHIANQRKDNLHKLSTEIANRYDVVCVEDLNMKAMSNKGFGNGKATLDNGFGMFLPMLEYKLNERGKYLIKVDKWYPSSQLCHACGTLHPEMKDLKVRTMRCDCGLVIGRDQNAAINILNEGLRILAAR

SEQ ID NO: 35096 - protein, 421 aa, unknown
  TnpB Polypeptide
MLKEKNEKIRDTRKATRDRRSQMDCRVFCVKIQENRLSNAKLEKIQCCFLEGKWLYNAVVASETLSLEDTSCVQVKVGDNFEERKIKYLSSQMKQSVVDSVKTNVSNLSKAKKKGLKVGSLQFKKECNEINLKQFGTTYSIKGKNKIHIQRIGVVVVNGLEQLNLDEVEFANAKLIKKPSGFYIHITVYSKKQPQSNTEKEVLGVDMGIKNQLTFSNGVKVNFYLEESEQLKGLLRKLSRQHKGSNQYKQTLARIKRIYEHQNNKKNDVVNKLNSVLKKHYIICFQDELLNSWKRTKSKRKFSFGKRVQHGILGRVKVNLKKNSTNVVLESSVPTTQTCPECGCLTKHSLDKRIYHCSYCGFENPDRDIHSANMMVLLSGYGTYRSLNTDAVSTETMGSLLDNLSNLGVVVTTNSMEAGYI

SEQ ID NO: 35097 - protein, 405 aa, unknown
  TnpB Polypeptide
VGEKVKVTRVEQHNINKNHAMFVTVDEYCFKAKNLYNYANYIIRQEFINNNKWIRVGVLDKMLQSHETYQELGSQAAQKTLQLLDKNWKSFFKSIKDWSKNKDKYLGRPKLPKYKDKNGRSILILKNIQCRIDEGYLVFSWKPFKKFKIKTNVTDKLIQVRFIPKGSNYIMEIVYEIEIPECSAESKNIIGIDLGIDNFATISNNAGLNPFVINGRIIKSINQYYNKKKAQLQASLKTNHNRDWSNKLQKLTNKRNNKINHFLHCSSKYIIDWCVTNNIDTIVIGRNKEWKQESNMSKKVNQSFIAIPHGSFIEKLRYKAENVGINFIETEESYTSGTSFLDNEEPIKDNYNKSRRITRGLLKSNNGVIINADLNGAYQIIKKVFPNAFADGIEGAGLHPVRVNL

SEQ ID NO: 35098 - protein, 326 aa, unknown
  TnpB Polypeptide
LSLYGQQHAITALKRTRTALATAHSQALQQVAVRLDLAMQAFFRRGRAGEAPGYPRFRGAGRDDSFTSPQAPRGGTLTGDRLTLAKIGTVRVVPHRPLAGTPTTGTIRRSSTGKWYVGCSCEVADAPLPPSPAPVGIDVGLSPFAALSTGAMVANPRFFATDERALGRAQRRRSRAPQGSPARRKRRKPVARIHERIAFRRHDFTHQTARRIVNHHGLIAFENLLVARLGHHPTLAKGLHDAAWGGSFRRLSAKAASAGRTFVAVNPAYTSRDCSRCGVRHVMPLAVRVYRCGSCGLVPDRDLHAARNLLAVGLHGLGLGPRSPRL

SEQ ID NO: 35099 - protein, 330 aa, Nostoc sp.
MFAIKRELKLNKVETSLMRGNAGFKRFVYNYGLELLTASWSFEDVKASDSKRIDAIKKVLTQVTMQKPEYAWMREYPSTVYQSAFIDLKDAFSKWRKGLGDFPKKKSKKKGDSFSVYKTAGIYLEKGKPALPFTNRVVINAGKIIKLPGLKELRLKERIDFICSSQTFTVSRTADRWFVAFVLDAEKIPPIIHPIKKIGVDLGVKVLATCSDGTFYDMPVTTKKAKIKLGKLQWRNRNKVLGNKKLKIKASNKAKRYYVRLATQHAHVANIRQDATQKMTTDISRKAAVIRIEDLNVSGMIANHKLASAVSAASATKCLFMTKKWLKNWV

SEQ ID NO: 35100 - protein, 429 aa, Nostoc sp.
VYGCQQILITPNKDLKALLEYVCTEANSLINCGIYYSRQLYFKTGNLPNKADLHKQLGTIQKNKHYQALYSDTAQQILTSVAESFKSYIGLVKGIKKGTVTQKPKLPNYRTSGGLALATFTGRSLKLKDGMLRFPLGSLVNIWFGVDCFDLPMPTNLDFKSIREVRILPRNRCFYAEFVYKTDSKIVEFDKSKVLGIDHGIDNWLTCVSNIGTSFIVDGLHLKSFNQWYNKSVAKIKEGKPQGFWSNRLAVITEKRNRQMRDAVNKAARVVITHCVDNQIGSIVFGWNEGQKDGANMGKTNNQKFVQIPTARLKKRIEQLCEQYGIDFIETEESYTSKSSFIDNDLLPTFGAKPEGWKSSGIRITRGQFQTSTGIKINSDCHGAINIIRKVAAIFKFDLSGVGRGCLSQPKKVRLWTLQKSPCLQTGEA

SEQ ID NO: 35101 - protein, 508 aa, unknown
  TnpB Polypeptide
MYRIKKPKWRKMIVPTYTLELKLNTKKYSDQRYLENYFREVAKIGNTIRRFAIRQITLLKRDKTYTDLLKQYVALEKGPEKEALSKQLSVIVKSYGLTQYDLQKSATKLRNHLKYVHSDVYQKISDSVWKGAEKVLYSTGKQIHYKKWDEFLSFEGKKNTTGIIYKDGKVYINASPKRQNRGLILEVILPKNQNSDHWYYETSALNDRTKYCRIVRKKFSTEWRYYVQLVQEGTPPLRHAVGTGRIGIDIGTSTVAAVSDTKCHLTELGEGIEVQDKKIRKMQRKLERSRRASNPDNYNEDGTIKKGKKTWNYSNRYKKIRNELSAMQRKRSDTLRQWQETYADLLLEEGNEVYVEDMNFKGLQKRSQKTEKNKKGKYKRKKRFGKSIGTRAPSQFLTILKRKLGYTGGTYHEVNTRTFKASQYDHTSDTYRKKKLSRRHNTINGEWIQRDLYSAFLLMNSDDTLEHADRDKCLQNYPQFKTMHNKCITEILRSGKHIPSSFGLKRAA

SEQ ID NO: 35102 - protein, 477 aa, unknown
  TnpB Polypeptide
MNKSNCPICEAKRSVWKKKQTTYHQCDICKEKFYMSTRKHRAFPDIKTKNIIKNTNEFRRAKVYEVTKSVLPTSERENVRDTMDGKLLCFRHGGSNWNLKLVSNVYVDLTNEEGTFSIKTDIDINEYENININEDAVLDVEKSKLQIQKTKVNVFINKHNKKKLYKILKDKKTTKLTFNISEFFLKDEVWFEGNLITGIDEDGKRDKHTISMPTDVSIEEYKNIKNIDEKFDRKVSLSSSYPYNLYVTLFRNSKLRKINNKVEIGVDLNFPILVAAVKINGEEPFFFETPFPENKIRKLHERANIEVSKGNLPKKSMFQNTAKRISKGTYYRFIEHVHKEVRNKLKLKSNKNIKFIWKIEAPFVLRKLNSQFMKQGWKPTLLKLCLEEKRKFMYLEIVEVSPANTSAGCNKCGKIHKSRTKKIMTCDCGEVICWHRNAALNLLSASKKYCSKCKKYTIVMAKTETCYKCGGVLEQSK

SEQ ID NO: 35103 - protein, 663 aa, unknown
  TnpB Polypeptide
MKKKRNKLIRCFSSYITSKNEILHKTLDFLTTQSKNIYNHYIYCYNIFTKYKKLIFQDLQKFKNDKSINENFIAITEKYYKFHCDNKIIYEKNNEIIYSYIKSKKYIVDNENIKKIYKEIKNELKKYKEIKLNNNPVFFTDIIRDIIFSFYKKNFYVVKDCLIHNKPYDNKKYTKKFIEHVKNNNPLELDIIEFVNFKKNFSKLKTKQNLIRRFAYNIIKKNLTLSSDLTINIMDRAYNSILSFYKLKEKGITANFPKYLEKEAKFILPFYIRSFKIEDNGDNKNKNKKNNKNKNKNNKNNKGKIFMRLSIGSYFKKNIKDILGKNIIIDKNKFYEKNNKNKLYDSDYLRFNICDNFKNKLITEENKIDYKRIKLVEISSQYHGNKFKINYSYEKNKKNNVKNKKGDISIDLGMKNLMTIYDPEGKQKIIKGGKLIWINNKFTYKMGNMQSEIDKSKNKEIIEKLKKKKNELYIKRENRLNNEFNLITKTLFGIYERKERIIIGYNEGWKQGVNMGKKNNGKFYKIPYFKLINKIKDKGKELGIEIKITEESYTSKCDALSLETICKHEKYLGERIKRGLFSSAKGKTIKKGKIEKKGTLINADLNGAINIMRKINKNLKEIKGKNLCNPEIIKIGTKNKKKSKVTHPINHPMKSSDQSAKTK

SEQ ID NO: 35104 - protein, 423 aa, Cyanobacteria sp.
MLKVVKVRIYPDLSQKLALAKAFGSCRWVWNHFLNLMNKTYQETGKGLSGYDVKKLLPHLKKQEETAWLKETYSQCLQQVCLNLGVAFNNFFERRAKYPNFKSKHGKQSLQYPSNVSIKGDCLNVPKIGLIYSKIHRPIEGKIKTVTITKNCCNQYWASILYENGKEKPQTSTDGKAIGIDLGLTHFAITSDGSKFDNPKILKKHEVNLKRKQQQLSRKQKGSNNRNKARLKVAKVHKKITNCREDFLHKLSRRIVNENQVIAVENLNVKGMMQNHCLAKAIQQVGWGQFCTMLKYKAEWEGKVYIEVDRFFPSSKTCHVCLNKIGSLPMDLRYWGCVKCGTKHDRDINAAINIRDEGLRILKTGLTSSGNKFQRQPLTSGTGDKACRQTASRSKGGRKKSTTTLVSGQEAYTVPSGLGSSLF

SEQ ID NO: 35105 - protein, 381 aa, unknown
  TnpB Polypeptide
MIVNQAFRYELDPNTTSRGALARHAGTARFAYNWGLELCRACLEAEERLPGGMTLHRLWNRWKGDNAPWWAEVSKCAPQEALRDLDRAFGNFWRGRKAGKPVGFPCFRKKGRDDRFRLTGAVSVLPRAVVLPRLGPIRTKESTVKFRGRILSATVGREADRWYVSLTVERERPDPALVQGPVVGVDLGLDRFAVLSDGTEVEAPKPLARNLRRLRRRSRAHSRKRRGSANRKKSALALARLHRRIRNQRLDFLHKLTTRLAKTKSVIVVEELSVAGMVQNRRLARSIADAGWSEFRRMLAYKTTWYGSRLVVGPRFHPSSKTCSVCGFVKPSLSLAERVFRCEACGLTLNRDLNAALNLERLVAGSSPETQDACGADVRPA

SEQ ID NO: 35106 - protein, 379 aa, unknown
  TnpB Polypeptide
VKTFRYRLYPSSTQRRLLESTVETCRRLYNDCLAERKEAWEAEKRNVHKVEQLRRVKAVKTTSPYAAGVHSHVLQVTVADLDRAFRSFFRRVKAGEKPGYPRFKGRDRFDSFGLKEYGNGWKVDGKRLRLSGIGRVAVRWHRSLEGVPKTLRVKRTAGGWYACITCETEPTPLPATGREVGIDVGLSSLVATSDGETIGHPRWYRREQARLRVLQRRVARREKGGTNRGKAVRVVALHALHVANRRKDFLAKMAHSLVERYDLIALEDLRIPNMVKNRHLAKSIMDSGWGYFRSHLAHKAAEAGRVVVLVDPAYTSQTCSACGNRFPQHIGLSIRHVSCSCGLSLDRDINAARNILRAGRARWEPTSALAGVSREAAPL

SEQ ID NO: 35107 - protein, 311 aa, unknown
  TnpB Polypeptide
VVCSRHGVPTGRAPDAPHRLPPRLLPEAAEGWVRSYFASTAGNVPRDTIRRYFEAQKGVQAVKTFRYRLYPSGTQRRLLESTVETCRRLYNDCLAERKEAWEAEKRNVRKVEQLRRVKVVKAATSDGETIGHPKWYRREQARLRVLQGRVARRKKGGANRGKAVRAVARHALHIANRRKDFLGKLAHSLVERYDLIALEDLRIPNMVKNRHLAKSIMDSGWGYFRTHLAHKAAEAGRVVVLVDPAYTSQTCSACDNRFPKHIGLSIRHVSCSCGLSLDRDINAARNILRAGRARREPTSASAGVSREAAPL

SEQ ID NO: 35108 - protein, 465 aa, unknown
  TnpB Polypeptide
MYRVSKTVVKQTEHPELFSLFNRYGVLATNLYNAGLFRVRQNFTMHGKEVLHPLEQEVKQEIERTVTGKNLGHPRRSMSYLFLEKLMRVTWNPDFFAGLPMQCAQNVLKQVCGDFKNWMASCRQYKKDPSGYLGRPKMPHYKRKKSLSSFTFTNQDCYVLEQGNKNLLKFPAVRGHYLPIGPVSGRLKQVEVKPYYGEFLVICIFETDEDCSSLPDGASCGIDLGVDNTAALVSSNGRCVLYKGGALKSANQWYNKQMADCRSLAMKGHTADETAKLGLLHTKKMQSLSRRRNQFFHDTMHKIASDIVHFCLASGITTIVIGKNKNWKQKSNIGHVNNQNFVQIPLETLRWMITYKAESAGLIVVEQEESYTSKASLVDGDEIPVYGKETKSLVAFSGRRIKRGLYRTGSGQVINADLNGAGNILRKYIPDAFKDRKDFVFLGQILVRNYPCLNKRIPVKGIGAA

SEQ ID NO: 35109 - protein, 414 aa, unknown
  TnpB Polypeptide
MKAPITMNQAQVYGISKQNSKEIFQFFQKNFGCTRKVYNLCVDSCYKQLEQAGYTNGDDLPEFSFPKVSALKKDYPYLKEADGLGLANSVLDFQKAYKTFRNQKDRSAYRKSALRRDRSGKEPLSFRGLKGIPRFHAKSAGYFSYRTACQYPKEGNALKRPTIRLEGSILYLPKLKHGVKLIIHRKLPEDAHILNATVFMDTDGTYQVSICYSYTFLMEMDYREAAAQEQPLPKETSFLGLDYSQKDFYVDSEGRLHAKIKHQRHDYLQKLSTELVSRYDVIVVEDINLRAIGGCLSLGKNLHDNGFGLFREMLAYKLWKKGSCLVRIDRMYPSSKTCSVCGVVKPDLKLSDRIYICPECGCVIDRDYNAAVNIREEGKRIFLTYLKEAMEKAEEAKIRQEAAKERRQKKKKTA

SEQ ID NO: 35110 - protein, 429 aa, unknown
  TnpB Polypeptide
MKLSQKVYVSLNHKQKKIFDELTWHATKLYNISNYEMRDNEYISYGKNDKICKSNWHSDYLHAHNRQQILRKLDKDWKSFFKAIKDFQKNPKKYTGRPKKPGFKNLDTRLGEVIFTKPGITQTHTKKNNPEGNLLILSLAKKMKSKYQVKNIKLKLTEKVLVLIDDLKNINQVIIKKDYYSGQYYLNIVYTKKEIEKEVENYTNIMSIDLGLDNLATLAFLENKETYIIDGKEIKSKRKYFDKEISYLQSIRMKQTGTQYFKDTKKIKSLRKKNNDYKLNYLHHAAKYIVELAKKHEVRSIVVGDMKNIKKGMKNNKSFVKGPIQKLKKLIEYKALLNGINYIEQNEAYTSGCSALDLESVDRKSYNKKRRITRGLFRSNKDYLINADVNGSLNILRKYLKLKCIPKLIQLVMDNGVVNAPKRISVACY

SEQ ID NO: 35111 - protein, 417 aa, Lactobacillus sp.
  misc_feature (31)..(67): Xaa can be any naturally occurring amino acid
  misc_feature (316)..(352): Xaa can be any naturally occurring amino acid
MTLVVGWTAYFFVIFGCCKNVGSYIIMLRRXXXXXXXXXXXXXXXXXXXXXXXXXXXXXXXXXXXXXDKEIYRLKQIGIGLKIIQNRISELIERKNIRELSNHYQYMENKKIDSLAKANAKMSYLKAWAMFRKVHKAGTPKFHKKNYSEKYQTSCQYSKKSKMNVYTGSVRLLDDKHIKIPKLGTLRIKGYNKEIFRDKKNIRIGTVTISKDPCNRYFISLQLGSDTPFVDQKIKTGSNIGIDLNTENFLTTSNNVVVDNPRFYRKMKKRLSKERRTLSRRMNRAKKEHRKLRESRNYQKQRLLVAKLNIKIRNQXXXXXXXXXXXXXXXXXXXXXXXXXXXXXXXXXXXXXLYGRKFLTIDPKNTTQTCSNCGHILSGADKLTLADRQWTCPVCHKHHIRDYNAAINILNKGLAKQ

SEQ ID NO: 35112 - protein, 366 aa, unknown
  TnpB Polypeptide
VTLTVQVKLLVDAAQTEILKKTLMAENAACNWISEKAWRTNTFSQIPLHRLVYHACREAFPQLASQVVVRANAKVVDAYKPDREVQRKFRPLGSFPYDARLLSWNLAESVVSIWSLAGRLRIPFICGKRQLRMLFYDRAEADLVFRDGAFYLFVSVSLPETETPPCENWLGVDLGLVNIAKDSEGRTYGEAKKVAGIRKRRWRQRKRLQSKGTRSAKRVLKCLRRRETRFVHHQNHIISKQICAEAKRTGCGIALEDLKGILGRIRAPKAQRRILHSWTFADLQSKIAYKCRLNGIPIRFVDPRNTSRSCPACGHVAKGNRKTRGRFECVNCGFTADADTNAAGIISRRAAIDRPHERDGVRAHVR

SEQ ID NO: 35113 - protein, 412 aa, unknown
  TnpB Polypeptide
MSYQLKTGPSVELPLLAVKTVRQQYQTSADLLWLLDEFRRMVNVCIMIGIEQKVSSLRTLSSRAYSRLSRDMLGYYRLGAIGAATVIIRNYRKAERRNARTKLPYAKRLVLTSCYGFKIDDNLLRLPVKPRKFVYLKLNSHTLKVLSGLNVRSVTLTPASLSISYSKETVEIEPEGYIGVDRILDNVTTATNKTVRTFDLSQATRIKSGYRYVKSRCKRNDERMRTRVFSKYGEKQRNRVQPLLHNVSKRIVDEAKTGRYGIVMERLTGMRRLYRRGNGQSRRYRAKMNSCSYGELQRQVEYKARWDGVKVIYVPARDTSKRCSICGYKTLESTQRRLWCPHCGAILDRDENAARNIAAGGLRFSPNLPPDEAMVEEREPENATLILKVDGGKLSQQPMVDNVNHLLKTNRT

SEQ ID NO: 35114 - protein, 476 aa, Escherichia sp.
VKRLQAFKFQLRPGGQQECEMRRFAGACRFVFNRALARQNENHEAGNKYIPYGKMASWLVEWKNATETQWLKDSPSQPLQQSLKDLERAYKNFFRKRAAFPRFKKRGQNDAFRYPQGVKLDQENSRIFLPKLGWMRYRNSRQVTGVVKNVTVSQSCGKWYISIQTESEVSTPAHPSASMVGLDAGVAKLATLSDGTVFEPVNSFQKNQKTLARLQRQLSRKVKFSNNWQKQKRKIQRLHSCIANIRRDYLHKVTTTVSKNHAMIVIEDLKVSNMSKSAAGTVSQPGRNVRAKSGLNRSILDQGWYEMRRQLEYKQLWRGGQVLAVPPAYTSQRCACCGHTAKENRLSQSKFRCQVCGYTANADVNGARNILAAGHAVLACGEMVQSGPPVEAGTHRNDSGDSLNVAGILVLQGVEDVNIGFCQRLNSTPRNKRLRQLIPRTQNQSRPASIHLPLPEMPPPPRRAHAHYAAPDTNCR

SEQ ID NO: 35115 - protein, 387 aa, unknown
  TnpB Polypeptide
MIRAFKVMLAPNKRQRTRLFQFAGAARFACNWTLNKERAAYNSGEKFIGDNDLRREFTLLRNSDEYSWLRTISNNVTKQAIKDCVDAFLKFFKRQRGHPKFKSKKRGDFSFYQDTNKIRITSTHVKIESFARRRRKNRQNLNCIRLAEHDRIPVGAKYKQPRISFDGLNWWLSVAIEFEPENHSEPDGEAVGIDLGIKNLAVCSDGTIYPNINRTSTVRKLKKKQRRLQRSISRKYEMNKKKGERHRKTSNIIKSERKLLRLHHRLANIRQNYRHQITNSIIRRKPRLIVLEDLNVRGMMSNRHLSKAVQEQGFYEFRRQIEYKAAWAGVRVVIADRFYLSSKTCIVCGHVKKDFRLSERMYRCEKCGNEIDRDLQAALNLRRYGER

SEQ ID NO: 35116 - protein, 199 aa, unknown
  TnpB Polypeptide
MTGTHQISSSRSIQRSWQRCKSIFHARSSWNRLRIKVARLQEKIMSCRKDKLHKISIDLIRRYDVVCCEDLNVKGMVRNRHLAKSVSDASWSTFVTMLEYKAKWYGKTLVKIGRFYPSSKTCHHCGHVKEDLSLSDRYYTCPNCGELIDRDLNAAKNILDEGLRKISAGTVDYTDGEGVRLVYKHSLMKSESHKSLACG

SEQ ID NO: 35117 - protein, 348 aa, unknown
  TnpB Polypeptide
LRKALNAVKYERYPWMREVTKNAPQRAIKNLGRAYANFFDDLGKYRRCEIAWKRVRVPKFKKKGRHDTFRADNGTDKHHPNAVQTDGKQVRLPLAGWVKMREAVRFEGRILSVTISRQVNAWYASFSIEVADELPNRSDETVVGVDLGITALATLSDGSPKVPSPKPLRRSLQKLKRLSRSFSRKQRGSRNRAKAKTTLARLHRRIADVRADALHKLTTSLIGYRFVVIEDLNVSGMLANRHLSRAIADVGFFAFRRQPESKATMAGSTVIVADRWFASSKLCSECGAKNDNLTLAQRIWTCASCGTSRDRDRNAARNLARYAESSAASACGAEGAGSGHQTAVKPAA

SEQ ID NO: 35118 - protein, 358 aa, unknown
  TnpB Polypeptide
VFVRFVCQGVGIAMCDREVVIRRQGYRFRLKPSVSEDALLRQFLGCSRLVWNAILAENEYRYEQGDPLPLNHAAFCARLNTLKARHAFLRDVHSQPLQQTLRDLAGAYQKVFDSKLSAEMPTFKKKGHAGGIRFPQGFRVERSGVFLPKIGWVAFRVSKRSVKRKLEGKIKNVTVRLEAGKWYVSFQSEREVAEPVHENRGSAVGVDVGIARFAALSDGTFFEGANAFKTNERRLAFHQRRLARKIKFSANWKKAKARITDLHARIASLRKDQIHKASATISKNHAVVVLEDLAISNMSKSAAGTVEEPGKIVAAKSGLNRRILDQGWAELRRLIDYKLAWGGRHAVARRPAQHVAHV

SEQ ID NO: 35119 - protein, 353 aa, unknown
  TnpB Polypeptide
MLKSPQMETITYQYRIKDNSLKKTLIKMSSEVNFVWNFANNIIQKRWKESRQYTDEKLLSGLTKGASKELEINSQTIQAVYEELLKRVKRHKKQIRFRSRKRKLGWIPFKGQTFKFCGNYSTYNGYKIRYWYHRPLPEGAVVKTGSFSEDALGRWYLNLVVTFPEYLEPALNESVGIDLGIKTTLTCSDGVKFERPSFTTNNSEALAKAQKYRKKRQTKKIHAKIKNQRKDWNHKTTFSLAKKFKNIFVGDTSSQDILTEINNINKAIYDASWFELKTLLSYKVLRRQGVFQEVSELYSTETCSVCLVKSGPSGVKSLKIREWTCSVCKTLHDRDINAARNHLRLGHESLRAA

SEQ ID NO: 35120 - protein, 290 aa, Acinetobacter sp.
LHSQTIQAVTEELVTRRKQFKKAKLKWRVSNKKSAIRSLGWIPFKKVAIKYADGYVEYGKHQFKLWDSYGLSQYNIKTGTFVEDSRGRWYVCLVVDAVKIEKNNAKTSIGIDLGLKDLATCSDGVKLKAPQIYRQYEQKLGIAQRAKNKKRVKAIHAKIKNVRQNMLHQFSRKLVNEHAAIFVGNVNAKALAQTRLAKSVLDASWTTLRTMLKYKCENAGVCYEEVNEAYTTQTCSCCGSRSSSPEGRAGLGIREWQCVECGTLHDRDVNSALNILALGHERLAVGISVL

SEQ ID NO: 35121 - protein, 427 aa, Campylobacter sp.
MSANNNQLISISHKIELKPNNKAKTHFKKAFGCARLAYNWGLAKWQEYYKQGIKVTHLDLKKEFNAIKKEQFPFVYEVSKYATQQPFLNLNLAFQKFFRDLKQGKVSYPKFKKKKDNFGSYYIGGDQAIIKDEKYLKVPNLGLVKMKEKLRFNGKINSFTISQSADKFFVSFSMQISKDEYLKTHNKAKNNNLALGIDVGLKSFLSLSNGLEIKAPKPLNKLTRKLKRVSRQLSKKQHPKAKGDKTKKSNNYLKQNLKLRKIHTKIANMRNDFLHKLTSILANHYKYFCVESLNVQGMMKNHNLARSISDVSFFEFKRMLAYKSAYRGNEVIEADRFYPSSKTCHCCGYKKEFLTLSERIFQCENCGITIDRDYNASLNLKRYAINNIGLVQAEFTPEDLTALQSDLAINRIATSKVDTGIQQKSCL

SEQ ID NO: 35122 - protein, 504 aa, unknown
  TnpB Polypeptide
MHTVQLLLRPTTYERAEIERRFHAVSHIHNVCVKRMRRQIALLLRDQEYQDWRAEYILLSKIEKMSEGETHRKKELSDHMKKRRIELGLSRSELEKYIKVCGRRYRKLLSSQQLQAEAGNVWRSVEKFLFSDGKEIHFKKFSNFTTISGKSNSNGICYDTETQQVRWLGLQMQCYLPKKRSDREYLLRSMDHKISYCILKRQLFSSGWRYYIILVLKGDAPCEHKKKGSGKMGIDPGVSTIACVTDKACVLEELAPDEDRYNVQIQKILQKMDRSRRKNNPDNYNPDGTIRKGKKTWKNSRNYYRLFRRLRVLYQKKSLYILTAHRTLCNRLIQMTDHILVEKMNYKTLQRRSKKTERQERVSNIKRSDGSVISVHKFKRKKRFGRSLNRRAPSLFLTELERKIKAAGGTYKEVNTKTFKASQYDHSTGEYTKIPLSQRTKEIEGVEVQRDLYSAFLIKNADERLEHPDREKCNREFHQFVKMQDQLIQSMKKSGISMKQCFGF

SEQ ID NO: 35123 - protein, 369 aa, unknown
  TnpB Polypeptide
MFKAYKYRLYPNKQQEEQIQKTFGCCRFVYNQTLSHRKERYEQFKESMNKTSCNNYVNQVLKKEYEWLKKVDKFALTNAVYHMDSAYQKFFKEHTGFPKFKSKRDNKKSYSTNFTNNNIEVSFENDKIKLPKLKWTKAKIHREFTGQIKSATISQVPSGKYFVSILVETEHIPMESTGCMIGIDLGVKDLLITSDGEKFDNIRTTKKYEDKLAKEQRKLSRKIKGSKNRNKQRIKVARIHEKIHNIRIDNLHKISYKLISENQVIVSEDLSVSNMVKNRNLAKAISDCGWYELTRQISCKSDWNNRQYIKIGRFTKSSQPCNICGYINAETKDLAVRQWICPQCGVIHDRDINAAINILNEGLRLLDVV

SEQ ID NO: 35124 - protein, 235 aa, Okeania sp.
LKARYRYRIYPNHIQITRINQLFGCCRYVWNQSLAYCNQLYVSGQKKPSYTDLTKQFITQAKKELVWLKEVASTPLQQCLKDLDQAYKNFFNSCSGKPKAIKVKHPKFKSRKSRQTARFVGANYKVGQDKLYLPKVGKIKIVWSRPLASQPTSVTIIKDSDNRYFASFVVETLPEPLPKTENSIGIDLGISTFATLSNGDKIEGPKPLKQNLKKLAKFQRKLVRTEKGSKPIRKT

SEQ ID NO: 35125 - protein, 453 aa, Richelia sp.
MYSVWVDIFNTTMQLVEKHVINKSHKYWLECDQLCLDSNKIRNQGLYIQRQSWFYGHGVIQFGKTELHKNIDALMKQTACYHNLPAFLAQQVMKSVNEEWTSFFNAIKQWKLDKSGFSGRPKPPKYKPRNTGRYKVTYPQTRAYKKAKINGIIHPYKTDIRIQSKHSHDYDCVRIIPATGCYVIEVVYTVKQEKYAVNTDNNYIAAIDLGINNLAAVTTNKPGFQPILINGRPIKSINNRYNKFISKLRSINKKLHGLHWSNRMELMTRRRNHQIDSYLHRASRLLIKILTCQGINTLVIGLNPDWKRNCNMGKRTNQKFVSLPHKKFVDMLTYKGLLVGIKVCIREESYTSKSSFLELDDIPELGNKPRSWKPNGTRIKRGLYRSKSGLINADVNASYNILRKEFPDAFSQGIKGCVVQPRSVNVPGYKHKPSYCRIACKFPRLCVILTQTK

SEQ ID NO: 35126 - protein, 375 aa, unknown
  TnpB Polypeptide
MQCNKYSATIWNACVNADQENRKENGKSLTRSELQFMMKKTVPIILANSINMVILKYVTARDSMWKSIKAKHENSKKVRLPYKEKKYFNTGWTHQNIKVYKDEGILTLSKPLLPNNHKQKPMKCHMKEIPDNIVEIELVYRNKLYLLIKTKQENDNVLIQSENEASIDLGEIHSITSIDNNENVIIITGRKLREIKQLRNKHLGKLKSRRSKCTKGSRQYKKYSRAIKKLIYKTDNKLSNTTHKITKLYLDYCLKNNINKVYYGDLDSCTRNTKKEKRGSKKIHQKLTQWNYGQLIQELINKLTRYGIELVKVKEYYTSKKCPVCGVLNTPKGRNYTCECGYVMHRDINGAINILNDNSNYKISRYKELKYLRIV

SEQ ID NO: 35127 - protein, 372 aa, Bacillus sp.
MTMLLSQRYEIFPTKEQKEILDRWLQYCRQTYNSALLDKQRKYKENKQIYTRSDMQKQQTIDKKKYPFLKEVPSQPLQEVFLRLKKAYDGFFRGDANYPKLKKYKDYNSLTFPQFGFKPNGKHRFAMSFAANGKLYNKRLGEIDILFHRPIEGTIKQLIIKRQSKRWYAIFSVERQVVPSTIVMENAIGIDVGLNQYAVLSDGTIFENPRFLLQKEKQLRKAQCNLSKKKKGSANYKKQVERIQNLHEKIANQRKDFLHKLSYHLTQMYAVICVENLDIRNMVRNRKVSKSISDAGWGNFRKMLMYKCEKFGGLLVKIDPAYTSQDCSNCGNRVKKSLSIRTHICIQCGTILDRDHNASLNILRKGLELLTL

SEQ ID NO: 35128 - protein, 418 aa, unknown
  TnpB Polypeptide
MLLSKKTSIKVSREYANLIGHMCYAASKLWNVCNYERQHYKETGMEQYPDWYYQKKAHKEDLWYKQLPSQTAQEVCKLLDKAWKSFYALKRSGGIETPRPPRFKQKSIPITYMQMGIAHERDTGRVRLSLPKALKKYMEETYQIHERFLYLENKIFRDMDRIKQMRIYPPEKGNCKIIVVYEVPDQEELPQNGHELSIDLGLHNLMTCYDSENGKTFILGRKYLALERYFHKEIARVQARWYGQQSGKGVKHPVTSKHIRKLYRKKQDSVTDYLHKVTRYLAEYCRERGITCVVAGDIRNIRREKDLGHRTNQKFHSLPYNRIYTMLEYKLKMYGIRFVKQEESYTSQCSPLSPEVGKRYAEPSNRKERGLYRDGNRVYNADAVGAYNILRKYHSVSGVKKELSVTGLKTPEIIKVAV

SEQ ID NO: 35129 - protein, 369 aa, unknown
  TnpB Polypeptide
MKQTLMVKLTPDPEQYQSLLETLERFNEACNHASNIAFNTGTFGQYYLHHAVYGYLREHFGLSAQMAIRAIAKVSESYKTDRKALHLFKPHSAMVYDQRILAWKGLDKVSLLTLDGRQIIPIRIGAYQEARIDRNVRQTDLILRRGIFYLAAVIDAPESTPDDPTGTLGVDLGVINLAVDSDGEFYSGEAVDNIREKMDTLKADLQSCGTKSAKRHLKKLKGRESRFRHSTNHIVSKRLVAKAKDTHRQIALEELKGIGESTVRHSQRRRHKSWAFNQLRQFVTYKAKIAGVLVQLVDPRNTSRTCPECGFVSKSNRKSQSLFSCQQCGFASNADLVGATNISRKAPVNEPIVSPALVGAGQGQAVCFS

SEQ ID NO: 35130 - protein, 259 aa, Gloeocapsopsis sp.
MEVMQLYGCQQVLLDPDNALEATLEFICKTANSLINCGIYYARQMYFKAKTIIGKYDLEVEYKTNKHFKALHSQASQQVLRSVSESFESFKKLKQAFNQEKITDKPKPPKYRKSGGLALVSYPKQALKLVDNQIRIPLGKQVKCWLGLDCFFVPMPSNLKFADIKELRILPRNRCFYVEFVYKTDVIKVDVDPNNALGIDPGLSNWLTCVSNAGTSFIVDGRHVKSLNRWYNKQISTIKENKSQGFWSNRLAAITEKRN

SEQ ID NO: 35131 - protein, 527 aa, Thermus sp.
MNPRMPKGEAPKLYLGVHARLVFLKEEDKRAVLDLMRRFSSATRFAYNRLLEGRDRKELKREDSPLCRLFGLNTRYADGAIEKAQATLDSARELGQDPRKVVFGGRKTFEQLKRKHLSGKALLALKREWKERRQGLLYSRGDATKKGNANLRLEPQGDALWLRVNLGNGAYVRALVKTSHPQLKTLLQRAYASLPYNVTLRLKDGKVYALFTWSEGLPPPVHTKANGVLGIDVNGDPYHLALAVVSPEGNLKRHLTLSLGEVDRAPNKGAKELLLWKVAHQVVAAAEEHGVAIATEKLKYLRKSRRGDGSGRHFRRREHRFAYRSLLEKIHSLARKRGVEVLEVNPQDTSTIGMLKYAPLLHLSKDVAAALVIGRRALGYEEKLPKGYRALLQNKSFLAHAEGFYQSRLQELKKLKEAEKNPHLRRRLSRDMGKAKAALTLVSSLQGSPGSRKGITKGRNPSGAHPWRVLRVGLFLPLLGLEVPRDLSPLKPILHLAPLTQGSWKGWKVGSGPSPGGGPECTNVHFY

SEQ ID NO: 35132 - protein, 369 aa, unknown
  TnpB Polypeptide
MDKAYRYRIYPNKSQKILLARTFGCVRFVYNHFLDKKQKLYESDGTNLSYNDMAHEVVDMKRTPEYAWLSEVDATAIQSSLRNLDRAYTNFFRKNAMYPRFKSRRTHCFSYTSKNNSNSIKFNNGYITLPKIGIVKSKNKCIPQGRIVNATVTQEPSERYYVSLCCRDVDMKQYPNSNKSTGIDMGISHFCTFDDGVKIDNHKYLAKSLKKLARLQKQLSRKPRGSHNWDKARIKVARMHEHIYNQRNDFLHKLSTDIVKQNSIICIEDLDIQSMQNNQYIARDVADVSWSRFMSMLEYKSAWHGRTVVKIDRYFASSQTCHECGYKHADVKNLNIRRWTCPECGTVHDRDVNAAINILREGQRLLLLQ

SEQ ID NO: 35133 - protein, 334 aa, unknown
  TnpB Polypeptide
MPPSIRCNMCLKTSKKPTRTSSRNALTFRASSAKAKATASATPTPNRSSSINSIRACSCPSWAGCATATAEMCWASCAMSAVSQSGGKWFVSIQTRRDVETPLPQGGAVGIDMGVARFATLSDGTFFAPLNSFKRHEMALRKAQQAMSRKVKFSSNWRRAKARIRRIHSRIGNARRDYLHKVTTTISQNHAMVCIEDLQVRNMSRSATGTTEQPGRNVRAKSGLNKAILDQGWFEFRRQLDYKLAWKGGWLTAVPAQNTSRTCPCCGHVSADNRQSQARFECVECGFEENADLVGAINVLRAGHARFACEVSGAAMPPAAGTHRSDSGVARCHA

SEQ ID NO: 35134 - protein, 446 aa, unknown
  TnpB Polypeptide
MNGEILEIWRSSPVFKVGFNLVLAMLVDIAYKFRIYPNKEQEEFLNKTFGCCRFLWNQMLNERNEAYQRFKDNKESLHAIKYKTEKQYKQSFPFLKEVDAKALQNVNRNIFQAFQNFFGGIKGKRSRGGYPRFKSKHGKQSYTTNNINDNIKIDFEKKKLKLPKIDAWFNFRDDRVFGERTRKVTVSKTKSGKYLASISFKREIKTGPIQEMDESKIIALDMSFASFVVSENGRMENPRFYRKSEQKLKRLHRRLSRKQKGSNNRNDARVKLVRFYDRIGNARNDWQHKVSRELANRNDAIILEDLNVEGMKRFNSGFAKSVTLDFSWSEFVRMVAYKAERAGKHLVLVDRFYPSSKTCSTCGFINDSLSLSDRTWTCQRCDSIHDRDVNAATNLKREGKRILVETLRIKINDNATAGTAGSHAPGDRARPVITRATVDERRIHAL

SEQ ID NO: 35135 - protein, 203 aa, unknown
  TnpB Polypeptide
MHELYRDSNGKEPAYPGYYRNAEKKLAREQRKLSKMQKGSNNRNKQRLKVAKLHEKVSNQRKDFLHKQSRQITNAYDCVCIEDLDMKAMSRTLNFGKSVSDNGWGMFTTFLKYKLEEQGKKLVKVGRFFASSQTCSVCGYKNAKMKNLALREWDCPQCETHHDRDVNAYVRKNAGLQTADIWYNKEDFVKEIIEQRNKNPERV

SEQ ID NO: 35136 - protein, 462 aa, unknown
  TnpB Polypeptide
MGHAARTTKLSLDLGKRKAGGANTEKRVALDATKEVLNEARTFYIDFFLAHAEKFAEHVSYYSEKYLEMRTRPISANELLTWAEAHTVATREHPHPWEGWNFTERFAGMPFIYRRSVIKDAIGKARSYLSSRANWEKSGQKKGRPGLPGARDYPTLYQGTCTLHLESTEVKKRFVQLKVYDGKAWVWVNYPVKCSRHFEQRCQDKTWEQKSPMLVLRAKSAELHFPQTKEIVAKKIKESKLDPDLVTVAVDLNVRNLAVITVRTHATIVETVFVTDHGLDAHRYRHLKRIAKKQYLSGKPVKGEHSNQQLWRHIAHLNDDAARLVACKIATVCARYPGCVLLFERLRKIKAKGESRSRRMNRKRANQLRGKINEYAKKKAFEVSTVTVEVNPHGTSQYCSRCGYLGERFSYQKGQRLRVKWGKLFSCPFCHFEVNADWNASTNVHHSFYQEYHWQPRLQRSG

SEQ ID NO: 35137 - protein, 451 aa, Actinoplanes sp.
MKSIQAYRFALDLTPSQERSVLAHAGAARKAHNWALARVKAVMDQRTAERSYGVDDELLTPRMGWSLPALRKVWNAEKEVVAPWWRQVSKEAFNTGLDALARGLKNWSDSRNGKRVGRKCGFPRFKSRHRCTPSIRFTTGTIRVEPDRMHVVLPRLGRLKLHESARKLARRLEAGTARIMSATVRRDGGRWFVAFTVEIEREIPAARPESVVGVDVGIKHLAVLSTGELVPNPRHFDAARSRLRALGRALSRKQGSDRRTRQKPSNRWKRASGRLAKAHARVANLRRDGLHQLTTRLARDHTAIVVEDLSVAGMLKNRRLARHIADAGFGEIRRQLAYKTEWNGGWLLVADRWYPSSKTCSACGAVKTKLTLRERTYKCTLCGLVLDRDLNAARNLAALTAELITAGSGPVAGRGAIQKTSPARQEAVKRQPGTAPAGQTGTVRPKGRTAA

SEQ ID NO: 35138 - protein, 342 aa, unknown
  TnpB Polypeptide
MYLTVKQQVKHLSKEDYRSIKELCHIAKNLTNQAIYNIRQHYFAEGKYLSYEKNYALLKSSDNYRTLNSNMAQQILKEVDGSFKSFFGLLKKAKQGKHALKDCRLPRYLPKDGYTTLVIGFVRLKGNKLILPYSNSFKKTHKAVEITIPPILLDKKVKEIRIIPKVDARFFEIQYIYEAECIQRNLNTTNALALDLGINNLVTGVSSKGETFIIDGRRLKSINQWFNKKNARLQSIKDKQHFGKKTTNRQKAIARRRNNRINDYMNKTARRVIDYCIDHDIGTLVVGYNETFQKDFNIGKRNNQTFVNIPYGKLRDKLEYLCELNGIILVMQEESYTSKASF

SEQ ID NO: 35139 - protein, 339 aa, Vulcanisaeta sp.
VARTVIVRSTSLPRKVFNVFVELEGMYRNMVEQLTMFAVRNDVKSFTKLKALKYREMRNLYPQLPSHYVYTACQDASTRARSFLKLKKHGLAEKEYPEVRSVSIWLDDHLWKPNGLTYIAVVTHKGWVTIEIEPHKQYWRYINGGWRLASEAKIKLDRRDRRVIIYLTFVKEVEEYKPSGYLPVDVNENNVAVLIDGVAHLFETNTEKLVLGYYYRRKRMQERYDKLYGGVTSRIKRRIMGGRLKERKRKDDVRWKIANIIVRFAHEKRYAIILEKLGKKPASNMIKRIGGDKQLRHRIFQASFRGVQKAIEEKAKEYGVPIIYVDPKNTSRLCQYIVP

SEQ ID NO: 35140 - protein, 153 aa, unknown
  TnpB Polypeptide
LLYKGVRTKEDYFYFQKRIAQVQSLADNMKNIGEYEAYAELGVSTIYMGYPFNIAQDRGNKFTVNVWSYRRLMDVIELKAQEYGMRVFEVVEYDASKYCAYHNVKVKGHPRGAVSPKGHKLHSDLNSNFKHPQKSKEYGSFSNKETVVLHRRA

SEQ ID NO: 35141 - protein, 369 aa, Kitasatospora sp.
MLNTRHNLAAANLTEAQWRERWESARWFLSADGDSAERYGNGTIRVTPGGEVSIKLPTLLAQYANARHGRYVLAAKVSFPHRGTEWADRIEDNRAVAYRIHYDVARGRWYLDASWTRPVAQTMPLATARAQGMVGVDTNADHFAAWQLDVHGNPVGRPYRFHYDLSGTTQHRDAQIRHAITRLLHWATRRGVAAIGLENLDFTAETTREKHGRRKRFRQLISGMPTGKLRARLVAMAAEIGLAIVAVDPAYTSVWGAQHWQKPLATPRRKTTRHDAASIAIGRRALGHPVRRRTAPPHDDQSDRRGHRTVQAVPGSRGREGTRRPVTERAHDARSRTGTTRTRATSAPRTVRDARSAKTWVQDSLLLTD

SEQ ID NO: 35142 - protein, 438 aa, Halobacteriales sp.
MLEVHRTHQAKILNHGQVEDSLDTHGWSASKLWNVANYHSRQVWEETGEIPDHGDLKDELKGHPKYKGLHSQSSQRVLEELAEAFNSWYSSDDDRDNPPGYRKENYYDEQDRRVHEEHPRSTVTWKQNGIRHDTKNNRVRLSKGANHKEHPKAWEYILVEYETRPDVTVKNLQQVRAVYDQQKARWELHLVCKDEIETPTAPGNKSAGVDLGICNFAAVAYSTEDADLYPGNRLKQDGYYFPKEIAKCDDSGGKRATRLHKKWSERRTHFFHSLAKHIVGRCVEKGVGRINIGKLTGVREDDNGESKNWGKHGNLDLHGWAFDRFTSILTYKAKIEGIEVGEVSERDTSKTCCVCGREDDSQRVERGLYVCEACDTAFNADVNGAENIRLNSNDESNSESPASLDGDRSTGWLAQPGVYLHDLSNGFQPQEQVVDCKP

SEQ ID NO: 35143 - protein, 184 aa, Okeania sp.
LPKVGKIKIIWSRPLASNPSSVTIIRDSANRYFASFVVEINPESLAKTNNYIGIDLGISTFATLSNGDKFKAPKPLKQYLNKLAKFQRKFARTEKGSKRHERRRLRVAKLHGKVKDIRTDFMHKLSTDLVKKYDTIVLEDLNVSGMVSYGMLRKRNRKLAKAISDLGGRQFRTLTEAKCEKYFH

SEQ ID NO: 35144 - protein, 406 aa, Euryarchaeota sp.
LKKTVLLNCLSLTPKKQRILDTFFAEYLRVLNLTLEQLPNANSSTELHRLTYSDIRETSFLPSDIVEEARKDVWAKRKTIKKGFTRCSIRLNRRWFKYFTTHRGTPSFKVTYSPYKRFVIPIRIDGSYNRFKQKLKAGWNIKTISLLNGKIAVSIEKEYPEIPDNKRNIIGVDIGSSNLAAVTVYAPRKARVIKQLYFGRDVANRQRKYEARIAKLRSHADKGSDKAKKYLRKLKHKQVNFVNTRSAQIAREVVTLATEYNASVAVEKLSIRGRKHRMNKKANRKINRIPYARFREFIKSNCLTNEVPFQPVDAYHTSKWCPRCGALNKGHSSNNYVIYKCSRCGMIVNSDRKASLAIAIKSALVRKSFQDFTNPKLFSQLTRAGVAVNQLFRPDDRVLSGAVHYT

SEQ ID NO: 35145 - protein, 393 aa, Streptomyces sp.
MGLIVSTCTLGTIGTVKLRYNYRLDPTPGQRMALAKAFGCARVVFNDGLRIRQEAHAAGLPYIKDTDLQRQVITAAKKTPGRTWLGEVSSVALVQALADLHTAYRNYFNSVTGKRKGPKVSPPRFRSRKDNRQAIRLTRNGFRIRPGGKLNLAKVGDVKVRWSRDLPSDPSSVTVVKGAAGRYFASFVVQTDPSEILPETTGEVGIDLGLMHFAVLSDGRKVSSPRFLRRAERKLKKAQQGLARKAKGSTNRRQAVARVARLHARVADARRDHHHKLSTALVRENQLIAVEDLAVSGLARTRLAKGVHDAGWAQFTGMLEYKAARYGRALVRVDRWLPSSQTCSVCMAVDGPKPLRVRTWTCGVCQTTHDRDINAARIVLAAGRADKQNACGG

SEQ ID NO: 35146 - protein, 555 aa, Streptomyces sp.
LKRRLAMSKKQLRAIDDAFVALGPSGVAIRDRLKHLAGEDEKVLRLVGEHLGRLASLDLKARCRDGLGHSSEAWAARKQGLTAESSSRWAGSITKATHDQWALSRRCQLAHIQNLEAGIRTLMHRLSQPIGEKGTKRAPGGYRSKGEWFHKSRRLAVLEHRLGVSRVERETGAVHVVRGGRRLFSNRHNLQTAQLTEEQWRERWEASRWFLAADGESGKRWGNETIRVTPDGEVSIKLPAPLAHLANVKHGRYALASKVQFQHRGSEWRDRTAANRAVAYRIHLDVERGRWYLTASWTRPVVKTIPLQTARVDGIVGVDTNADHFAAYQLDRNGNPTGDPRGFFFDLSGTADHRDAQIRHAISRLLHWTKRCGVKAIGIENLDFTAEKTREKHGRRKRFRQLISGMPTSKLKARLVSMAAEQDLSVVAVDPAYTSMWGDEHWRKPLTSKTRKMSRHDAASIAIGRRALGHPIRRRTAPPRTHQSDGCGHRTVQTGSGVRGREETRPPITERAFDARPRTGTSQRTRGTSASKTVRDARSSGTWVQSSPLDTVEER

SEQ ID NO: 35147 - protein, 397 aa, Streptomyces sp.
VARQVKRAFKYRFYPTDVQAEELSRTFGCVRLVYNKALQERTQAWCSEQRRVSYVQSSAALTEWKKTEELAFLAEVSSVPLQQALRHLQTAFGNFFARRARYPRYKSRKKSRASAEYTRSAFTWREGRVTLAKMAEPLDIRWSRPLPDGAEPTTVTVSEDSAGRWYVSLLCQDTIAPPPTADEAVGIDAGITSLVTLSTGEKIANPRHERRDRARLARAQRRLSRKANGSVNRRKARQKVARVHARIADRRRDFLHKLSTRLVRENQTVVIEDLTVRNLLKNGKLARAISDAAWTHLRSMLEYKCAWYGRELVVIDRWFPSSKLCGNCGTVREKLPLHVRQWTCGCGAVHDRDVNAARNVKAAGLAAAACGAGVRPQRESSRTGQSAMKQEPLQRKP

SEQ ID NO: 35148 - protein, 359 aa, unknown
  TnpB Polypeptide
MAAQVVNTVTGCVKVKVPDALAHRLEELYPLAMICTRRMLRRRSDSSSKFYPEIPCVVSKSLISKYQRNKKCRGVSNLVIPICGDKGKQIKLEGDGVRIPALFKKFMLPVVFPFRVEGFVRSVEFFRREGQWYATFCYNTPKQADIEATGVIGVDRNSVGNVAVFADPQTGEVRRLGLCPARTKAAYRGRRKNLQRAGKFRLLSKLRRKQRRRMTHENHRASKSIVDYAATHRRAVAIEGLIGVNSKGSKIRRYSEKNQWAFAQLETFLRYKCALRGVPVIEVNPAYTSQDCSRCGSRHKPTGKGFSCETCGHNDHRDANAAFNIALRGRVPSGESSGSLSVLPLGRIGNAQTGKVGVK

SEQ ID NO: 35149 - protein, 476 aa, unknown
  TnpB Polypeptide
MGALAGLIICLSDIVLISRNSQTNKNKKNSWSKRMFKRKFTVVTQLHEKNNQEIIDYIDNSRGVYAKALRETFYVIKNSEEFNKSNYNSELQSKYGILKRTANSIIADAQGRLNALKELKVYEQKQLESKIQALGELIQKLQVEKADNCAMLRAGISVNMVKHRNLRRKLVAKQSKLNRMKQLLANLQYQIQTGHYKLCFGTKKLLNSDKQAFLDRRDSQLSFVGSKSEPACNQMLQLQFNSKNNQFELKLRKDIGGFKTAEDKYLYGRVYFNHHQDKIKQILRYKNSPLSFKIIKRKGRFYLYCTFEIQAELSEFQTRSSHGTIGLDFNKGFVTLSETNQYGHLVQTQFLPYRFKAGYKTDTDLQHIAKHVVELARNTGKDVCVENLDFKTKKSKTQSKKDRKYNEMLHSLAYRTFINAIEQCAYRHLVYVRRVNPAWTSWLAKQLYCPTMKLNTHVGASYVIARRGQGFKDAVK

SEQ ID NO: 35150 - protein, 442 aa, unknown
  TnpB Polypeptide
MSGSLKGGETMFATQKVRIKKLTKQEYEAMCMLHRYAKNLYNVALYELRQYFFDTGKLLSYNKLYHICKTNENYKYIQAGVSQQILQRAYEAMKSFLELRKKANKGEYLTEAVSIPKYLPKDGYYQLCCSTNAIAVHDGYFQVPLSRLFSKEHPDISISIRVPERIAGKSIREVRLNPKYNACYLEAEFVYEAEGTAASHGTETLALDLGVNNLAAGISTAGTAFLVDGRRLKSANQWYNKERARLYAIKDMQGIKGETHKLASIVANRDNFIRDYMSKTAHMIVQHCIENNIGRVIVGVNPKWKQNVEIGRVNNQNFVQIPFKKFRRFLGYLCGKYGIEYKEEPESYTSKASFLDMDEIPEYDPKDDTVYTFSGRRIKRGLYRSANGQKINADLNGAANILRKAAPDADLSLVKKALCINPTKFYPLATVKKRNIKSKAAA

SEQ ID NO: 35151 - protein, 442 aa, unknown; identical to SEQ ID NO: 35150
  TnpB Polypeptide

SEQ ID NO: 35152 - protein, 399 aa, unknown
  TnpB Polypeptide
VKQILTLVVRIEPTPEQQRLLNDTAVAFASACNWINGNINSNLTNRNSIQAVCYNDVKSQFGLTANHVVRACARVGANRLTAKQKRRKVKGFKPTSFDCDARTFRIIEDGYLVSISTTVKRVKVPMRVSNYHIGKLKGQNPTSAQICLHRDGNFYVHIQIKTDIPKIKKSKNVIGVDFGRRDIAVTSTGESWSGKTIQNTRDKYSRTRASLQKKASQGTRSTRRRCREILKRLSGREKRFQQWLNHNISSSIIREAITTNSIVAIEDLTGIRERTNSKPRSKTERRRSNSWAFYQLRVFLEYKGIKEGVNVIAIPPRYTSQTCHKCLHVHPVPGKSYRSGKNFKCGNCGNQCDADYNGAKMIEQWGCSVNQPRGSELLSCATVLGLPKADTERRSRQCG

SEQ ID NO: 35153 - protein, 425 aa, unknown
  TnpB Polypeptide
MKLAKSCVINPSSDVALVLGQLTYAAWKLWNIANYERKTWTKESGIPYPNWFEQKKRLKEHFWYKNLPSQSAQELLHTLDGAWRSFYKLKETGGVENPKPPKYKQENFNMKYLKDGFKVLSGNRVRLAIPKQLRGYLQEKFGFKNTFFYVDVPNHLQLKAEHVKTLEFKPLSGGKYELIAVVETPDREEDPILSAKFMSIDSGVNNFLTCYLHDGGSYIFSGRQLLATERYFDKVISYYDSLSDSQQTAKGTQYPKQSKRVQKLYEKRRKQVKHLLHAMTRAVINLAIEHGVETIILGDLTGIRQEKNFGAKINQKFHKWPFRKVMELTGYKAALVGIAVLKTTEEYTSQTCSVCKPIPGQEYAHKSNRKHRGLYTCKDCGTVINADVNGAINIAKKYLETLNEQPVVVLGTPKMYRFDGCSFVA

SEQ ID NO: 35154 - protein, 354 aa, Firmicutes sp.
  misc_feature (295)..(320): Xaa can be any naturally occurring amino acid
MKNWCRTLFLFYTYSVADYMVYESIRNKSGRMRRLLKSFKTEIDPTLEQKQKIHQTIGTCRFVYNFYLSHNKEVYEAEKKFVSGMDFQKWLNNVYLKEHPEFSWIKDVSSKSVKQSIMNADKAFRSFFKHQTSFPKFKKKGTSDVKMYFVKTDAKAVIYCERHRIKIPTLGWVRLKEKGYLPTTKTGMVIKSGTVSMKAGRYYASVVVEIDDSPSVKNNENGGIGIDLGLKDLAIVSDGKAYKNINKSAKIKKLEKRLRREQRSLSRKLENTKKGESTQKNIQKQKLKVQKLHQXXXXXXXXXXXXXXXXXXXXXXXXXXKLSDRVFRCQCGYVENRDLNASLNLRDATTYSIA

SEQ ID NO: 35155 - protein, 213 aa, Bacillus sp.
MTSSGKYDISILTEYEKEIESKEMKKVVGLDCAMNGLFVDSEGKKAHYPKFYRQMLDRLAKEQRKLSPKKKGSSNWHKQRIRVANIHEKIANQRKYFLHHQSKELAANFDAVVIENLDMKGISQALKFGKSVADNGWGMFTSFLQYKRNEQGKQLIKIDKWFPSTKMCSQCGSIQEMALSERTYQCVCGLSLDRDYNSAINIKKEGIRLLATA

SEQ ID NO: 35156 - protein, 380 aa, Frankia sp.
MGSRVVKRAYRYRFYPTPEQAAQLARTFGCVRYVYNRALAERSRAWTQEQRRVTHAETDRMLTAWKRDAETAWLAEPSKGPLQATLRNLQAAFVNFWSGRAKYPTFKKKGKTLDSATFFRNCFTYRNGNITLAKQDRPLVIVWSRPLPEGATPSQVTVSRNARGQYHVSILVEDTVTSLPPAGGQVGIDAGITSLVTFSTGEKVTNPRHERRDRVRLARAQRDLSRKAKGSANRAKARARVAEIHGRIADRRRDHLHKLSTRIIRENQTVVVEDLSVRTMVRNHSLARAVSDASWSELRAMVEYKADWYGRTVIAVDRFYPSSKTCSACGSVVEDLPLDVREWTCRCGAAHDRDVNAARNILAAGLAVSACGDGVRPPRS

SEQ ID NO: 35157 - protein, 539 aa, unknown
  TnpB Polypeptide
MEIASKYTKVFVSDDLTRQKYGELYDLAVSIREQKNTISKEIASDLLKYLECNPLTFVTEMRAKYKGVINSNFDKQLYQEVMDAYQNKFDAIVRKIAFSKVEFKGFEFYKRNCKGHNKGDLKHVITKHTSTPLSICLTYLARYGNENTLDYISKQLGTCDEKKRDFYNNIIRCCNKFGFDRLMELALRRRERVIAKYKDNPIVFKSLSFRGRSRKKLIVDHNKNYNSEINAFVSLSFPTRKTMDIPVKFSKDYHGSMKDYVNKSNDYEYVLCFDERRRQVKVNIVKGGIRYIPTVTDNDKAVGIDVNVKHNLFSLSDGTTYDYDRQLVSDYCRLKRHIDSLKSNDENYEVGKRTQRKLDTLRNKILKANQQLISGMCRELMLGGVRHIVMENLDNGFGKSYVKNETLDGINFNDIVKFLGISSLKQEIEHIGKNYDIAVSTVHSNYTSKMCPICGCIDDGNRTTQEDFRCVECGHEDNADHNAAVNIKNRVGTTVLCRRLLKQLGNGAYEPRKMPKDKVKDVLLSYRTSLGKDGKSKFY

SEQ ID NO: 35158 - protein, 415 aa, unknown
  TnpB Polypeptide
MEQTSKKQIGHSTLTYRVRLYDRHFDRLKETKELYDRVVKHFFEVLTQEEDLLLQSDFLLLRALETKCIGTKEMKAAGVSPQYPLTGFPKVPLYFRRSAINTAIDLARKKATTLNPNMVLYKGMYQEFTDKTIQIKLLCNGKWEWVTYPFSGREFPEGTERLSPMLVLDKKTAWLEVPVSFPVEDVRTVKERMKTEERICALAFPDNDTLAVAALLDRNGNELEHRFFRGGKQKEEQRRRVLGKIRISEESRGFEARKNVAKVMENTGYYAELKDINRHYAHSISRQILDFCREQNIKVLVVPNYEKSIDFSDKRYLKTDAYRWLGRSIIKNLKYKAFQQGIVVTSIRPYHIADCCSECGEKIRRYNQGHTAGKNYYGGKLFTCPNGHSGNAALNTAKNVGKSFLTYFPTKEQTR

SEQ ID NO: 35159 - protein, 350 aa, unknown
  TnpB Polypeptide
MLLSKKTSIKVSREYANLIGHMCYAASKLWNVCNYERQHYKETGMAQYPDWYYQKKAHKEDLWYKQLPSQTAQEVCRLLDKAWKSFYALKRSGGIEAPRPPRFKQESIPITYMQMGIVHERDTDRVRLSLPKALKKYMEETYQIHENFLYLENKIFRGMDQIKQLRIYPPEKGSCKIIVVYEVPDQEELPQNGHELSIDLGLHNLMTCYDSGNGKTFILGRKYLALERYFHKEIARVQAQWYGQQSGKGVKHPVTSKHIRKLYKRKHDSVTDYLHKVTRYLAEYCREQGITCVVAGDIRNIRREKDLGHRTNQKFHSLPYNRIYIMLEYKLKRYGIRFIKQPANKKSRLN

SEQ ID NO: 35160 - protein, 551 aa, Bacillus sp.
MQRKTPSFSYVDISCILFIFGNKVRTLTIHSIKLFGIIKVWIEHLFLNGEVDEMYSAYKIQIHKEHELFEYCDTLCFKAKNLYNITNYYIRQVYTAVKKDTRNENQLQVLMDIETHLPKMNKIRKKSYEKAKAKPKKIDKNGNIVNPELKLFEMPHHEKSFIGYGFAEALFKVMKQVDYTSMPPQSNQQTMKKVYDDWKSFFEASKKYKMNPASFTGKPKIPKYKPKNGRTTCYLTNQITKIKDGNVLKLPGTHLPLKLGKVAQSEGKLQQVRILPSYGRYVVEVVFKGKQDKEIQRSEKKINELVFEPKRVMGIDLGVDNLATIVDNTGRKPLLIKGTWLKSINQYYNKLKAKYMSILRNGKGPKEGIFTTNRMISLDRKRNNRVMDFLHKASAKVVEIALVRNIDTIIIGRNVGWKLEVDMQKANKQTFIQIPYATFIEMIRYKAERKGVQVIDREESYTSKSSFLNQDPIPTFGEEHQTIFSGYRSTRAFYKIKGSKVLIHADVNGAYNIVRKHVKDAFEGLERRQFLQAPQKILIMKNRHAKLKASA

SEQ ID NO: 35161 - protein, 417 aa, Nocardiopsis sp.
MRMAYKCRAYPDPEQATQLGRTFGCVRLVWNTTLAQRHTAYHQHGENTSYKQTDAALTGWKKTQDLAFLSEVSSVPLQQTLRHQHSALQNFFAGRARYPRFKNRNGRQSAHYTRSAFRIKNGELFLAKHDTPLKVAWSFDDVDLATLNPTTVVVSREADGRWYTTFAVELDAPEPAPESGAEIGVDVGVKDFATLSTGEKIANPRHVESKARNLARYQRRMARKQRGSHNRRKAKRRVAVAHRKVRHARNDFLHKVTTRLVREHDVIAIEDLNVSGMTASARGTVEAPGRNVRAKAGLNRSVLDAGLGEFRRQLEYKAQRAGRVVAVVDRWFPSSKTCSECGYLLDRLSLGTRYWTCPACRTRHDRDVNAAKNILAAGRAAAREHAGDACGAGVRRQGSSLPRSATKQETAVVRQSV

SEQ ID NO: 35162 - protein, 288 aa, Microtetraspora sp.
MAQIVKRAYMYRFYPTPGQADYPTFKSRKKSRASAEYTRSAFRWRDGTLTLAKMSEPLRIVWSRPLPEGAEPSTVTVSRDSAGRWFVSILVEEMIRPLDPTDNRMGVDAGITALVTLSTGEKVTNPRHERADRRKLAKAQRALARKAKGSANRAKARLKVARVYARIADRRRDFLHKLSTRLVRENQTVVIEDLTVRTMVRNHTLARAISDASWRELRSALEYKAAWYGRELVVVDRWFPSSKLCSACGALQDTMPLNVRTWECACGASHDRDVNAAKNILAAGLAER

SEQ ID NO: 35163 - protein, 337 aa, unknown
  TnpB Polypeptide
MSRYRLLPTPAQEAVLRDFTQAMTAFFDPENPAGRPSWRKAGRDEGFRIVGRGRGWDVRRLSRKTGEVWVPKAGWIRFRWSRAVPPGAKSYRVTMDRAGRWHVAFAVIPAPVPAPGNGQTVGIDRGVAVSAALSTGDLLHAPRLTAREQARLRRLQRKLARAKRGSNRRGGARQAIARLRARETDRRKDWAEKVSTDIARRFDLIRVEDLQIENMTRSAKGTRQNPGRNVRQKAGLNREMLRSAWGLLVRRLEEKAPGRVEKVKPHHTSQRCSACGHVDARSRESQARFVCTACGFAGNADVNAAINIAAGHAVTARGGDGITRPVNREPQLLLQSA

SEQ ID NO: 35164 - protein, 337 aa, unknown; identical to SEQ ID NO: 35163
  TnpB Polypeptide

SEQ ID NO: 35165 - protein, 383 aa, unknown
  TnpB Polypeptide
MKHKAFKFRLVPTQQQKVLINKTLGCCRFFYNQMLEEKQNKYKNSDKSKCKTEKEYKTDFQFLKEVDSISLQQTRIDLQTSYTNLFRKIKLGEKTSLRFKSRHNPKHSYRTISINNSIRVENNYIKLPKLGFVKFKKSREVCGKIKSVTISKNILGRFYISVLCETEIQELPKLDSQIGIDLGLKEFCITSDSEFVSNPRYLRNSEEKLKKIQRIFSHRVKNSKRKFKQQKKLFRIHEKIRNQRLDFLHKLSTKLVSENQVICLEDLQVKNMVKNHCLAKSISDVSWSKFVELLKYKSDWYGRELVQIDKFFPSSKTCSNCGNIKKDLTLKDREYNCSSCDLVIDRDYNAALNILKEGLRILTKNCRDDRVSSLNIQTLVCSS

SEQ ID NO: 35166 - protein, 438 aa, Edwardsiella sp.
MQRLQAFKFALMPDGQQERQMRRFVGSCRFVFNKALALQKERYEQGEKKLGYAGLCKLLTEWRNNAETAWLADAPVHPLQQTLKDLERAYTNFFAKRADFPRFKKKGQSDSFRYPDPKQIKLDQAHNRLFLPKLGWLRYRNSRDVLGTVKNITMSQSCGKWFVSIQTEREVAQSVPQSTSAIGIDMGVARFATLSDGTFYAPLNSFKRHEKALRRAQQAMSRKAKFSNNWKKAKTRVQKIHSRIGNVRRDFLHKVSSTISKNHAMVCIEDLQVRNMSKSAVGTADAPGRNVRAKSGLNKSILDQGWFEFRRQLDYKLAWNGGWLVTVPPQNTSRTCPCCGHVSADNRKTQVQFLCVECGFEENADLVGAINVLRAGHARLACKVSGAVIPPAAGTHRSGHVWLNATHDRRRNLWPSDRGGCQRWQERKKINALIKKYK

SEQ ID NO: 35167 - protein, 411 aa, Sutterella sp.
MTREGDIVEPRGSTLKGLNTSKDAGKLVKLTKLNRTVCVRLTVSPEDSAKLSETHALYRDACNFVVPIVCKNKESRLWQRFSLHHEAYPKIRERFPALGAQLACNVIRSVSSAYKTELANHPQQLKQPELKAISFRNPSVHLDKNTITYRDNGTVSLYTLKGRVEATLAPGDRQRLLLASGKRKESNLVLHRGYGKRPDFWELHITIENEVQPVSPSELQTKEVMMGVDVGENNMAAASTGKLWKAGKLKHNRDRKQSLRTRLQRNGSRSAKQHLRKASRRERRQVAHVNHVVSREIVNEAKGKNKKLIILENLTHIRERIKANLRVRARLHRWPFRELQQMIVYKAVQEGMEVMFVDPRYTSQTCAHCGKIGVRKKHHFQCSCGYLAHADLNASRNLLGLGYQLMSQGLQ

SEQ ID NO: 35168 - protein, 258 aa, unknown
  TnpB Polypeptide
VRVIPKGIYYVVEIVYNMNPTDLGLNKHRGLSIDLGVSNLITAANNVDLPRFTIKGGTAKSINQFFNKCLAHLQSIAARTNGRQTTKRMGHLSRVRANKLGDIFHKASRAVLDFCVWHDIGTIAIGYNPLWKQRCRLGKRTNQNFVQLPLLSLVRQIQYKAALVGIIVIIVDESYTSRCSFVDGESIGPHGRYLGRRVQGGLFQSREGMIINADVNAAYNILRKAVPEAFADGIADVGLHPVLLEPVSTKRKITYLSK

SEQ ID NO: 35169 - protein, 420 aa, unknown
  TnpB Polypeptide
MWVNQAFKFELKPNAAQRQAILQHIGAARFAYNWGLEIVKKSLEKKEKIPSAPELHKMWNIWKKDNAPWWKEVSKCAPQEAFRDLERGIKKWKSKQSRLPRFKKRKLIPDNSVRFTGSIRIFTNYVQIPRIGRIRSKEPTEKLLKLIEEGRVKILSATISQEADRFYVVITCMVKRQEPKAKEVRSEDDVVGVDLGLSSFTVLSDGTKVDAPKPLAKKLKLLKRRSKQFSRKQKGSNNSKKAALALARLHRKIKNIRQDFLHKLSTWLARTKPVIVVENLNVRGLSRGWLSRSVADVGWGTFLRMLEYKAKWYGATLIIAPKCFPSTRLCSRCGHLHGKISLSQRVFRCENCGLHIDRDLNAALNLRAYGLAHLTGPTASSAGSKACGDSSGGGTALLGWSTSYGSMKQEVACHHRPLEG

SEQ ID NO: 35170 - protein, 417 aa, unknown
  TnpB Polypeptide
VDKAEKIKRALQETKERRKGQRPVVFQLKLQNLSREKERDLRRAFLEAKWLYNWLVSDTQRLNLPANKVREVEVKVGEVFENRELLLLGSQVKQEIADRLRDNLKALARLKKKGHKVGGLRPKRFVNSIPLKQYGITFTLNRGRNRVRIQKLGQFRVLGLHQIPPEAEIANAVLVQKPSGYYIHLTCYLPKENVSREPIGEVIAIDFGVHNKLTLSNGVKIDFELRETKRLKALQRKLERKKKGSKNRQKLRFLLRREYEKIANRRRDVHNKVLAFLKGYKKVVFQEDFVKGWTSLFGGQVHSSGVGGLKARLRNSLATPIPVERYEPTTKECFACGRPHELSLGDRVLRCECGWTCDRDHNAALVILRKGLGLSPDQAVGLDRPELKPLEREAIMRILGSNPYIRISFPGGGSPPL

SEQ ID NO: 35171 - protein, 408 aa, unknown
  TnpB Polypeptide
MNRACGYGHSIYFFVLIHVHTNTILGVGVRQSFQFKLFGCKRLTHLHRTIDVSAEIWNHAVALKNRYYKLFDKGLPKAKLQAHLAKLRNGNMSRWKVVGSQSVQAITDRLYLGWEAFFRGDIKRPPTFRKRCKYRSFTLKQSGYKVIGHGKIKILGRNYRFNQSRAITGAIKTVTVRRDPLDDIYVTFSCDQVPQPDQAPKTGLSAGADFGLKDFLTLSTGERITAPQPLEAQLRRLRKAQRVLSRKQKGLKARNRARLEIARVHRKVANVRNDWQWKHARELVERFDVLVFETLNLKGMQQLWGRKVSDLGFADFLRKAEWLARKLGRDLIKIDRWEPSTKACRVCGRQREMPLNMRMFVCEGCGHVEHRDENASHNILEAGRRLRSGASSKTTHGWQDALVTAESH

SEQ ID NO: 35172 - protein, 421 aa, Synechococcales sp.
MFLSQTNRLRLDKKQSDALRQMCHLSKNMFNVGLFNVRQYFFQEHKYLSYEGNYHYAKENENYKELPTDIAQQTLKIVDRSFRSFFKLLQLKQSGGYQAKVKIPGYLPKDGHFLLMIPVRPRDWAKMSGKDWIFKVPMSRSFRRQYGDVQFEVPERLRDKVVKEVRIIPRLGARYFDVAYIYEAPAVEQAIQTGEILGIDLGLDNFATCVLSTRQSFIVDGKRVKSINQWYNKENARLQAIKDRQGIVGLTHRQAKLLDRRNHKVNDFLNKSARYIVDWCRTNGISKIVIGYNPDLKQGGNMGKRNNQNFTQIPIFTFKRKLESLCERYGIECVEQEESYTSKSSALDADILPVWNADNRPKYVFKGKRVKRGLYRTEKGWLVNADGNGALNIIRKHTSKLDDSLGEFRGCLAQPVRVLCS

SEQ ID NO: 35173 - protein, 565 aa, Streptomyces sp.
MADSALRTIEAPFVAPGPSGVAIRTSIKGMSQRDHEVLPLVGAHLGSLASADFKTRCRAGTDHNSDEWAERKRALTKESSSRWAGSITKATHDQWGLARRAQLAHIHSLEDGVRTIAHRLSQPVGAKGTRRTPGGYCTKQEWFQKTRRLHVLEDRLERERSDREAGVVHVARGGKRLARARHNLEAAQLTKDEWRRRWDAGRWFLHADGESGKRLGNETIRVSCDGEVSIKLPAPLAHLANAARGRYVLDGRIGFRHRGEEWADRVSANRAVAYRIHLDVDRGRWYLTASWTIPPVRTVALTVARAHGLIGVDTNADHIAAWRLDEHGNPTGEPRRFFYDFDGPATYRDAQVRHALTRLLRWARREGVSIAIEDLDFGAEKTREKHGRRKRFRKLISGMPVAKLRARLVSMAAELSITIIVVDPAYTSRWGAEHWQKPLSSKNRKTTRHDAAGVAIGRRALGHRVRRRTAPPPHDQSDRVGHRTVQAGHGSRGREETRPRIPGPRTRSVSPDAARTRVTSASTTVRDAPVDQGWAQYPLLLTDQERFSVPADHGRDRNRPARPPT

SEQ ID NO: 35174 - protein, 379 aa, Enterococcus sp.
MLQHKAYKFRIYPNQEQEILIAKTIGCSRFIYNHFLNLWNHEYTTTGKGLSYHSCSAMLPQMKRNPETIWLKEIDSIAIQSSLKNLSDSFSRFFRKQNRRPQFKSKKNPIQSYTTKNVNNSIQIRNNFVKLPKLGLVKFAKSQEPKGRILNATIRKNSSGKFFVSILCEEEIMEYPKTTSAIGIDLGITDFAILSDGQKIDNNKFTAKMQKKLKREQRKLSRRALLAKQKGINLFEAKNYQKQKRKVARLHEKVMNQRTDFLNKLSTEMIKNHDIICMEDLNTKSMLRNHKLAKSISDVSWSSFVTKLQYQADWHGRKIIKIDKWFPSSQICSECGHRDGKKSLKIREWTCPICHTHHDRDINASINILTEGLRIQALA

SEQ ID NO: 35175 - protein, 387 aa, unknown
  TnpB Polypeptide
MNRQLQTFCNLYNLLRDEKMARHHSLNDLRKLALKHRGNAHSQAAQNVAARVNAAFKNYFEGRARFPKRKKEKRYRSMTYPQSGFRLEGKIVTHGKRTELTGKLYVSKVGRIRIFLHRPLEGKVKTLTVKREADGWHACFCCEVVELPRKPIEQVSPGRVAGGDLGLEKFLTLADGSSTENPRFLRLAEDKIKRLQKAFSRAKKGSRNRQRLGVRLARVHLHVARQRGNAQNRIVSLLYANADVLGLEKLQVENMLKNHCLAKSIQDAAWGQFVRKAEFKSRVLGKYFVPVDPWGTSQFCWRCLSWAPKQLDERVHSCPVCGEVLPRDQNSAKLVEMLVLSYAHGRWVNTPAEQKPLPSLRGLVSFCGEAGSPSLQAGEDVTPSFFK

SEQ ID NO: 35176 - protein, 404 aa, unknown
  TnpB Polypeptide
MYRTVKTAFRASKKTLDMLFKTNEICGQIWNDCVELSRYYYRLKGKNITKTELQKELKKKYPVHSQTIQAVSHKYIDACESTYELRKKGYHKARFPYKKKNHFNAKWVDKAFSLEGNRLTLSYGNNKDKNGKKIMLSVKLAKVPNGTVKEVELVYDRGLKFCLSYDDGEVEKENNHTNVVANDVGEIHTIAAVSENGESIIITGRHMRSIHRLRNKKLRELQKRMSRCQKGSKQWRKYNRAKQYMLSKSEAQLEDALHKTTKAFVEWCVKQQTKKIITGNIDGVQRNTKKKRNKKTNQKLSNWAFGKLYQMLEYKANAEGIQFEKVDESYTSQTCPVCGHRKKVRTRNYTCRCGYRKHRDIHGACNILTKHTLGRFVEHKSEEPTYLRPVVLQRSSRRLEPTLL

SEQ ID NO: 35177 - protein, 452 aa, Allobaculum sp.
  misc_feature (20)..(21): Xaa can be any naturally occurring amino acid
MKRKERNQVVRKQKSNKKRXXSYVERRKKLTEVQYEYLVERHVIKLSHSHYKVLDEYAHKANNVYNQGLYRVRQALFKGKWMTYSQLDASLKKSRNQRDCMIYSSMNNVHLVQQILRIVTGNMSSWKKAKDAYEKAAHKFTGRPKLPKYRKKGGKFTLFIDNQVAKLREGGFVEIPVLNNLRIELQHKETTGIQQVRIIPKHNRFIVEVVYKTNKEIVYKPDNGRYMSIDSGIDNAFALASNVEGFQPVLINGRPLKAINQYYNKARAKLYKAHDLSKQPRSSKRLDRLEFIRDQKVNQFAHEASKRIVEIALSHDIATIVIGKNKGQKRSSNMGKRNNQNFINIPHQVMVNMLKYKANLEGIVIIEIEESYTSQTSFLDNEMPVRENGDKMRQKRGISPAKRRIKRGLYRSDKGEFINADINAALQILKKVVPKAYANGIEGIGLSPVKPS

SEQ ID NO: 35178 - protein, 250 aa, unknown
  TnpB Polypeptide
VAKSVNQKYNKTIAALVSEQTLRTGEKFVPDAAYHAATNRRNDQISDFMRKCAKHFVAWCIENRIDTVVMGINKYWKQEAGLGKRNSQNFVQLPFDRLRNIIRYLCVWEGIFCLDQEESYTSKASFPDRDFIPVYGNEKGKPSFSGQRRPVHYKGMYKKDGFRGLYTTKSGDIINSDLNGSANILRKAFPNAFTEKPAPDFNSVVIIRHPDEEKVKNNRKKQTAVQKQDSHAKIKRQRKKDAKRKKHPAA

SEQ ID NO: 35179 - protein, 331 aa, Geobacillus sp.
MYDDHTYECYVEIANPLGQQEGKHAPRLRFPVSVPEKYEAEIIDVVMGEQVGVNSKGKPIFEYQPYTVEIKRKNGEYYIHLIYEEEVYGRELAYDEPIQAERIAGIDIHIDRIAVSIVSKQGNFIKSKVFYCHKLEYVRANKRNNIIGETVRDVYDWLLQENVGAVAIENIQLRQQHDTDKRFNRLTHHFKKKKLTETILRRGLRPGFCIKKVNPAYTSVIGRFKYMKKYGLSVHESAAFVIGRRGLGYREQLPKELIHIIKTKVKRHLIAVLGSMEESYKQSKSGKKQRQYIAMMLYKIENFKQEHEWSLWNILHKCCWLNQYQIQLKEG

SEQ ID NO: 35180 - protein, 411 aa, unknown
  TnpB Polypeptide
MIIERVEQIPISSNNPNFALFLHFCVMSKNLYNHANYLIRQEFINNGKYIQYQDLDKLLKQDIEYPDYRNMPHAQSAQQTLRLLDSNWRSFFKSIKDWSNNKNKYLGRPRLPRYKKKVCAMVLIVTGQAITIKDNIIYFPKSFDGFTLSPVCIDRENFKSIQQIRFIPKKNKIIAEVVYRIEIPDEKKIDNGRYLSIDIGVDNLATVTNNFNEKPFIINGKGLKSINQYYNKNLAHYKEAAKRINNLYWTNRQQKLTDKRNARIKDYIHKSSRYIVNYAEAHDVTCIVIGHNKEWKQNCELGKKNNQHFIQIPFNMLIEQIQYKSREIGIGVRITEESYTSGTSFLDSEEPIKSNYDKRRRIHRGLFRTNSGNLINADVNGSLQILKKVFPNAYANGIAVAMSQPIKVNLA

SEQ ID NO: 35181 - protein, 365 aa, Methanococcoides sp.
MRKTYRYRIYPSKSQIIKLGDTLELCRWVYNETLALRKTLWEAKEESISLYATNKELTQWKKDKPELKHVHSQVLQNVQVRVDLAYKAFFRRIKSGDTPGYPRFKGKGRYNSFTYPQTGFEIIDDRTIKVSKIGEIKAKIHRAVIGDIKTATIRRYPTGKWYVCFSAECDVIPEPHGNDNAIGIDVGIEKFATMSDGSFIPNPRWVKQEASNLAKAQRKMSKFAKGSDKWLKVLKVVQRIHERTFNKRNDFVHKVSRSLVDNYSIVIFEDLNIKDMVQNNHLAKSIMDVAWGMLIDNTKSKAEWAGSKVVSVNPAYTSQMCSKCGTIVKKELKDRIHKCHCCSLEMDRDFNASINILRLGLQSLD

SEQ ID NO: 35182 - protein, 436 aa, unknown
  TnpB Polypeptide
MAVTLSHKIELKANNKFKSYCRKAFGVSRFTWNWALERVKEKRERKEKIDILELKKEFNHIKRKQYPFVMEVTKYASQQPFIFLKRALSQFFEDLKSDKSSSKRRGFPVFKKKSYSSGSFYIGGDLAAVKKGSEIKDKRFGASDNKPYLHVPKFGWVMLREEIRFPGKVNSVTISQDGDKFFASFSIETSEIVYEGTHKANAQEALCGCDWGVKDLLTLSNGIKIKGSKHLKRRQRQLARQQRKLAKKQHPRTKGDKTPISKNYVKQSRKVGKLYRRIKAQRLDENEKISSVLVRHFRVICVETLNVKGMMSNHRLAKAASDNSPYSLKEMIKRKSALRERTVVEADQFYASSKTCRGCGKVNKDLKLSDRIFVCPKCGFTEDRDVQAAKNLTEVYINRVGSASPELLKNKPVDLTALLDDLAINGLATSRVESGI

SEQ ID NO: 35183 - protein, 544 aa, Thermus sp.
VKRGKRTDEIYGSYLLPHAMNRGKEEKVLQVLRQYRRAAEGIQRLHLRRFFEEGSLSRFLDPTSVGQPQGGYLESPLSDRYLWVCSQQVVDMLKGHLEHLKNRVREILLGSSLPREKREVLLLLNSREAWLKPEVRQALAEGQPLVFKVVRKDESGRERTKTLQATPEDLRLLLHLFRRARKELTWPGMHRIQMHLDGKVVRYEPRGRGRGKQATHFPAWLHLATLEKGKRVAIPLGENPYAEGRKGEWRDFFQVGEENGRVQIRRVKALSPKPYTPRTERLAVDIGLSPLIATDRGDLLGRGFLRLLAAYDAEIQTIAKRAQREGRKLSQLPEYREAVGRLRGFLKNEVNRLLNRLVELHAPAVLVVEKLDLRSPELSRRMNRLLSNFGRRYLREKLTRLGELYGIEVVEVNPAYSSQACSRCGYVDPRNRRDTQTFVCQACGHRGNAQVNAARNLLRRSSPGESVITFTPKRETLRLLLRLLCPLGKHICVSKRYAERSRPGSRLRPGIPGGRSAALGQVWGKNPYLKGFPDLLRTLGDRRE

SEQ ID NO: 35184 - protein, 378 aa, Ruminococcaceae sp.
MCVPYKSFVFRIYPNQMQKVFFEKTFGCARLVYNIFLTRRIDCYLKENRRMTYTQCARELAEMKTTEEYAFLCEVDSIALQQSLRHLDQAFQNFFKNNGCGFPKYKSKNQSKKSYTTVKVNNNLSLNNGLLRLPKIGEVKVKQHREIPEGYRLKQATVKRTNTEKYYVSLLYEYDELEHRDTSDGAEMWLGLDYALHKLYVDSNGDSTSYPEPYLKEENKLRREQKKLSKMEKGSNNWKKQKLVVAKLYEKTANQRKDYLHKKSRELVENYEHIVIEDLAVKEMAKKSEGFGKYVGDTGWNTFTFYLEYKSEEKGQKIVKVDRYYPSSQLCNVCGYRNSDLSNLAIREWRCPCCNSIHDRDINAAINIRNEGIRLSMG

SEQ ID NO: 35185 - protein, 414 aa, unknown
  TnpB Polypeptide
MDLTRKVRLYPNKTMLTILDMLCDYRRYCWNQALDVWMSLYHQRQEYLPSDLRLKVKQAVKDKSISFTDEEKELLRQYPSPTQYTVRDMLVKNKQDWQYQLSSRVLQLAVADLAQAWKYFFNNKENKVLHAGKPTFRQKKNPKQGFKTDMSRIRNGKLLLEKPRKYKGDWYAIPFNGYSLPDGDIKYCSITKINNKYYASLVIDTPIESLVKTGRNTAVDANVNHFDYTDGHYSINPKRLNSLYEQIAFYQNRLAHKRHVNGKKASDSKSYTVMRAKLQALYEKATAIQLDLLHKFTTRLYHEYDTIVIEDLDVKSMKMSKKAKNLHRSLFGKFRFQMEYKAQKFNKQLIIADRYYPSTQRCSSCGHIKKGDDKITLQGNVKHGTAHNEYECYNCGYKADRDVNAVNNLLALIK

SEQ ID NO: 35186 - protein, 405 aa, unknown
  TnpB Polypeptide
VEIPVQLVEQHVISKSNPRYAAIDKAAFASKNLYNAALYEIRQSFIHQGKYLYYNQMDKIMQKHEAYRALPSKVSQQVLKLLDKNWKSFFAALEAYNKDPSQFLGRPKLPGYKDKTQGRNILVYTIQALSKPALKRGIVKPSGLPIEIKTRHANIDQVRIVPRLGFYVVEVIYEQEPIQAEVDQKLYAGVDIGINNLAALTSNKVGFIPCIVNGRPIKSINQYYNKRRAVIQEQLGKDRYNSHRLDRLTNKRTRKIMHYMHTASRHIIDLLVEEGIGTLVIGKNPNWKQEVEMGKRNNQNFVQIPHARFIDLLTYKAKLVGVKVIITEESYTSKCSFLDMESIEKHEQYAGKRIKRGLFRSSTGKKYNADVNGSYNIIRKVAPDAFVQGSRGCVVHPLERVSIKY

SEQ ID NO: 35187 - protein, 174 aa, Streptomyces sp.
VPAALLAHWCARKRAELQKKQTRSATRRAARRAKKEQRHATHVNHRISKEIVSVAQRTGRGIAVGQLDGIRERVRLRRDQRGTLSSWPFHQLGQHLAYKARQAGVPFLEVDAAYTSQRCPRCGHTEKANRPDRDHFSCRRCGLSGPADHVAGVNVRDRARSAWASVTMPVPLLA

SEQ ID NO: 35188 - protein, 383 aa, unknown
  TnpB Polypeptide
MQLRYNFRLYPTPGQRMALAKAFGCARVVYNDGLRIRQEAFEAGLPYIKDADLQKQVITEAKKTPERAWLSEVSSVVLVQSLNDLHKAYRNFFASVTGKRKGPKIAPPKFKSRKDTRQAIRLTRNGFAIRPNGRLYIAKIGEIEVRWSRALPAEPSSVTVVKDAAGRYFASFVVEVPGEPLPETTGEVGIDLGLTHFAVLSNGKKIASPKFLRRAERRLRKAQKALSRKQKGSNNRAKARLRVAKLHAKVADTRRDWAHKLSTAIIRENQAVFVEDLNVSGLARTRLAKSVYDAGWGQFVAMLEYKAARYGRTFARINRFAPTSQVCSACGALDGPKPLHVRSWTCKECGTVHDRDVNAAKNILAAGRAERLNACGGAIRPSA

SEQ ID NO: 35189 - protein, 449 aa, unknown
  TnpB Polypeptide
MDIQNEITKYNIYKYHVKQDDSLFLILDEWSRLANNLYNETLFVMRQLFIGLKKKQEERHELEASTIEDVLSVAKSYKKEVVLSEEKRIVSYQFLDFYFKTKKNENYNSSLPKQSAQATIKEAYSSFVCWLKALKDYDKNPSKYTGRPKMPKYKKSGGCSSFQMTNQDVIFRKKEFNYFIKLPKTKETISFNKKLGNERLKTVSVAKEYGMFKITFIFEDLNEAVPSIDSNIYCGIDLGVDNLAAITTSNGDTLLVKGGFIKSKNQWFNKKIAKNQRGQTIGTTNKVVSSKALNNLYKRRQFFMEDAMHKVPKKIVLWCVDKNVSTIIIGKNKGWKREINIGKTNNQNFVQIPHALLINYIKTVASKFGVTVIETDEAYTSKASFLDKDLLPVYKPEANITYLFSGSRIKRGLYKDSLGRVINSDLNGAGNIMRKLISDDEISVNVDNL

SEQ ID NO: 35190 - protein, 365 aa, unknown
  TnpB Polypeptide
MMKAYKFRLYPTKSQEMLIVKSIGCNRFVYNYFLVKRKEAYEQYDAMINYNGCAALLTKLKKEFPWLNGPDSTSLQSTLKDLDFAYQKFFKEKKGYPKFKSKKKPVQSYTSKCNNSSIRIVDNIIKLPKLGLVKFAKSKDIDGQIISATIRRNPSGKYFVSVLADVEIQPLLKSNQSVGIDLGIKDFTILSITGEKIANPKYYRKLERKLAKLQQSLSRKTKGSNNRNKARIKLANHHEKIANCRHDFLQKLSTRLIQENDIICLEDLQTSNMIKNHKLVKSIADVGWSEFRSMLEYKANWYGRTISVICKTFPSSQNCSCCGYRNREVKNLNLREWECPNCGVRHDRDTNAANNILAEGLRLLA

SEQ ID NO: 35191 - protein, 403 aa, Bifidobacterium sp.
MGTCRAQRAYRFRFYPTPGQENLLRRTLGCVRLVYNKALALRSETWTREQRNVSYRDTGKALTGWKKSEGLAFLNDVSCVPLQQALRHLQTAYSSFFNHTGDFPAFKRKAHGGSATFTRYAFTWDGCKRHLKLAKMKEPLRVIWSRTLPVKAVPSSVTISLDAAGRWHVGILVEEHVKPIPRTDTRIGVDMGVDSFAALSDGEKIPNPRFRKRNAKRLGKAQRNLARKQKGSRNYEKARLKVARIQAQGADRRKDFLHKLSTRIIRENQTVVLEDLAVRNMCREAAPKEGRARPGRYLPNGRAAKRGLNRSITDAGWRMFRTMLEYKAAWYGRQLIVIDRWYPSSQICSHCGKNNGKKPLNVRAWTCPYCHTTHDRDVNAAKNILAAGLAVNVCGDGRKHHNN

SEQ ID NO: 35192 - protein, 379 aa, Lachnoclostridium sp.
LKHKDKRLKNEVERMANKAYKFRIYPNSRQRVLFARTFGCVRFIYNKMLSDKIKYYEETKQKLDNTPAQYKKEFGWLKEVDSLALANAQMNLQKAYNNFFRSPKTGFPKFKSKHSNRNSYTTNNQKGSVSIGNGCIKLPKIGLVKLKQHRQVPSGYKLKSVTISQTPSGKYFASVLFEYENQVQEQGLHSFLGLDFSMHGLYKDSNGNEPAYPGYYRSAEKKLKRGQRKLSLMQKDSKNRNKQRIKVARLHEKVANQRKDFLHKQSRQIVDAYDCICIENLDMKAMSQCLNFGKSVSDNGWGMFVTFLQYKLEETGKKLVKIEKFFASSQICNVCGYKNTATKNLSIRAWDCPECGTHHDRDVNAAINIRNEGMRIINA

SEQ ID NO: 35193 - protein, 372 aa, unknown
  TnpB Polypeptide
VANRAYKFRIYPNDEQKILLAKTFGCVRMVYNHWLNRRIRQYKKNKTNITYTVCAKEMAEMKKTEEYAFLREVDSISLQQSLRHLDTAFQNFFKQPKTGFPRFKSKKRNKNSYSTVCINSNITISNGYLKLPKIGQVRLKQHRDVPKEYRLRSVTVSQTSSGKYYASILFEYEDQVQEKEIETFLGLDFSMHGLYRDSNGNEPAYPRYYRKAEKKLAREQRRLSKMQKGSNNRRKQRMKVAKLHEKVCNQRKDFLHKQSRQIANAYDCVCVEDLDMKAMSQSLKFGKSVSDNGWGMFTTFLKYKLKEQGKKLVKVDRFFASSQICSACGYKNMKTKDLALRQWDCPQCGTHHDRDINAAINIRNEGMRLVMA

SEQ ID NO: 35194 - protein, 393 aa, Methanosarcinales sp.
VPRRTFKYRLYPTQDQTQTLTDCLTTCRHLYNELLEDRKNAYDRCGVGLNYNEQAGQLKYLNPGIYSQVAQDVLRRLDKAFQNFFRRVKNGDKKAGYPRFQGKNRYDSFTYPQTGFKIKDGKLHLSKIGAIRIFRHRAIKGNIKTCTIKQEGNQWYVCFSVELLDVEKKEIKTSVGVDVGINILATLSDGTEIENPKTLNKYDSKLRKAHRDISRKKKGSSNRNKQKIVLAGIYRKVRNARKDYLHKTSRILADAYDRIIFEDLQIKNMVKNHHLARSIHDASWGMLISLTTYKAEEAGGVVELVNPRNTSKQCSVCSCIQSMPLSQRTYRCPACGAVMGRDHNAAINILDKHVPADCGELTPAEMVAGATAMNQEAPLLIAGRKSLNNRSYD

SEQ ID NO: 35195 - protein, 321 aa, Herminiimonas sp.
LGPFLQRPEGWCPPGPGKSAGPQGVEEAGHQAGLSPALQEKRQVRRFFLCGQRQVQRRWQPYQVAQVGSVRMTQALRFGGKIMAATVSRRAHRWVVAIQVEVAASMRVPSERRERLGVDLNTGSIDLSDGKSIPTPRPLSKRAKRLSRLSKKTSRKIAYAKVAAGIAGDQAMPTGTRLAISINLRKTNDQIARLHAGIHHQRQDWLHKNTTRLCRENQAVVLEDLSVQGMTAAARGSPEQPGKKVRQKAGLNRSILDVAFGEFRRHMDYKAALYGAELIVAAAPEHDHGALEKDVHAAKELGQARAKASAEARVSTSRNRS

SEQ ID NO: 35196 - protein, 361 aa, unknown
  TnpB Polypeptide
MLKAYKYRLYPNEEQRTYLAKTFGCTRFIYNKMLADRIKSYEENKDLDIKAIKYPTPAQYKNDFEWLKEVDSLALANAQMNLDKAYKNFFRDKSVGFPKFKKKINTNSYTTNNQNGTVHIENNHIKVPKIKSMIKLEQHREFTGLIKSCTLTQVASGKYYISILVDTENIQLPTIDNKIGVDLGIKEFAITSNGDFFSNPKHLKKSEKRLVKLQKELSRKEKGSNNRKKARIKVAKIHEKIANQRNDFLHKVSTQLINENQVIVIEDLRVSNLIKNHKLAKSIADVSWSKFRTMLEYKANWYDREIIIAPSSYASSQLCSNCGNKSSQTKDLSCRTYICPVCGMVMDRDINASKNLLKLAM

SEQ ID NO: 35197 - protein, 332 aa, unknown
  TnpB Polypeptide
MKCTAIRLTAGAYCAAKRNGHEITKPFNFRTPHALFLIGKRGRDASFSKDKLSIWTTKGRKKVGFAIPEKFKERFSSSICIDSLDIVEHHGKLVSHLSLTVEVPNPQGILPVGIDRNATNIIVATDINNRVFFEDGLDHRIKNTKLRKVRKRLNAKFVARKAEGKNTHSIVRLFKRLRHKQNNRTKTYAQTIAKRLINWCESNSILVMEELDVSQPKRALNYKMRTGTRRKLSQWFQGAVGKAIENKASQAGIGVVYVSPYNTSQNCSRCGLKGVRNRHKFECPSCGFVCHADTNAAVNIRNRYTALRSSGLPSISPEASSRGKPPSLDGGY

SEQ ID NO: 35198 - protein, 332 aa, unknown; identical to SEQ ID NO: 35197
  TnpB Polypeptide

SEQ ID NO: 35199 - protein, 366 aa, unknown
  TnpB Polypeptide
MIRTYKYKLYKTKKTKHIDNRINIAGLVYNHCISLHKRYYKLYGKHLNKFQLQKHLTKLKKLNKYKHWTKLGSQAIQNITERIDLAYKKFFKKNGGLPSFKKVKKYKSYTLKGKVGYKLNNNIISLNGYEYKFWLSRPIKGIIKTLTIKRDNIGDFYLCISIEQEETKLNITTGKSVGIDFGLKQFLTLSDNTKFNSPLFHLKNISNLKSLNKNLSSKKKGSNNRKKAKIKLAKLHIKIANQRRDYFHKLSTELASNYDSIFIEDLNLNAMKKLWGRKVSDLAFSEFVNILSYKTDVHKIDRFFPSSKTCSCCGTINNSINKELKDLNNRLFKCPSCSFELDRDINASINIYRVGVSTLSREVVIP

SEQ ID NO: 35200 - protein, 422 aa, unknown
  TnpB Polypeptide
MRVRAYRFRAYSSKTTAGVLKTQLEAACKLYNTLLHAEQEEYEENKHTMNKTELRQLALDLRKQNQEFQVLHSQVAQQVAERFYQARERFLEGLANKPKNKKPHRYLSLVYPQSGWRLSNTRDVGQGKSKKRKARLYLSKIGFFTLILHREFPENQVSQVCVKLNPSGRIHVIFLVEESESQELSSKEPKNAVGVDLGIARLATLSDGRFLDNPKPHERSLDRIRVLQRTLSRKKFLSKNWFKAKRRLAKQHEHLKDFRRDLFFKLGALLAGEYDVLVLEDLNVQGLIQKSETKKRRRMRLYDSSFSELRAVLEWQFRKRGKLVLPVPSYNTSRECFRCGGINQSLTLEDRVFHCAHCGFTLDRDLNASLVLLKRAGWVPPAAPAVELRPIPPLPSLGLGRQGGAMRQEAPAFRRGSSLFVT

SEQ ID NO: 35201 - protein, 426 aa, Lactobacillus sp.
VSGVVDKRLATEGSGLSMNGQSLSILIFSTRKNNQERSIPVTTVVKGVKLRLYPNQAQINQLWQLFGNDRFVWNQMLAMANKRYENNPKSQFVGEYDMNYLLKRFKQEYPFLKASDSTSLFVVNHNLALAFKNLFQHRSGHPRFKSRHSAKQAYTGQSTCVVEAKRRLRLPKLGSIRTSKTNQLTDAKIKRYTISHDATGRYYLSLQVETEVHDLPKTHQMVGLDMGVADLAITSNGVKYGTFNARWLEKQATLWQAKFSRRKRQATVAMRQWNHHHKLSKMALNDYQNWQRARMVKARYQAKIANQRKDYLHKLTTDLVRNYDVIVIEDLKTKNLMRNHHLAKSIANASWYQFRTMLEYKCAWYGKQLMMVNAKNTSRICSACGQNDGPKPLDIREWTCSECRTHHDRDINAAVNILNCGLKAIG

SEQ ID NO: 35202 - protein, 661 aa, Micromonospora sp.
MPGSWPVNRKLPLSEGETSRTACARALLRTGVDEKSGEVVSAAVLAERVGWCADLVAGMVDALIGGHWNRVDVDVLASGQDAAGRRLPSNAWMALRRLGWTVTPPAGVRVNDRVVRMAQEQAGRVLRSVKWRADLTSGILSAWPADPRRRTPAEWEQVRASIPGGQDLPSSVIKGRTRQAAAFLHANGRLPVDVFELENSPRVSRMLLLAACDRQQATIERNDAHPTKVLLRLQLPTRADPRGYGDWTWVACPISLPPTVPAGAVLHLPTLRVTGGKLHADMAYTHPVPAARRTGHTIALGVDWGLNTLLSAGALRLHQDGRITALGAGGQFRAAGVLAKQHRLRRLSERLHAKADHYQRLTAGDQQHNLAGKHAALRDEIRHVSARRQNLNDALAWAAARWAVDQAIAAAATVIYLEDLRSMEARGMGATLNTRLSQQVRGKIVDRIRHLAAEHGVAVVTVPARNTSKHCPQCLTPLQHRKAPDQPTVAGWKWAICPHQSCRWQGDRDQGAWRRIAARGLTHQAKTVTDKTSGHMVIRTVVDTLEAAAVITPTSRNDRSKTGPTRHKPPRPTPRRRRAPSPTRPHGLAGKRPEGHAPTDRKRLPRAAHRHQSVNTISTPTTAGHRPRGAALGAGFHLHAHASPPRWETIPETYSGLGSLS

SEQ ID NO: 35203 - protein, 440 aa, Micromonospora sp.
LLRSAGDVWACVLEINVWRRRRDDKPLTGYQELCRELSGSGPGTFGELDTTGARSVLRRFSDAWFAAAKRRRDGDVSARFPRRRRGLVPVRWYHGTFVLDGRRVRIPTAQGAAPLWVRLAREVPYPVEQVRSVTLLCEGGRLFLDVTAEVPVAVYPPGEGPDPGRAAGVDLGIIHPYAVAGPDGEGLLVSGRAIRAEHRMHLADTKARRRSVSQRAPKPGQKGSRRWRKYRRRARLVEGRHKRRVRQAQHEAAAMVVSWAVEQRIGVLKVGDPRGVLDLDAGRRHNLRLRQWQIGRLRQVLEDKATQAGIVVDPVNERGTSSTCPACLRRVPKPRGRTLTCPHCQFTGHRDLIAAAIIATRTPGGGPTTPTAPVVLPEVVTHRRAGRHLPGAGQSRRDPRRPPAAARGSVGPRRPAPPPPGDGESLAHTARIHNRASETR

SEQ ID NO: 35204 - protein, 471 aa, Micromonospora sp.
MKVTRIAYSAALNPGKYAVLQEQARRLGRVRSEVWQRYGSVDGVGSGLRDRQVRDRWLADGTHVQFGVLANAWKETVRDAIADIAANREAAKAKVRQAIARHTDDPTELKRMFTALKANQWIADPFLARQMRKHWRRGKSHVHDQIVVRADQYNTVVDGRGRLWLAVPGLQRRKMVRIPLSTTVAPTGTLRLILRGGRVEVHYQIDASAMRSSQRPCGQATLGVDKGYTEALTDSDGDPHGERLGELLTTESDRLKERNRRRAKLRSIANTAAARGDHAKAHRIKVNNLGTVKRDRQAARHRARVRTEIFTAVHEVVDKAVTIMAEDLTKRFTGRKKLPKNINRRLAAWTKGITAEALKNVSERRGSAHVPVNAAYTSQTCHRCGAFGRRSGDRFHCTPCGVVWQADVNAAINILHRAGDPDIALHTPPQRVKQILQDRTDRHRTRLPVQDSSPATAGRRANNPNRSTMSK

SEQ ID NO: 35205 - protein, 501 aa, Micromonospora sp.
VVVCAVELDQLTLELFANLAHHLFEVAQVSVGEDARPVFRDENQVSVKQESAVPASANRVVGGNPNKCTMQTVTADTGRRYRLYPTAEQADRLASWGHTCRWLYNTALEQRQFAWQQRKVSLGASDQCASLTEARKELDWVADLPAQSGQQVLRQLDQAYRNWWNPQHPAGAPARKRKLARLSIPFPGQAIAVRRVNRRWGTVSLPKIGEIKFRWSRPLGGTVRNAVVSFDGVGWHVGFGVHIGIKTPEVHARPDTVVGVDRGAKVALAMSDGRMWNRAFTSSAQERDLARLKSKAGRQETARRKRGAKTSNRTRKIRAEIARAEAKIRNRRRDFVTRAANRLCAQHAVVKLEGLHVKAMTATAKGTVEEPGTNVRQKAGLNRAILDKGWGLFEEALANRARTTGTRIARVPAAFTSQRCSRCGNTARNNRESQATFRCGSCGHQANADVNAAINIRDAAEAAPQLTGRAARDRNHSASCRPPTQHRRRTTLEAGISRRQL

SEQ ID NO: 35206 - protein, 431 aa, Micromonospora sp.
MMWNVRADTGRRYRLYPTDEQAQRLASWGHTCRWLYNTALEQRQFAWQQRRIILGVTAQCASLTEARKDLDWVADLPAQSGQQVLRHLDQAYRNWWDPQHPAGPPTRKRKSARLSVPFPGQAIAVRRVSRRWGVVSLPKIGEVKFRWSRPLGGVVRNAVVSFDGVAWHVGFGVHAGVATPEAHARPGTVVGVDRGVKVALAMSDGRMWNRAFTPPGRERRLAGLKSKAGRQETARRKRGAKTSNRARKVRAEIARTEAKVRNRRRDFVMWAANRLCTQHATIKIERLRVKAMTGTAKGTIAEPGVNVAAKAGLNRAILDKGWGMFQVALANRARTTGTRIVKVPAAFTSQRCSRCGHTDRNNRESQALFRCGSCGHQANADVNAAINVRDAAEAASPLTGRAVRDRSRKASCRPPTQRRQRTALEAGMSRH

SEQ ID NO: 35207 - protein, 420 aa, Micromonospora sp.
VSRKLPLSEGETSRTACARALLRTGVDEKSGEVLSAAVLAERVGWCADLVAGMVDALIGGHWNAADVEVLASGVDAGGRRLPSNAWMALRRLGWTVTPPAGVRVNDRVVRMAQEQAGRVLRSVKWRADLTAGILSTWPADPRRRTPAEWEQVRASIPGGQDLPSSVIKGRTRQAAAFLAANGRLPVDVCELENSPRVARMLLLAACDRQQATIERSDTDPGRALLRVQLPTRADPRGYRDWTWVACPISLPPTVPAGAVLHLPTLRVTGGKVRADLAYTHPVPAARRTGHTIAVGVDWGLNTLLSAGALRLQTDGRITALGAGGQFRAAGVLAKQHRLRRLSERLHAKADHYQRLIGVDSQHQLVGKHAALRDEIGHVSARRSNLNDALGGLWIRLSPPGRPSSMWKICGRWKHEAWAAP

SEQ ID NO: 35208 - protein, 424 aa, Micromonospora sp.
VNAWRRRRQDAPLTGYQELCRELSGSGPGTFGELDSVGARSVLRRFSDAWFAAAKARRDGDVSVRFPRRRRALMPVRWHHGTFTLDGRRGRVPTARGTSSLWIRLAREVPYPVEQVRSVTLLCEGGRLFLDVTAEVPVATYPPGEGPDPGRVAGVDLGIIHPYAVAGPDGKGLLVSGRAIRAEHRMHLIDTKHRRRAVARRVPKPGERGSRRWRKYRRRARLVEGRHKRRVRQAQHEAACAVVSWAVEQRVGVLKVGNPRGILDMDAGRRHNLRLRQWQIGRLRQILTDKAVQAGITVDPVNERGTSSTCPACLRRVPKPRGRTLSCPHCRFTGHRDLVAAAIIATRTPGGGPTTPTAPAVVPEVVTHRRAGRHLPGAGQSRRDPRRPCMVARGSVGPRRPAPPQDGESLANPARIHNRASETR

SEQ ID NO: 35209 - protein, 357 aa, Micromonospora sp.
VGFPRFKRKSRSRPSFRIRCKTTKAGRASVRVGDPTAGPRSVCLPRIGVLRVREDTRRLRRMIRTGRADIRYATVSCRAGRWTITVTMEAAGLHPAHQHPARPNTDSSGGWVGVDRGLAALVVAADTSGRQVLRVDDAPRPLRAALPRLRRLSRQLSRKQRGSRNRAEAAARLGRAHHHVANVRRYFLHKVANRLVKTHDRLALEDLHTAGLLRNRRLAAAISDAGWADLARIIGYKQRWRGGQATLAPRWYPSTRMCSACRIIGPALPLSVRIFRCDECGHEADRDVNAAVNLAVWAEQHHAQTRDPEVRGPVTNASRGDGSGQRPRAGETSLDDGGTPPPRTSVTAGTPEKGGAS

SEQ ID NO: 35210 - protein, 411 aa, Micromonospora sp.
VACPISLPPTVPAAAVLHLPTLRVTGGKVRADVAYTHAVPKARRTGHTVAVGVDWGLNTLLSAGALRLNEDGRIAALGAGGQFRAAGVLAKQHRLRRLSERLHAKADHYQRLIAGDEQHNLVGKHAVLRDEIRHVSERRSNLNDALAWAAARWTVDQAIAATATVIYLEDLRSMEARGMGATMNTRLSQQVRGKIVDRMRHLAAEAGVAVVTVPARNTSKHCPHCLTPLRHCKAPDQPTVAGWKWAICPNPSCGWQGDRDHGAWRRIAARGLTHQTRTVTDKTSGHMVIRTVVDTLETAAVVTPTTTSRRDRSKTGPTRQNNSRPTPRRRRAPSPTRPQGRAGKRPEGHAPTDRNRLPRAAHRHQGVNTISTPPTVGHRPRGAALGVGFHLHAHATPPRWETIPETQSDTG

SEQ ID NO: 35211 - protein, 531 aa, Micromonospora sp.
MRTDVPWSELTDGERQIVLDGPEGKKHSYAVFRKCRRWRAWCGAVGRFTAFRFTVDPSPSQVVVLARHAGASRFAFNQCLALVKEALDEKRRGGSVVVPWSGFDLINAFNSWKCSAQAGRRFVVDAAGSAEVVATGLSWRAQVCQQVCEEAAVDLGRALTAWADSRGGKRPGRRVGFPRFKRKSRTRPSFRIRCKTTKAGRVSIRVGDPTAGPRSVCLPRIGVLRVREDTRRLRRMIRTARAHIRYATVSCRADRWTITVTVEAAGLHPARQHPPRPDPDGGGGWVGVDRGLAALVVAADTTGRQVLRVDDAPRPLRAALPRLRRLSRQLSRKQRGSRNRAEAVARLGRAHHRVANVRRHFLHKVANRLVKTHDRLALEDLHTAGLLRNRRLAAAISDAGWADLARIIGYKQSWRGGQATSAPRWYPSTRMCSACRIIGPALPLSVRIFACDECGHEADRDVNAAVNLAVWAEQHHAQTRDPEARGPVTNASRGDGSGQRPRAGETSPDDGGTPPPRTSVTAGTPEKGGAS

SEQ ID NO: 35212 - protein, 456 aa, Micromonospora sp.
VDEESGAVLSAAVLAERVGWCADLVAGMVGALIGGHWNRVDVEVLASGVDAAGRRLPSNAWMALRRLGWTAAAPVGVKVNDRIVRMAQEQAGRVLRSSKWRVDVTGGVLSTWPSDPRRRTPVEWEQVRQAIPGGEGLPSSVIKSRTRQAVAFIAANGRLPVDVFELEGIPRVPRMLLLAACDRQQATIERNDTDPARALLRMQLPTRPDPRGYRDWTWVACPISLPPTVPAGAFLHLPTLRITGRQVRADVAYTHGVPKARSSGHTVALGVDWGLNTLLSAGALRLQEDGRITALGAGGQFRAAGVLAKQHRLRRHGERLHAKADHYQRLIAGGDQQHQLAGKHAVLRDEIRHVSARRSNLNDALAWAAARWTVDQATAATATVIYLEDLRSLEAKGMGATMNTRLSQQVRGKIVDRIRHLATEHGIAVVTVPARNDSAAEFVTRRRDRSGWRVAG

SEQ ID NO: 35213 - protein, 485 aa, Micromonospora sp.
VKKFEPRPGFVVQAFRFALDPNVTQEQRLRSHCGAARAAYNWAVGWVMASWWQRKAEASYGIAEQELTPWRPWSLLALRKVFNEVKKTDPRFAGWWQENSKEAYGTGLANAAAAFDNYAKSKRGQREGRRVGMPRRKSKRTAGLACRFTTGAIRVEPDRRHVTLPRLGTIRTHESTRKLHRRIGNGTARILSATVRFERGRWFVSFQVEIQRATDRAPARPDVAAGVDLGVTCLAVIADSQGEVRFIPNPAHYDSALKHLKRLSRRVSRRRGPDRRTRQKPSRRWAIANAERNRVHHRVANLRQDGLHKLTTAITGEYGTVVVEDLNVAGMLRNRRLARRVADAGFAEIRRQTAYKTGWTGGTHVVADRWYPSSKTCSNCRTVKAKLPLHVRVFRCDACDLVIDRDENAARNLAALATAVTTGTGVAGDPGAQTPKPRGADHKTRTTTRSRKATGGRAGGATLPHQRQKETRDRHQDTETQPALR

SEQ ID NO: 35214 - protein, 459 aa, Micromonospora sp.
VKVVQAYRYALDLTPCQERAVLAHAGAARVAYNWALARVKAVMDQRAAERSYGVPEESLTPTVGWNLAALRKAWNQAKTDVAPWWQECSKEAFNTGLDALARGLKNWSDSRSGKRAGPRVGFPRFKSRRRATPSVRFTTGAIRVEPDRQHVVLPRLGRLKLHESARKLARRLEAGTARILSATVRRDGGRWHVAFCVEVERAERTPTRPQAVIGVDVGITHLAVLSTGEMEPNPRHLDEAAQRMRRLARQMSRRVGPDRRTGQRPSNRWERARRQVARAHARVTNLRRDNLHKLTTRLAREYGTIVVEDLNVAGMLRNRRLARRVADAGFGEIRRQVEYKVKWNGGRRIVADRWYPSSKTCSGCGTVKAKLALSARTYKCTTCGLVLDRDVNAARNLAAIAREATTAGSGPVAGRGADRKTRPGGQVAMKRQPGTAQAGKTGTVPPQGGTANRALTKAH

SEQ ID NO: 35215 - protein, 427 aa, Micromonospora sp.
VNADTGRKYRLCPTDGQADRLTAWGHTCRWLYNTALEQRQFAWQQRKVTLRLAAQCAYLTEARKELGWVADLPAQSGQQVLRQLDQAYQNWWNPQHPAGAPTRKRKSARLSVPFPGQAVQVRRLNRRWGAVILPKVGEVKFRWSRPLGGAVRNAVVSFDGVAWHVGFGVHASVKAPAAHARPDTIVGVDRGVKVALAMSDGRMWNRAFATPGQERELARLKSKAGRQETARRKRGATTSHRARKVRAEIARTSAKIRNRRRDFVMWAANRLCAQHAVVKLERLNIEGMTATGKGTIAEPGTNVRQKAGLNRAILDKGWGLFHVALANQARTTGTQIVRVPAAFTSQRCSRCGNTDRSNRESQATFRCGSCGYQANADVNAAINVRDAAEAAPPLTGRAVRDRNRKASCRPPTQRRQRAALETGISRR

SEQ ID NO: 35216 - protein, 381 aa, Micromonospora sp.
LVVQVKLLPTSQQASALEATLRACNAAASEVAAMARDVNCYRNYDLRRHAYHGIKDDYGLGAQAAQHVIKKVADAYKTLSANLKAGRYGKPGSKRRRKVEVNPIAFRWDAAQPYDARMLSWQHDARTVSIWTVDGRLKTVAFTGSADQVKAVATRPVGESDLVHRDGMWFLYATVEVDEPPVYQPDGFLGVDMGIANIAYDSDDTRYAGTKLNGYRRRQQRLRQRLQAKGTKSAKRLLARRRRKEARHAANVNHTIANSIVTEAARTGRGIAVEKLTGIRDRVRLRKPQRVTLHSWAFQQLGACLTYKARRAGVPLVQVDPQYTSQTCAECGHRDKRNRPDQETFHCWSCGVVAHADHNAALNIAARGVEDWGAVNRPHAA

SEQ ID NO: 35217 - protein, 518 aa, Micromonospora sp.
VPAGRRHLPGPAHHQRSGTRRAGGHRPLPERAARRRRGGRVLRVPLGRAQDVPHRPELHPAGRHPGRDADRGGRPARPVRPAAGARPARAVPAAGHRSGPAQPLKTSGRACRAGRRRRAYAVFRKCRRWRAWCGAVGRFTAFRFTVDPSPSQVVVLARHAGASRFAFNQCLALVKEALDEKRRGGSVVPWSGFDLINAFNSWKTSAAAGRRFVVDAAGSAEVVVTGLSWRAQVCQQVCEEAAVDLGRALTAWADSRGGKRPGRRVGFPTFKRKSRSRPSFRIRCKTSKAGRVSIRVGDPTAGPRSVCLPRIGVLRVREDTRRLRRMIRTDRAHIRYATVSCRAGRWTITVTVEAAGLHPARQHPPRPNSDSSGGWVGVDRGLAALVVAADTSGRQVLRVDDAPRPLRAALPRLRRLSRQVSRKQRGSRNRAEAVARLGRAHHRVANIRRHFLHKVANRLVKTHDRLALEDLHTAGLLRNRRLAAAISDAGWADLARIIDSAAEFVTRRRDRSGWRVAG

SEQ ID NO: 35218 - protein, 640 aa, Micromonospora sp.
VLLRTGVDEKTGEVLSPAVLAERVGWCADLVAAMVGALLVEHWKSVDVEVLASGRDAGGRRLPSNAWMALRRLGWTVTPPAGVKVNDRVVRMAQEQAGRVLRSVKWRVDVTAGVLSTWPADPRRRTPVEWDQVRTAIPGGEGLPSSVIKGRTRQVAAFLAVNGRLPVDVFELEGAPRVPRMLLLAACDRQQATIERNDTDPAKALLRVQLPTRADPRSYRDWTWVACPISLPPTVPASAILHLPTLRVTSRQVRADVAYTHAVPKAKRAGHTVALGVDWGLNTLLSAGALRLHPDGRITALGAGGQFRAAGVLAKQHRLRRHGQRLHAKADHYQRLAGGDSQHNLAGKHAVLRDEIRHVSARRSKLNDALAWAAARWAVDQAIAARATVIYVEDLRSMEARGMGATMNTRLSQQVRGKIVDRMRHLAAEHGVAVVTVPARNTSKHCPQCLTPLRHCKAPDRPSVAGWKWAICPHQSCGWQGDRDHGAWRRIAARGLTHQAKTVTDKTSGHMVIRTVVDTLEATAVVTPTACKASRRDRSKTGPTRHQPPRPAPRRRRAPSPTRPHHGRAGKRPEGHAPTDRNRLPRAAHRHQGVNTISTPTTGHRPRGAALGAGFHFHAHASPPRWETIPEIQSNSGSLS

SEQ ID NO: 35219 - protein, 443 aa, Micromonospora sp.
LSDQPAAHRPCGRGAASTHPPCHRRQGARRPGLHPPGAGSPAHRSHDRGRRGLGAEHAPQRRSPATTNGWADHRVGGRWAVPGRGRPGQAAPPAASVRAAACQGRPLPAPHWRRLAASTRRQACGTAGRDRARVRAPLELERRARWAVDQAIAARATVIYVEDLRSMEARGMGRTMNTRLSQQVRGKIVDRIRHLAAEAGVAVVTVPARNTSRHCPQCLTPLRHRKAPDQPTVAGWKWAICPNQGSCGWQGDRDHGAWRRIAARGLTHQAKTATDKTSGAMMIRTVVDTLEASAVITPTSRNDRSKTGPTRHHTPRPTPRRRRAPSLTQPHGRAGKRPEGHAPTDRRKLPRAAHRHQDVNTTSTPTTGHQPGGAALGAGFHFHAHATPPRWETIPDTQSDSGSLMTRDAGPVINPAPWPYLPGDLTRCLPAGHRVSSRPDAVR

SEQ ID NO: 35220 - protein, 363 aa, Bacteroidales sp.
MLREACFVWNHALALQKRYYLLYHKYIDIYKMRAHFAKRIHRNLLHSQTTQEILERLDTAYQCFFNHIAKRPPKFKKTKDFSSFVFRQSGYSLKGHVLTINRIKKRFKFSLSRPYAGKVKTLTVKRSPLGEYFIVMVLDQSPQSIGKSHNGASVGIDFGLKTYMTLSDGAEIKNPQFMKENLTELRRRNRNLSKCKYGSNNRERKRKELDRLWNDICNKRDDFQWKLAHDLCRKYDRIFIENLNLADMSLGRKANRKLKDQAHAEFITKLLYVATKYDVAVHKIDRYYPSSKTCTCGYVNKELKLTDREWTCPHCGATHDRDLLAANNILRRGIYELESDSKTSKRTAKRLSHWNPRISFLQG

SEQ ID NO: 35221 - protein, 362 aa, Oscillochloris sp.
LQPTPKQSDALRRTLVRANEACDYISKIAWEDKTFRQFSVHKLCYAAVRETFDLAAQMAVRCISKVADAYKLDTKRLRTFAPLGAIAYDERILYFNRTKQEISIWTLDGRQAIPFVCGERQRALLHAQRGETDLALVNDEWYLFAVCEVETPEPIDVEGVLGIDMGVTNIAVDSDGEIHSGRAIKHIRYRHRSLRNRLQRKRTHGTRRRLKKLAGQEYRFATWVNHNLSKQIVAKAEGTKRAIALEDLTHIRTRVTARRSQRATLHSWSFAQRRAFIVYKAALAGVPVYAVDPRNTSRTCPKCGCIAKENRKTQASFVCTRCGLAGHADVIAAGNIAGRVPVSVPYYPDTDSSVDEGKAHEL

SEQ ID NO: 35222 - protein, 349 aa, Escherichia sp.
VERLQAFKFQLRPGGQQEREMRRFAGACRFVFNRALARQNENHEAGNKYIPYGKMASWLVEWKNATETQWLKDSPSQPLQQSLKDLERAYKNFFQNRAAFPRFKKRGQNDAFRYPQGVKLDQENSRIFLPKLGWMRYRNSRQVTGVVKNVTVSQSCGKWYISIQTESEVSTPVHPSASMVGLDAGVAKLATLSDGTVFEPVNSFQKNQKTLARLQRQLSRRVKFSNNWQKQKRKIQRLHSRIANIRRDYLHKVTTTVSKNHAMIVIEDLKVSNMSKSAAGTVSQPGRNVRAKSGLNRSILDQGWYEMRRQLEYKQLWRGGQVLAVPPAYTSQRCACCGHTAKENRLSQS

SEQ ID NO: 35223 - protein, 573 aa, Spirochaetales sp.
MARPKSNNVQINISVPSEWKTELENLARIYSVEEGKTMIDEEYNKLLKQYHKVSERHILAVESDMPYSDILQVVTLSDKIRKAGNELVALMRKNYEQLLRTKRYRKLLVLYGNTGDKNKRKALANQLSEMQKDYNVTWDYCRKSMIPIGKKYGIDAVFALTKAEDIWGGVEKCLYGRGATIHFSKYGELPCIRSKQINRGIPISVKKEQLQFKLGKINFGIKIVDRFQRDEVNSIVSYLAESENIDRKAVNAFKEDARCIDTYRPCYATLVPKLIRRKYRVYLHLTIEGKAKPKYNKYGSLRHKYGKGIIGADIGTQTVAYTSNTEVGLKNLSERGNSIQTSERKERLLHRAMDRSRRATNPQNYNDDGSVKKGHKDWKYSNHYKKLKSKFHELCRINAVNRQLAINEDANHLRSLANTFVTEEKNASKLMKRAKETTKNEKGKFNKKKRFGKTIKNRCPSKFQTTVQKKFEVTGGTYIEVSNNYRASQYDHTADDYIKKKLSDRLYKLRSGTEVQRDWYSSFLLYCYDYRTNSIDKNKCNMEFGRFYNMEKKLIERIKVNKIKVLNSGIKIG

SEQ ID NO: 35224 - protein, 374 aa, unknown
  TnpB Polypeptide
MRLTIQLKLLPTADQADALRRTLVQANEACDSISRVAWEAKTFRQFAIHRLTYHAVRETFGLSAQLTVRCISKVADAYKLDTKRQRTFAPLGAVAYDERILYYRSTSVSIWTLDGRQAIPFVCGERQQALLAFRTGESDLAFVRGNWYLFATADVETPDPIDVEGVLGIDLGVSNIAVDSDGEIHAGTAIKHVRYRHRRLRNKLQRKGTKRSRYRLKILAGQEAHFAKDVNHVLSKRIVAKAERTKRAIAVEDLTHIRTRIRARRSQRATLHSWSFAQLQAYIAYKALRAGVPVHRVDPRNTSRTCPQCGCIDKANRKTQASFVCTSCGFAGLADVIAAGNISRRALVSAPYVSDASRSSTGSARDKPTPFRLG

SEQ ID NO: 35225 - protein, 267 aa, Bacillus sp.
VKLVPQTITVKVKLLPIKEQIMLLKQSSHEYIKVINALVSEIAEAKKSAKGIEANITSAVKKSKYKLVPILKRPVCVWNNRNYSFDFTHISIPFTVNRKSTRLKVRALLIDKYNHNCELLKYKLGTLRITKKSAKWIAQISVTIPTNKKTGTKILGVDLSLKVPAVAITDDDKVRFFGNGRQNKFMKRKFRSVCKKLGKAKKLNALRQLDDTEQRWMQDHKVSRVIVDFATDNNISVIRLEQITNIRQTDEQAVKTKKIYTLGHSIA

SEQ ID NO: 35226 - protein, 502 aa, unknown
  TnpB Polypeptide
MYPDEAQEHQLHEIFTIYNRMKRIGYNLLFHGENYMAERFGEGKTIQQCLMRLCHNNPYVGTILSNNIATLEQQKTWLEKRRKRMTQQLKVINKKINEIKEQDTHDRRLKGLYARRSSIMAKLHNLHLEPVVFGTKKLFRERIRGNITRDEFRIQRDSSFSCTGKKQHGVKNLNIKVLPDKTVKIRTFSKQKGRKWLFILISVNSVQLKWFQQILNADKYTLTVKRKLFKGKVRYFVHISYEITEPAPHYGYEHGAIGLDFNYNFVALTNVDQHGNMLSSHRISFGNLHSYRTDKRNDYISYKMDKVVNYCINKGKGIVVEDLQFDQEFSYNKKRNRKLSNLKTTALQLLERKCKKRGVSFRKVFPGYTSLIGKYKYSGLHNLTVHYLASYVIARRGLGFKETIPAIYDWVLSHVGEFIDPRVKKSSPYRTWSMIHDLFEHSGITSFKTAKILRKTVLMRHVLHSVTSAQPDNLKAGSSFLKAGRIDDYHKMWICVKNHTYL

SEQ ID NO: 35227 - protein, 562 aa, Lachnospiraceae sp.
MKVTVNGPRYYKEDLKSGAFDLCIQSICCYNDFKIQLYNAMYANRYLPGSKRDILGLKKTTYNAWMKEYGINVYYYNSLYAEVTGLLSSQREFRKWYFARMEEDLDARKRKIVSLTESLTKLRAIKQTIVSYVKTGKFKRPYKGCMLKISGQTAFPGGKHVYALEEYERLIEQKIRHTKAKLHNVQAAFRRKEDKLEKLGKSNPDRILFGSKAFYKTKDTVGCDDQWHKEFYEKRHRTIQATGRHTSRYGNFLVHPDEKGNLYWILPKGMGTVVFPKFHLARYEAEWCSCFQCDKNLRQAVSYRMKRMTDGNGREYLIVSATFDLPDHEAPTDLSEGCIACDLNVDHLAWAEVDPSGNLLRHGIIPYDLEHKSSTQRDQIIGDVVSRVAALNKETGRPLVFEDLDLTTKRASMKYGGKRSNFLVSTFAYQKFRFHLDSQGSRKGFSVIYVSPAYTSFWGKLLFMRKYGISIHTAAAYCIGLRVLERLDELTIPDVYGHLLDSKKQTGPYYAAEKDAALYKKLSGIRTHAFYLDFPDLGTVTKLKDWLRQNDKSCPAWYTAAL

SEQ ID NO: 35228 - protein, 298 aa, Nocardia sp.
VQLRYSYRLYPTSGQQTKLAKAFGCARVVFNDALSSRRHAYAEGLTLSDADLSKRLTEAKKTPQRGWLGEVSSVVLQQALADLNTAYRNFFASITGKRKGARIAPPRYRSRKDNRQSIRFTRNARFQVLDNGKLRLPKIGDIELRWSRGLPSEPSSVTVTKDAAGRYFASFVVLVADESLPELDTEVGIDLGLTTFAVLSDGKVIESPKFLRRAERKLRKAQQDLSKKQQGSRNRAKGGCQYRAHTESFVVNHSSPHVPKSAARPGVCRTNSALTATTGTMVGCGYWWSRTSSCWPTR

SEQ ID NO: 35229 - protein, 367 aa, Aigarchaeota sp.
MKARKTIKAKVLELRKGKEELLKREYENFQRYLRGDKSAPLYSATRQQADRLLRRLGERFNPNKEYPVILRKDVYRADTKLTPYWLKIPIYGVKGGINVPIKTHELITDEIVCREAKIIRKGDEWLVYITVEKEVSERNPKSVLAIDLGIRWVATTVNSNNPKPKFYGKELRRVKGHYFWLRRTLALKKAYKAIKKIGHKERRVVNYILHKISKAIVKEALANDSLIIIGDLKGIRRNGRGRAFNRKLNNGFPYHRLSQFIEYKARWHGMKVVRVSERNTSKTCHKCGHKGLRVGSLFKCLDYGHSCNADYNGAMNILKRAMGYMPMVGAALTQPRTRYGEGLSPEEPRIPWLQPWECQSRTIPEPI

SEQ ID NO: 35230 - protein, 380 aa, unknown
  TnpB Polypeptide
MNTYKAYKFRIYPNKEQKIMIDKTFGCTRFVFNKFLSERKEKYEKSKIKLSTYEQIKELPDLKKENKWLKEVDSCALQKSIFNLDDAFKNFFRGNGYPRFKAKGEHESYTTNNTLNEYKNVKYESIRIDFKNKVITLPRLKKVEFRGYRNIKEIVGKIKSATISKDASKYFASILVEVPFTKPIINPTSIVGLDLGIKDFIVTSNGEKLKNEVRVNEKRLKGLQKGLARCKPGSKNRYKMKLKIQRLYLKIKNARKHMIFKLANKILKESDIVAVETLDVKSMYQVHSIAKHLKNLPIGDFLRVLKYKSDWLGKKVININKYYPSSQVCNRCEYKNERVKDLSVRKWICPRCGFEHDRDVNASVNIMFEGLKIYMKESII

SEQ ID NO: 35231 - protein, 407 aa, unknown
  TnpB Polypeptide
MSIQQRVERHQIKPSDDRYPEARHLCGLSKNLYNATLYSVRQYYFEHKKYLNYNAVNKDFTHNNQPDYRALPSKVSKWTQKLVDQNFRGFFSAIKKKRKANIPRYLDKQGLQIVHYEKGALSFVKQGFIKLSKTNIYIKTELPKDAVSFVRIIPKGNHIVFEIGYKKDIDIIKNDNGKYASIDIGINNLMTISSNVFEPFIINGKPVKSMNVYYNKLVSRNKKRLWKVNHNKKSQRLFKVHQKRNNKIDDYFHKSTRYIVNQLVSNQVNTLVIGYNKGWKQDTMMKKSTKQTFIQIPFYKLISMLTYKCEEQGIQVILQEESYTSKSSFLNLDDLPVWDGKPKFVKFNGKRIQRGLYKTKNCVINADLNGSLNILRKYLKKQEAWNEKLFSDCVKVGSIPSLIRFNF

SEQ ID NO: 35232 - protein, 669 aa, unknown
  TnpB Polypeptide
MASMAAAPTDSPAVISGDRGPRRRGKSKAPNFKYEGPVAVIALELDVSDPVVRRRLEVQWDAVFRLRRALQRDAAARCRAYWAAHHRRVTDAKALRAWLGLTRKGIEDAAKHHIEDSGWMRDHLTKAVGLHVAAEVWETVDRHLFVDASGRRHGPPKIGSWWDFTRIPGRARSHTKAQPTWETYRLVGTLDGHLRVYRHPQLPTELITAAAAATQPAGSSILAQPARMPVPPRPASMSWWDHQGVLAVVFTGLPAGDLVLPVRLPSGAGQWPHLVHFLADTAVWHKIDLVRVRDRKAPGGWRYYAHLLIHHRGYQSPSTLARRRQVPAGRRAGVDANVSTVAVASFPVGQPEQLAVAQIRCTPAQQRTAARAAEKTRDRQRALDRSRRNTNPGQYQPSMRQRRRAERRVANGLATKEVTNPGGPRHARADGRPLRAYRRDELSQRYRRTRSDHAAASRRDSQAKQARATEVAAAIVAAHGTTVTMEDCRISTWARLWGKRIALFSPGMLVSALQAECAAAGGCLTRAGTRATAMSQHCLCGARVPKTLAQRVHDCPHCGLVADRDTVSAALAACVEFTNPEDPRTARVDYRLAHAICDGLASQQEWEGSVNRHQPPTPDGVGSARTGSRHPVASAEQAAPGPPPNRPRPQRGRHGTSRKQPAPKLIGAA

SEQ ID NO: 35233 - protein, 338 aa, unknown
  TnpB Polypeptide
LWEKGELKGKPKLVCENHAMPVFYRDVMYREAEPGEDAAHLKLFDGCEWRLFQVKLLHTDMEYLRKKWSGKKASAPTLEKKHHKYFLRFSYTEEVSLSKTDVKEQVICSVDLGINTDAVCSIMRADGTILGRKFINFPSDKDHLYHVLGRIRRFQREHSSRQVQSRWDYAKRLNMELSRKIAAEITKYAAEYQAGVIVFEYLEMQGKISGKKKQKLHLWRKRDIQKLCEHQAHRNRIRVSRVSARNTSRLACDGSGAVVRNPENHSLCIFQTGKQYNCDLSAAYNIGARYFIRELLKPLPETERSSLEAKVPAVKRRTSCVYADLRKLYVEVNNLKAA

SEQ ID NO: 35234 - protein, 422 aa, unknown
  TnpB Polypeptide
MYEERNRKIKESGKATRERRANMDCRVFSVKIQENRLSKAKLEKLQRCFLEAKWLYNAILASKTLTLEDTSTVQVKVKDSFEIRPINTLSAQMKQSVADSVKTNVSNLSKAKKHGLKVGRLQFKKECNEINLKQFGKTYKVKSHNKISVQNIGVLVVNGLEQINIDEIEFANAKLIQKPSGFYINLTIYSNRQPQPETSKEVLGLDMGIKDQLIFSNGVKVNFYLEESEQLKGLMRKLARQIKGSNQYKQTLHRIKKVFEYQNNKKNDVVNKLDSVLKQNYIICFQDELLRQWKRKKSKRRFSFGRKVQHGILGRVKDKLKNNPSNVMLKSSVPTTQTCPKCGCLTKHSLDKRLYHCNHCGFENPDRDIHSANMMVLLSGYGTYRSLNTDTVSTERMIGFLDSLSNFGVVVSTTNSMEAYCL

SEQ ID NO: 35235 - protein, 415 aa, unknown
  TnpB Polypeptide
MWRMLVKGVVFRLDGELPSEAKSLLEDFRLAVNNAIRAGLQARVTSRNALVKLAYKDFRQDHPRMYSLHLVSAFEVAGSVLKNHRRRLRRGGAARVPYIRRFLMKAANQAYKLDRMKGIIDLPIRAGCHVMLKLVLSDYHRQYLDDSSYTLGSLTLLPDRVIVAFRKEAPKPFVPESALSLDTNERSLDGVFVKDDEIKAVKAGFPEVAVIQQRHHDRRKRLQKKKAHDRRTSRRLCRREGAREHHRIEYRLHQVANAILSFAENERSAVVLEDLKGFRPRWNKELNRRLSLWPRRELHRIIEYKAQWRGIPVVKVDPRYSSRTCPICGRKQDSRMGAEFNCECGWHLDKHINASLNLLQTAISNGLEVAGGLRFSPGAFQHDVMMILYEPAMAARSEPNGTSCADEAPSVVITR

SEQ ID NO: 35236 - protein, 379 aa, Nonomuraea sp.
VSVRYGEQSAELKHIRADDAGGQGRWSFSSQQATLRRLDKAFGAFFDRVRTGRTPGFPRFKGRGWFDTVEWPKDGDGCRWDSQPEHPAASYVRLQGVGHVRVQQHRPVLGRVKTISVKREGNRWYVVLSCEDVPAEPLPATGVVAGIDLGVAFLVTTSDGDQVANPRHLAATADRLAGAQRDLAQKKRGSARRRKAVARVAALHAKVRRQRADHAHKSANALVAAYDVIVREDLRIANMTRSASGNVEAPGRNVAAKAGLNRSILDAGWGVFLRILAHKAESAGRELIAVDPRNTSRTCARCGHVAKENRLTQAEFACTACGHAAHADVNAAVNILRAGLALREAAEAAWREAAPFRGRRSHVVHSRNLECAPGHRLGP

SEQ ID NO: 35237 - protein, 424 aa, Enterococcus sp.
MPFLFRETVQLKNDKKLLLRDFPHDILIGEQMFVYSELKKGVDLMEQLKAYKYRIYPTEEQVVFFAKTFGCVRKVYNLMLDERIKAYAAMKNVPSKKLKKPTPAKYKNDYPYLKEVDSLALANAQLNLDKAYNNFFRDKRVGFPKFKSKSSTVQSYTTNNQHGTISLVENNYIKLPKLKSLVCIKRHRHPKGEIRSATISYHSSGKYYLSLLCKEEIPKLPKTNTAIGIDLGITDFAILSDGQKIDNHRFTAEMERKVIREQRKLSRRGLQAKKAGKKLSEAKNYQKQKRKVARLHEKVKNQRNDFLNKLSTELIKNHDVICIEDLHTKGLLRNHKLAKSISDVSWSSFVAKLQYKADWYGREMIQVARWYPSSQLCSDCGHKDGKKPLQIRAWTCPVCHTHHDRDINASINILNEGLRMRAFA

SEQ ID NO: 35238 - protein, 419 aa, Scytonema sp.
MDLENTNKKSKKIRIYPETNLKLVYRRWLAACRWCYNHALAYQRDCFVKGEKQPSKYELREIVLKSCPKWVNECPYSPKEESVFDAKTAFLKTAVKNKLNPRFKSCREAVKSLRISAKYWGNFYTGKGKAKLVAGFTHYAASQVLINGKNHAIKDLQLNPVEALCEEMPSEFTILLDKGRWYICFSIAFEAQDNQRKNCMGVDPGVRTFLTGFDGENILEIGNGSISKIVILCQRLDKLQSQIAKSKGRDNKRLRWKLRKQSEAIRTRIRNLTNEVHNKASVLLTKNYKHIFLPTFDTSQMVVKKKRKLNSKTARNMLTWSHYRFKKTLKFHALKRGCVVHDVTEEYTSKTCSKCGHIHEKLGVNKKFKCPNCGHEIARDWNGAINIFIKSLNDLVNASTSVEAGQDVARYTVETSTCY

SEQ ID NO: 35239 - protein, 319 aa, Scytonema sp.
MNGITNVLSAAPQQALMALREAWKDCFNKKKGVPKFKKKGKRDSFTLEGTVKILGGNKIQVPVIGVIKTYERLPQVLIKSCTISRQADRWFISFRFDVETQKSEHTNVVGVDLGIKNLATLSTGDVIAGAKSYKKYEAKLSKMQWLNRHKIIGSNNWKKANLQIARLHRKIANIRKDTLHKLTTLLAKNHGTVVIEDLNVSGMLANQRLSKAISDMSFFEFRRQLTYKCELYGSKLLVVDRWFPSSKTCSNCGIKKETLGLDERVFECGHCGFVIDRDLNAAINLSHCVAGEKLQGGFPSGQTSGVPPVVASGVKNAVS

SEQ ID NO: 35240 - protein, 425 aa, unknown
  TnpB Polypeptide
MIAKRVERNLIKASNELYNYCDDICFKSKNLYNYSNYLIRQEYIFNHNFIGFYKLDRLLKETNQADYRGLPNQSAQQTLMLLEKDWKSFFAADRDYKENPSKYTGRPRLPKYKKKQGRHIAMFTNQQCEIKDGFIKFPKSAEKIKTAVKENLTQVRIIPKGNCYIIEIVYQIEIPEEFPEIKKAIAIDLGVNNLATIVNNMGLKPIVIEGKIIKSINQYYNREKARLMSFVGGSGTSNRIISLTEKRNRKIDDYLHKSSRFIIDYCREYSIDTIIIGNNPGWKQKVSIGKVNNQKFVSIPFKKLINQIKYKSEERGINVKVVNESYTSKASFLDSDNIPEYRAENTEKHTFSGRRIYRGLYTSKEGILINADCNGSYNCMRKVIPKFSLEEGIEGVGLHPVRLIPSCRQSDKGNLINFVKINNIF

SEQ ID NO: 35241 - protein, 270 aa, Fischerella sp.
  misc_feature (257)..(260): Xaa can be any naturally occurring amino acid
LNGLPDFCKSVPYQIKSIAIKDACKAVSNAKKKFKNGGGISKVKFRSRKDPIQSCYIPKSAVSDKGIYHTILGEVTFKEALPQSFGDCRLVKAYGDYYLTVPEEVSRQQSENQGRVVALDPGIRTFITFFSESNFGEIGISANIQIQKLCFRLDKVISKIAKAKCKSKRRLKLAATRLRGKIKNLVDELHKKTARFLVDNFDVILLPTFETSRISKKAKRRIRSKSVRQMLTLSHYRFKQFLKHKAFETSKVVMDVXXXXPNVDTISLPF

SEQ ID NO: 35242 - protein, 580 aa, Fischerella sp.
  misc_feature (487)..(572): Xaa can be any naturally occurring amino acid
LITSCAATLGGTLDNNTTIYDKGKSLLLGYVYKLRPKQVQVVKMDNWLDMLRANYNWSLADRIDTYQQRFNRGEYCDLKTKSVAVPLTCCVSNYGASGEPWRDNGKRRSAGEIQITALPELKKVRPWYKDIDSTVLQQNIKRLDKAFENFFVGRGFPKFKNRSTMRSFTFTTGLKLDKNKIYLPKLGWMRFYNSRNIPEGFKIKSATVRKKADGYYVSIRIEDTSVPIFPVKTNSEINTVVGLDMGLGKLIYCSDGSVIDNPRFGTNKKTKRLQRIRQRRVSRKKKRSGNRRKAQQKLSIFQHRIATKRESYQWQVAKKIVKKADAIAVEDLNISGMMKRCKPKYDQTKGRFLPNGQSAKRALSRSIADASWYALISKIEYMASLSGKVVLKINPRHTSQTCSACGHVDADSRDGEKFICTNCGHVDDANLQAARNIKVKAVNQYGLILKQIRKVRQDLSKPKQLSLFETPNPESTGSKRRQHHAQXXXXXXXXXXXXXXXXXXXXXXXXXXXXXXXXXXXXXXXXXXXXXXXXXXXXXXXXXXXXXXXXXXXXXXXXXXXXXXXXXXXXXXSVGSVFSR

SEQ ID NO: 35243 - protein, 884 aa, unknown
  TnpB Polypeptide
MRIKTPSYTFELPMQTTVADERELAIRFEANRHIYNACLGESLRRLDLMRASKEWQHARTLSKGKFRTEAFKSIIAKFGFSAYSVEKFAKLCYDSCWIGNHLGSHDLQTMSTRAFDAAHAYAFSKKGRPRFRRHGELLSIRGKSNKVIYHKVVNGIHRVNYLGLHITLILDRKDKHNYQVQALKNRIKYVRIVRRAVRGKFRYYAQLVMEGIAPHKDKNIIGKDTIGLDLGPKNLAGVSSNDAILEPFCTGVDRFDVQIRLIQRAMDRSRRANNPENYNKNGTIKKGPKKWTKSRHYAKLAKAKSDLERKLVAERRREHGELHNRILAQGNVIKLEDLSYKSWQRGRYGKSVNKHAPAEFVTRLAQKAKDSGGSITEFSTRTTKLSQYDHKSKTYSKKLLSQREHIFADGTKAQRDLYSAWLARFVVDNKLDVSQLDSSWPSADMLLQRAASSKHQLATGFVLTNARNSVRVSRPLKGHNNAFEVVDVVTHRGEGHKEHAIDDSESRNKFAEVMSVCASIEPPEFIPGSMSGLIASLSTILTEKMVLHLITDLSISMINPFLPKVSFTYPPASYNSGCWWYRQELPRRYLRSSGWSAFDNRSEDADIVHIARVRNQEAINMVRQLKSQGKKVVYDIDDNYWVNDLQDTKLGTDSNRKSLLNQIIGLSDAVIVTTKPLADVVKENTGKLAHIVPNFLEPSVFGRSVSLPELGTKPILLVSGGIGHERDFELYSKLILDRRLKDFQWLIFCPDKYKSVLSGVTYWPVVDLHRYFSVISTLGRRQNILSIVHLLDVPFNHAKSRLKWMEYTQAGIPGIYSDVGEYPGHAYCTIPSSATAGQWVERIINAYEHRQAILVKDKQRLEEVGYMDTGIKYWEDIFLKVMHG

SEQ ID NO: 35244 - protein, 517 aa, unknown
  TnpB Polypeptide
VRTIKSHTRQLTLKKRQALQDIALAYTQEKSYWLEHISFSQIKMPNKVRNAAVEAKYKSPNGLQDRMWKLALQDASDTLHRHYQAYAVYLRKLVYRNKNLSDVQKHYIYWALQNYSVLEQVLSDQCPRPKFEITPVDAKHAATYLHRIFRLHEPKHPKLKLARSFTLDADCYTAFKHNSRDYVSIMTLVPRQRINLPLAGAGSISGNVRIVLDKNRAAIHNSKEVRIENNTTGPVETIDYGYTEVLTDTQETQYGTGFGEIISAYSDQQNTKDRRRNKLRSLSKNTHSSTKACRIRRNNLRQAKTERRRQRQQTTVVRVINTALNTFLRTRKPSVVGTEELSGVFKYNKGKICNRHLTSWVRGTIQDRTSFKVLACGACHETVNPAYGSQLCPSCWFVDNKNRSGDRFKCLQCKYEGHADWVSTINYLHRLQDSEIHLYTPYRQVKVILMDRYNRRLESPIETPLEYFRRVSLAATVPGRTLDTVSTSPSTDVPPEVVACESSGHSESETSKCVAHV

SEQ ID NO: 35245 - protein, 381 aa, unknown
  TnpB Polypeptide
MKTYKYRIYPNKTQEKSLVDTLHICKNLYNACLQQRIEVYQKDGSSISAYDQMKIKYQKGLNIKNIDDAYSNIRQQAILRLDTAFKNFFRRVKKGDSKVGFPRFKSVDRFNSFYYPREQGFKLTDDFKHIFISKIGYIKIKIHRGFEGYIKGLIVKRNGIGQWFVCYIVDEDIKPIPVKVKTKVGIDLGCINFAVLSNGEKIKHPHYYRKSEEKLTKFQSKYSKIKHLPREDKGKIKVKKQLNRIHVKIQNQRHDFLHKHSRDMVNRFDLICIEDLNVKSMTEDNYHNLNKSILDSGWNQFSQYLTYKAENAGKFVVKVNPAYTSQVCSSCGSLIKKELSDRVFTCDDCGLIKNRDVNASLNILSLGTKLFKQQCLINDKQ

SEQ ID NO: 35246 - protein, 383 aa, unknown
  TnpB Polypeptide
MALYMKTYKYRIYPNKTQTTALINTLHVCKNLYNACLQQRIEMYKKDGSYISAYEQMKIFRSFNIENIDNVYSSVRQQTILKLDTSFKNFYRRAQKGNCKVGFPRFKSVDRYNSIYFPAATRGFKLTSDFKHIFISKIGYVKIKIHRGFEGYVKGLIVKRNGIGQWFVCYQVDEDVKPVPVKVKWKIGIDLGCINFAVLSNGEKVKHPKYYRKSEEKMIKLQSKYSKLKQLPREDKGKIKVGEQLNRVHVKIQNQRQDFLHKLSRTIINKYDLVCIEDLDIKSMTKDNFKSLNKSILDSGWNQFSSYLTYKAENAGKFVVKVNPAYTSQVCSSCGQIVDKPLSQRIHKCDCGLTIDRDVNASLNILSLGTKLFKSSDLINVQQ

SEQ ID NO: 35247 - protein, 347 aa, unknown
  TnpB Polypeptide
METSLTIQCGIVALTKRKLQFLNDEYDNLQRFLQTKEDLGLYSANKQQAQRFYKVVKAGKEYPISVRCDLLKIKRVCNAVSEYWAKIPVKGTRKLWVAIKPHRAFPESFKICESKLCRRNGRFYFNVAVKSEVNLNTSFRKILAVDLGERTIATTVLLCNGQISHPHLYGKNVRGIRRHYAWLRKRLGERKALKTIRKVGHTEKRKVNAVLHKISKAIVEEAQRENAVIIIGNLCGIRRRARGKGKRFNRIVSNMPFYRLTTMIEYKALHKGILVVTTNEAYTSRTCHVCGCEGDRKTQGLFVCAHCGEYNADLNGAINIGRKFERDLGYMPLSGVACEPALNSNCS

SEQ ID NO: 35248 - protein, 336 aa, Leptolyngbya sp.
MSRTIVRTDKWPLQPSPEVRLHLLATVDEYRAYCKALSYVVMGHWPELVAATSFCAATEQLIHRTRKNPSPKYLYFEKRFYKFPSYLRRAAIEFVKGQVSSYLTRYRQWQSGVRQRREAKPPVFNVDAGCYPVLYKGQLVKFDAHLLRAWIKVWNGSDWVWAEVSITSKRQRHLIGSIKSPSLVISKKHCHLAVPFGIVPPKWETDVVCAVDVGINTLATASIVRPDGTVLARQFMHPASDIDRRDKQARIIRRKARKTQRLHRGFAKTPYRKGKGINANIAQQVSRQIVNFALEYGASTIVFEDLKGWRPKGGRKRSNLEAKVSRLAAPSLSYPN

SEQ ID NO: 35249 - protein, 303 aa, Leptolyngbya sp.
VQGLSLIIGVFLALETLFLGLKALTYNGFRFFQETQLKSPYLVIAKKHCHLAVPFKVIPPTWETDLVCGVDVGINTLATASIVSPDGTVWARRFIHPACDIDRRDQQAASIRRKARKTKVLHKGFAKTPYRKAKGINANVAQQVSRQLVNFALEHGVSTIVFEDLKGWRPKGGRKRSNLKQKFHGWLHRRLVSLTEQKFQEEGGKTEYVYARGTSSWAFDGSGKVQRSKTQYELATFATGKQYSCDLSASYNIAARYLADRLKLTRRKDGQVAKGKSSCATPRMPVTLSHLWDWEAADERTAS

SEQ ID NO: 35250 - protein, 421 aa, Leptolyngbya sp.
LATVDEYRAYCKALSYVVMGHWPELVAATSFCAATEQLIHRTRKNPSPKYLYFEKRFYKFPSYLRRAAIEFVKGQVSSYLTRYRQWQSGVRQPREAKPPVFNVDAGCYPVLYKGQLVKFDAHLLRAWIKVWNGSDWVWAEVSITSKRQRHLIGSIKSPSLVISKKHCHLAVPFGIVPPKWETDVVCAVDVGINTLATASIVRPDGTVLARQFMHPASDIDRRDKQARIIRRKARKTQRLHRGFAKMPYRKGKGINANIAQQVSRQIVNFALEYGASTIVFEDLKGWRPKGGKRRSTLKQKFHGWLHRRLVTLTEQKFQEEGGKTEYVYARGTSSWAFDGSGQVQRSKTQYELATFASGKQYSCDLSASYNIAARYLADKLKLTRRKDGQVAKGKSSCATPRMPVTLSHLWDWEAADERTAS

SEQ ID NO: 35251 - protein, 396 aa, Leptolyngbya sp.
MLVFSHVDNILASTDNGTIVLMKTLKFKLYEHKRNRYLKRTVNASGVIWNHCIALHKRYYRMWGKHLSCAQLQKHIAKLRKRKPFWQLVGSQAVQDICQRIEKAYQLFFKHRDKGVKPPGFKKVKKYQSFTLKQAGYKFLGGHRVKISNQVYQYWNSRAMEGTVKTLTIKRTRLGELFMFVTVEQPAEQESTSATGKTAGFDFGLKTFLVCSEGFSIEAPLFLKQGLKAIQKASRELSRKKKGSAHWERARLNLVRQHEKIAHQRRDWFWQLAHRLTHRFDKLYFEDLNLKGMQRLWGRKVNDLAFGEFLQILQWVAKKKGKVVQFIDRWFPSSKTCCHCGHVLESLSLETRYWRCPSCSNLNDRDDNAAKNIKAVGASTAAPGGDVRRAQPAVAV

SEQ ID NO: 35252 - protein, 317 aa, unknown
  TnpB Polypeptide
MEGGEKVKKSIKIRLLPTEEQEVLMLKSSGCSRFAYNWALNKCNEKYNNNEKYSIANIRKEFTKLKKEEKFKWLNEVSSKVTQESIRNLDKAFKSFFNKQSKYPKFKTKRKSKQSFYVRCDSLYFTDDMCNIEKIGKVRFKTNYSIPKNCKYSNPYCSYNGRCWVLSFSVEVEENQTALNEDLSIGIDLGVKDLATCSNGDVFKNINKTKRIKNLKSKLKHLQRSISRKYEDNKQGSKFVKTNNIIKLEKQVKQIYRKLSNIRNNYIHQTTNKIIKHYPYRIVIEDLNVSGMMKNKHLSKAIAEQGFYEFMRQIKYM

SEQ ID NO: 35253 - protein, 405 aa, unknown
  TnpB Polypeptide
VDKASRKLVKELIKEKKLMVKAIKVMLLPNNVQKTKMFQYAGASRFAYNWALAREKENYEKGGRFISDSELRKEFTRLRHSEEYAWLLNISNNVTKQAIKDACTAYRNFFKGLQKFPRFKSKKRSTPKFYQDNIKIRFSNTHVKLEGFSLGRKANKQKINWVRLAEHGRIPTDTKYMNPRISFDGLNWWISVCVEFPDCKETLNNDGIGIDLGIKDLAVCSDAVRYKNINKSQPVRKLEKQKRRLQHSISRSYEKNKKGKNYCKTHNIVKKEKLLLKLNHRLTNIRKNYLNQTISEIINRKPRFICIEDLNVSGMMKNRRLSKAVQEQGFFRFRRQLEYKCSDKGIQLIVADRFYPSSKLCSRCGKIKKNLKLSDRVYRCDCGNMIDRDFQASINLKAYGEQFAI

SEQ ID NO: 35254 - protein, 480 aa, unknown
  TnpB Polypeptide
MAGVGRFVIPDGWVAQGWRFEVETTTPVQRSLIQQHFGARRFAYNWALAQVKANLDARAADPSVPAQAWTLPTLRKAWNQSKGEVAPWWPSCSKDTYACGIADLVAALHAWSASKQGRRAGSPVRFPRFKARHRDSGRVRFDSGALRLEADRRHLTLPVIGKLRSKENTRRLVRLLTKGRARVLSMTLSEQSGRLFVSVATIVAHAPGNPREPHGRCGIDLGIGAEWAAIAHADDSIERVTHPAPWVAVQRQRRRVARQASRRIVGSRGHRQAKTKLAALDRRAANLRREAIHILTTRLARRYGIIVVEDLDVAAMTRGMGRRAFRRSVYQAGLGRVRPTLAYKTSWSGGRLVVADRWFASSKTHHGCGGYLADLTLGQRVWRCPACGQLVDRNANAALNLRDWTGPGSDRDVQRGGVAAPVPFVDDHGGQAHATGVGVKGLVRPPRGGAGQRHQNRSSGNREDWNPAEGCQSVSAHEAH

SEQ ID NO: 35255 - protein, 262 aa, Crocosphaera sp.
LAFYPQDKIKRVRLVRRADGYYCQFCISVDIKEELPLTHQTIGLDVGLKEFYTDSMGQTEPNPRFYRQGEKRLKFHQRRISRKKKGSTNRKKAINKLGRKHLKISRQREEHAKRLARCVIQSNDFVAYEDLRIRNLVKNHCLAKSINDAGWYQFRKWLEYFGKKMGRVTVAVNPAYTSQICSNCGAVVKKSLSTRTHVCACGCRLDRDENAAINILNRALGTVGHTGTWILDPNTSGDLSSTFVGAILHQQDESLIEESPCL

SEQ ID NO: 35256 - protein, 195 aa, unknown
  TnpB Polypeptide
VTEEQVIGLDYKSAGLYMNSNGKCQNMPGYFCMAQKELAKRQRKLRHKVPGSKNYRKQQKRIARVYRHISNQRKDYLHKLSTATAKQYAYVCVEDLNMRSMSNKGFGNGKSTLDNGYGMFLAMLDYKLAERGGKLVKVDKFFPSSQICHCCGCRNPEVRDLRIREWICPDCGAVHDRDTNAAINIRTEGMRLLAA

SEQ ID NO: 35257 - protein, 400 aa, unknown
  TnpB Polypeptide
MERLQAYKFQLRPKAEQESLMRRFAGCCRFLWNKALALEKDAYEANGKRLGYYELAGKLKDWKKEDDTSFLSEAHSQILQQVLKDLDRAYKNFFAKRADFPRFKRKGIHDAFRYPQGFKLDEGNSRIFLPKIGYVRYRNSRKIEGTPKQVTVSLSAGRWFVSIQTEREAPEPVHTSQSAIGIDMGVACFATLSDGSCIKPLHSFRKHEKKLAKLQRKLAKRVKFSANWQKLKAKIQRLHRTIANVRNDFLHKTTTIISKNHAFVVIEDLKVRNMSRSASGTLEAPGKNVRAKAGLNKSILDQGWFEFRRQLAYKLAWLGGKLVVIPPQYTSQTCSHCGCVDRANRPTQAKFKCTACGFECNADHNAALNILAAGQAVAACGAGRAQAPALNQEPTLGRPE

SEQ ID NO: 35258 - protein, 398 aa, unknown
  TnpB Polypeptide
MAKRVARIQLPSSKLFEELTFLAKNLYNSATYLVRQTYFETGKIMRYYSIWNNMREKEEYIKLAERAGSHTPQQLLRMVDATWEGYKEAKKDWRMNPEKYLGMPKIPGYLPKNGKFIVVWSEQQVRLRDGKVRIVEHLMKKGFPAIPIEKLNVNEANHSIVRLKPFYDKFILELVYEKELPTIKVKEEQQILGLDLGVNNLVATSDGLIIKGGVVKSINQFFNKQKAKIQKQLSKQNQWTSKRKQQLMRWRYNKIHDLFHKASQIIIRHSVRKGVTTIVIGRNKNWKQNSYMGKKNNQKFTSVPFNKLIKMIQYKAEERGIVVKLVTEEYTSQTCSCCGYRSRSNRKHRGLFVCIKCKLVINADVNAAINIAKKAFPESLNGIGDSGRVTQPTKLIAL

SEQ ID NO: 35259 - protein, 621 aa, unknown
  TnpB Polypeptide
MVKKKKLDTQSKEKVVRNDMKQRKEDNKNTDFTCIKSSWKSFCKNNLLADTIVKDILPKINTISFLSYKLLNYHFARLLEEDKPLPEIKQNLFYQSCCMVSQLKYTKDTTDTTTELYESFSQMKQYITDDLPARDYLCLGYITNLNKLQLTMTNNHLKLNFYNRFRKYLKLRTGETDNTVVYNWLKDIYEPSYDGKNVFVLYMRKWLKYIPTEVNIVKHSNHFVKIYYSILKEFEKYPDTKGVRTFTLLPHKHGFTQSHITICNAGLENTLKYIANELKRVNNDVESGLDVKKFEENSDQYWKELFNITKYETKNKKFGYTILTDGKSVVLQMRKPTQPEKIVKEYTEQQYDNFLGIDPGIRALITSYDTNDNVIQVTTREYRHKSKMIYACKKRENWYKKWVHYEEWKLIPTIKTSKTIVMKEYFKYVFPRMQTFTEFHMEKGFRNLNFTSYCRSKATLAKICERISGGKNRKILVGFGDYSQQHGLVKSHPTTPILRLKRELHKYCRVVDIDEYKTSKTCSSCNKEIELYRNRIQRKKMGVLEPIAKLSNIHSVIRCKHNECKLCCMDRDINASKNILGLLLGQYRSEERPVCFSPEKIVVKPRKSDKRAKACNSPLLT

SEQ ID NO: 35260 - protein, 604 aa, unknown
  TnpB Polypeptide
MPSQPRTYATQFAPSSAAGEALVGYAQVFSQAVRTAYSALERAARTGQPLGQAAHKLELAHRFGLTSRQAGSVLVEAQGRRDGQLELQAMNLDDARSGLARHKAKAARCAEQLAAHREGTTLRLRPKKAARVRSALFHASTRVQALTAAIARLTPRVAQDRTSMTFGTKKLARQRAALLIALEQGLEAPDVAEQQLAEVDAAWDLRRNGQFLVVGSRDETAGCQGCICTVGADGRFDLAVKLPNALGGERLVLPGLTFKHGAAQLRHALAQPARRAAALKVEQAKCDKARADARARGEDPDVRLAPTDKEREAGKEPKLRYPPKPSGKVVLGGAALTWRFMRQADGRWEVSFTTDVVGPEVVTDLARGAIGIDLNSGFLTMAETNAHGSILSSVVVQTPEIGLDANQRADARGCAAKVVIARCLRTGKPLALERLDFRKKKQSLAQRSPGSKRKLHALAYNNIQELLRSRALDAGVEVIDIDPAYTSTQGWVCYAAARGWTVHQAAAGVIARRAQGFSERAPVSGVMRLPVAGTAVECEVPAETSRSDVSKRWPLLHRCASQAIASHHRQRRRAADPAARTGESVVLGEGPKLNRTRHGPRCAG

SEQ ID NO: 35261 - protein, 658 aa, Actinoplanes sp.
VKRAFKFRFYPSPEQASELVRTFGCVRLVYNKALAARTEAWTLRQERVNYNATSALLTAWKKTGDLAFLNEVSSVPLQQALRHLQVAFTNFWAKRVKYPTFKSKKRSRQSAEYTTSAFRWRDGRLTLAKMPAPLDIMWSRPLPEGASPSTVTVSQDAAGRWFVSLLCDDRIEQTPADGAVGVDAGLDSLLTLSTGEKVVNPRHERADRKRLARAQRAMARKEKGSKNRAKARLKVARVHARITDRRRDYLHKLTTRLVRENQTIVIEDLTVRNMVKNHSLARSISDAAWRQFRTLLEYKTDWHGRNLVVVDRWFPSSKLCSTCGALAQRMPLNVRSWTCPCGTVHDRDVNAARNILAEGLSVTACGGGVRPQRESSRAGQPTVKQETPGRPRELPVLQAGRMSSERRYAPGTPPPGENGPGRSSRSWRLILNARQPAAVLFDMDGTLVDSEKVWDIALHELAGRAGGTLSPAARQAMIGGSMSVSMQILRDDLGQPERPEAPDVEWLTNRVLELFSEGLVWRPGALDLLHGVRFAGLPTALVTSTGRELVEAALDTLGRDNFDVVVCGDEVVMPKPDPEPYRTAATLLGVPISECVAIEDSPTGVASALASGATVLAVPAELELPPTDGVHLRTSLVGVDPDYLAALLVNRGLLPTDH

SEQ ID NO: 35262 - protein, 364 aa, unknown
  TnpB Polypeptide
MKVQKTIKVKVVGLTRIKRQILDHEYEGLQRFLQGDPSIELYSANKQQAKRFYKRIKPEREYPLSIRKDLIRVEHRNTKLSRYWVRIPVKLRRGGVWVAVKPHCEITDDLEICESKLLRRNGEYFLHLVVKREVELKTSYSSVLAIDMGIRHAACSVDTQSGCTHFYGGELRRVRGHYFHLRRKLGEKKLLKVMKRIGDKESRTTDDQLHKIAKAIVDEAEHRNAIIAIGNPKGIRHNKKGRRFNRKLNSWPFWKLRQYIEYKANWRGVQVIEVNEAYTSKRCSKCGEIGVRSGNHHGLFECPRCGLKENADRNGAFNIGRRALGQVSKVGAVVSQPVTGALPSTELGSFVQFSTPEATLFKGW

SEQ ID NO: 35263 - protein, 532 aa, unknown
  TnpB Polypeptide
MKGELNMTRNNETTPTFVVKVLLDLKANDYRSVEKSMNVANSIYNDMLSEGKKRINRLRADENYWKLIKDYNDAKEHNEKRSKIKDKAKKAKVPVIDTKPISTSINNMVKSYGLSQTDFETFLRDRRHNLDFYKTLSTPEIQVIAKQAFDTIKNAIYFKSKIKNLKFKSKYKDSSFRNKRNDTGLKLIENESDKYAYKLILGNKHEINIKRNAFTTYQQNCMLRAEKIKYVQIQKSKIKGKFRYYLVIYLQGTPPTKHTVGTGVVGCDNGVSTLAYVSDKKLELVDLVPEKCLRIEEGIKRLNKQITHKFRLLNPECFDKNNKVIKGQKMTNRSNNLTKLMNRVQKKQRKMRIYRNELQNKVCNDLLSQGNVIQLEKMNVKALQKRSKNIRINPKTNRPYSKKRFGKSILKASPSSLVTLLKNKAASRGAKVIEINTKDTKPSQYNHILDDNVKKTLNIRIYDLSDEYPNVQRDLYSAILNKYTIQHTKNDKVTYTIDKTRLTNEFETYYKLMQSEITKIRNENKRLSWYVS

SEQ ID NO: 35264 - protein, 439 aa, Pseudomonas sp.
MHLTHKIALRPTADQADYFVRACGTARKVWNWALDEWGKQYAAGGKPTAMVLKKQFNAIKYDLYPWLKDIHRDAHAQPFAHLATALSTFFADVQAGRRGHEPRFKKKGRCRDSFYVANDKFSLDGKRIRLPKIGVVAMTEALRFEGKILGATVSRSADRWFVAIQVDVPEHQAQRRRTAHGTVGVDLGLKSVATLSSGESIQAPKPLRAALRRLKIRSRRLSRKLEAAKMAAGFTLGARLPKGTQLPVSNNRRKSTATLARLHRRIANIRVDFTHRLTTTLCRENQAVVIEDLNVKGMLANDRLSRAISDVGFVLFRQQMSYKVLRYGTRLVVADRWYPSSRLCSACGWKNEALTLKDREWTCADCGTCHDRGFNAACNLKRLATETALPVARPTGNGGAAAGRVLAVAGKVTPVSDECGQQGASGQEETAEHLCSPFR

SEQ ID NO: 35265 - protein, 378 aa, Pseudomonas sp.
MMKRAYQYRFYPTPEQADLLARTFGCVRFVYNTVLRWRTDALFNERQKIDYTQANARLTAIKKLPELAFLNEVSCVPLQQCLRHQQAAFKHFFEGRAQYPAFKKKRYRQSAEFTTSAFRYRDGQLFLAKCAEPLAIRWSRPLPSAPSTVTVSQDAAGRYFASCLCEFMPETLPVTPKTLGIDLGLKDLFVTSEGERIGNPRHTAKYAARLALAQRRLSRKKLGSANRAKARQKVARIHAKISDCRMDGLHKLSRRLINENQVVCVESLAVKNLIRNPALSKAIADAGWGELVRQLAYKGEWTGRQVVAIDRWYPSSKRCSTCGHTLNALPLNIRRWACPACGCEHDRDVNAAVNIKAAGLAVLALGENVSGIGQVPLS

SEQ ID NO: 35266 - protein, 382 aa, Pseudomonas sp.
MKTKRAYRYRFYPTPAQEVLLAQTFGCVRSAYNTILAWRTQAYESEQKRIDYKEASAQLTVLKKDPARSYLNEVSCVPLQQCLRHQQQAFTNFFEKRAGYPAMKSKKYRQSAEFTASAFTYRDGQLFLAKCKEPLAIRWTKGRETLPSMPSTVTVSRDTAGRYFVSLLCEVETPPLPVSPRTTGIDLGLKALFVTSEGEQIDNPRHTAKYAARLAKAQRALSRKQRGSKNRAKARHKVARLHAKIADTRRDDLHKLSHRLIHENQVVCVESLAVKNMIRYRSQSKAIADTGWGELVRQLEYKAAWTGRQLVKIDRWFPSSKRCSCCGHTLASLPLRVRDWTCPACGSHHDRDLNAAINIKAAGLAVLALGENVRGIGQVPLS

SEQ ID NO: 35267 - protein, 438 aa, Pseudomonas sp.
MHLTHKIALRPTAAQVDYFVRACGTARRVWNWALDEWVKQHAAGGKPNAMALKKQFNAIKYDLYPWLKDIHRDAHAQPFAHLGKAWSTFFADIKAGRRAHEPRFKKKGRCRDSFYVANDKFSLDGKQIRLPKIGAVAMTEALHFEGKVLGATVSRSAERWFVAIQVDVPEHQALRPRAGHGVVGVDLGIKAAAITSAGDAFEAPRPLKAALRRLKIRSRRLSRQLEAAKAAAGFAPGARLPKGTRLPVSNNRRKSTATLARLHHRIANIRVDFTHKLTTKLCRENQAVVIEDLNVKGMLANDRLSRAISDVGFGLFRQQMAYKAQRYGVRLVVADRWYPSSRLCSACGWKNEALTLKDREWTCADCGTRHDRDFNAACNLKRLATETALPVARPSGNGGATAGEVPAVAGKVTPVRDECGQQGASGQEERREYLCSPF

SEQ ID NO: 35268 - protein, 401 aa, Lactobacillus sp.
VIKFNKAEHLMLLTYQVEIKPTEKQTWQIDCHIGGSRWAYNLFLDINRQRYEYGYHYMGAYEFSKWFNHEYLKSNPDDRWIKDLSKSVKQAFIDADIAMKHFFKKLSGFPHWRSSKRGQGSYYFVKDGKTQIIPCQRHRIKLPKLGWVRLKEFGYIPTDADHFVIKQGRVKFKAGRYYLTCLVEQNELPKLELTGEPVGIDLGLKEFAILNDGTLYPNHNKSSRIRRIRKRLRTLQRKMSHQYHALKARRQKEGKSATDLNLAKTQRKVQRLYQRLTNIQSDYQNKIIATVVRAKPRWVALENLNVTGMMKNRHLAKAISYQGFYNFRLKLIDKCQQLGIPVHLTNRFEPTSKVWQRCGHKKVDLKLKDRVYECQNCDYTEDRDINAALNIRDTENFELAY

SEQ ID NO: 35269 - protein, 438 aa, unknown
  TnpB Polypeptide
MLEVHRTHRAKICNHSQVEDSLDRHGWSASKLWNVANYHSRDVWEETGEIPDHKELKDELKTHPKYKGLHSQSSQRVLEELAEAFNSWYSSDDDRDNPPGYRKENYYDDEGRRVHEEHPRSTVTWKQNGIRHDTKNNRVRLSKGANHKEHPKAWEYILVEYETRPGVEVENLQQVRAVYDSAKGRWELHLVCTDEIETPTAPGTETAGIDLGISNFAAVAYSTEEADLYPGNRLKQDGYYFPKEIAKCDDSGGDRATRLHHKWSERRSHFFHSLANHIVERCVENGVGQINLGNLEGVREDENGESKNWGKHGNLDLHGWAFDRFTSILEYKAKVEGIEVLEVSERDTSKTCCVCGKEDESQRVERGLYVCEECDAAFNADVNGAENIRLDINDESNSESAPSLGGDRSTGWLAQPGVYLYDLSRGFQPRTEVVDSKP

SEQ ID NO: 35270 - protein, 264 aa, Microcystis sp.
LTSSPFKNRPQLGAYCLEIVYEQPSLSSQEGERYAFIDLGLNNLAAVTSNIPEFQPTLVCGKALKSCHQKYNKTLAKLKSELPSLQKTSKRIQGLTLKRNCQVDYYLHTASKYIIDKLLAHQLNLLVIGHNQGWKQNINIGDRNNQSFVNIPHSRFIEQLIYKANLVGIEVKTTNESYTSKCSFLDLESIQKQKSYLGKRIKRGLFRSSSGYFYGADINGSLNIGRKVVGEAAFSGNPIERFVVNPVRVKAYKANSRCNICVQN

SEQ ID NO: 35271 - protein, 386 aa, unknown
  TnpB Polypeptide
MYEAGYKYRLYPTAEQENYLARTFGCVRVVFNHALQARQQHYTDHGKGLSYGDTSALLTQWKRQDGYAWLSEVSCVPLQQALRHLQAAYTSFFKGIAMYPRFKSKRRRQSAEFTRSAFRLGGDPGKPSVYLAKCARALKIRWSRPLPEGSDPSTITVSKDPAGRYFISFRVLCAPKVLPTITKSIGLDMGLVHAVITSDGQKIDHPRYLKKALSRLKREQRSLCRKQKGSINREKQRLKVARLHARVADLRRDCTHKLTTSLVGRYDVICMESLSVKNMVKNHHLAQAIHDVAWGEIRRQLRYKCRWYGRQLVEIDRFYPSTKTCSFCSYVLPEIDRACRAWTCPSCGVVHDRDVNAAKNVLGAGTALLASGLGVRPLPVMSGKAV

SEQ ID NO: 35272 - protein, 232 aa, unknown
  TnpB Polypeptide
MPQGIAVGIDMGVARFATLSDGTFYAPVNSFKRHETRLRKAQQALSRKVKFSTNGKKAKARLQRIHARIGNVRRDFLHKTSTTISKNHAMVCIEDLPVRNMSKSAAGTIEQPGRNVSAKSGLNKSILDQGWFEFRRQLDYKLAWLGGWLVAVPPQNTSRTCPCCGHVSADNRQTQARFACVECGFEENADVVGAINVLRAGHARFACEVSDAVGSPAAGTHRSDSGAARCRA

SEQ ID NO: 35273 - protein, 555 aa, unknown
  TnpB Polypeptide
MVSSQSTTISVKIPINWQIMSPRAKERLRRILGRDTRAIRAFLGVIEQHEDSLLTGKRRNKVDESGLDQLTITTNRGTSHRLSVPHDLKARFPRASPNELTECRQTAVSLYESYLSQKTNKRKSVCRPCKKSHSSRIPRWMFLSHVFSIVHKQDSSTRWWMDLRDSLDTAPLRSRRHDRLLIPIKVSPFHETQMKRGEIKAGQIYSDYKARWWLTLAVRVTSPLPVSTPKPLAVLGIDLGIRKAACTTLVTPEKVRETRYLVERDKLLAIKRYDELFAELQHEMESRRSNGQESDKFAMKLRRLRRKRENIAKEYDRILVRNLLDYVLELSREYTLYVALGRLQNIREVARRGNGKGPLFRGMIHSWAFARITNGLKHQLLQWGWQVEGKDSRFRTVSEAWTSIVCWKCGSKGRRPRQNFFVCPSCGHKTNADRNGSINIAGRLIMLTDSLRSVRGLGKWASSADAAQSQRPKAQGISSRGKSLLPSENVASRSKESAVVRLVQRDLPSFGDESGKSDYDLTVVRAVENPSAAGNDAARQQQRKETRTVGGTQSQ

SEQ ID NO: 35274 - protein, 389 aa, Nonomuraea sp.
MDLLIVCSIVKLVVQVKLLPTPQQAAALEATLDAANRAANLVAALAFQRHCFRNFDLRKHAYDRIKAEFGLAAQAAQHVIKKVCDAYRTLHANLAAGHLGKPGSPRRARIEARPISFRPRAAQPYDDRCLSWQHDARTVSIWTTAGRLKGVTFTGSSQQLALLAAHRRGESDLICRDGMWFLHATVEVADRPPSEPDGFVGVDLGIANIATTSDGVRHRGRGLNAVRHRHRRLRRRLQARRTKSAKRLLKRRRRREARFAANVNHIIAKSIVTEAERTGRGIALEDLQGIRERVRLRKPQRVTLHSWSFHQLGAFIAYKAVRAGVAVMVVDAAYTSQQCSHCGHVDKRNRPDQATFRCTSCGFAEHADVNAARNIASRGETGWAVSHAA

SEQ ID NO: 35275 - protein, 362 aa, unknown
  TnpB Polypeptide
MNKAYKFRIYPNNEQQVLLAKTFGCVRFIYNKMLGEKIAYYEDTGKNLKTTPARYKSQYEWLKEVDSLALANEQLHLETAYRNFFRDKKTGFPKFKSKHKGHNSYTTNLVNGNIVLDDGFLKLPKLGKVKIKRHRVIPDNYHLKSVTVSQTPTGKYYASILYEYDTDIKEAILENVIGLDFSMNELYIDSNGIIPEFPRPYRTMQAKLAKEQRKLSKRKKGGSNYRKQRHRVALIHEKTANQRKDFLHKRSRQIANAYDAVCIENLDMKAMSQTLNLGKSVSDNGWGSFTRMLDYKLNEQGKILIKVDKWYPSSKTCSHCGFVKDELVLSERTFRCDNCGFALDRDYNSAINIKAEGIRLLA

SEQ ID NO: 35276 - protein, 334 aa, Nostoc sp.
MWGKHLNCGKLQAHIAKIRKRNPFWQSVGSQAVQDVCQRIEKAYQLFFKHNKKGVRPPRFKKVKKYKSFTLKQAGYKFLGSNRVKIGQKVYQYWKSREIEGKVKTLTIKRTPLGELFLVVVVDDCFEPEVKSTTGNIAGFDFGLKTFLTCSDGTKIESPQFLKQSLNAIKIVNRHHSKKLKGSSNRERARKNLARAHEDIANRRTDWFWKLAHDLTDRFDVLCFETLNLKGIKRLWGRKVSDLALRDFLDILEWVASKLGKQVVYIDQWYPSSKICSCCGHVLESLDLSVREWRCPVCQSVNGRDENAAKNIQTVGASMVGLGDVRQSETAIAV

SEQ ID NO: 35277 - protein, 140 aa, Bacillus sp.
LYIVVILLLSEVQLMLVNKTYKFRIYPNETRNIAIADNKIKLPKLGLVQFAKSRILHAMIRRNPSGKYFVSILVKTKVQRIFSKRMKGSSNWNKQRVKVTRIYEHIANARADYLHRLCTEIIKNHDIIGIEDLQISNMLK

SEQ ID NO: 35278 - protein, 425 aa, unknown
  TnpB Polypeptide
MEYSPKYRLFPSTEQRESLDWTRNIVRQVYNHALHEFNKIPEDEGTLRQRVWQVRDDLPSLKQQWTDLKQVYSTVLQKAVERIRTNINNLGKLKAKGYNVGSLNWKGPREYRSFTYRQSGFELDKKSGPRDRAILRLKKVRDETLEIPIRYHRDLPEHDAIKELTVKKEPTGAWYASFCISTKQPEKPDVDDIDVEDTVGLDLGVLKFIHDSDGRAIDCLDLPEERERLEREQRSLSRKQYESRNWEKQRRRVAKVHARMSNKKRDYKHKIAHFYATEYDAVFVEDLNVKAMLEGDGNARNKAEVGWGDFRHILEHHCDKHGTHYVEVNPRGTTKECASCGVESEKPLWVREHSCPSCGFETDRDWNAALNVNYRGLSELGVVHSEATPVETATAVDLAQRESVSASRVVEAGSSALKEAASAVE

SEQ ID NO: 35279 - protein, 529 aa, unknown
  TnpB Polypeptide
MIFNPKKQKDAVFCQYFLTNTTDARRMYNTANFYIRNTMTGIKKSPELRTPNEVEVLHDVFTGIQKANKAKDSKYQKDLEKYNKGLLDKHPKKPKHFPYPTTKEWFLTYNVLDAVFKYTNNEVYYSMNSQLNQNAIRKIVAAWKGYFKILKDYQKNPSKYKERPNMPGYLRNSQYVAWFSNQTAKYSVEKDGRAYLRFTKNKDLFCIGKASLYIGLRYVKTEIKPQHGCYLILVTFDDGIELPKVPEKPKRVIGIDPGVDNLAAVVNNFGVHPFLIKGGAVKAANQRFNKKRASLFSAVTTGSDSRHSVKNSHSLSALSRKRDDLLRDIFYRAAWYICRFAVRHQVDVIVIGHNKDQKQEINLGKQNNQSFVSIPFVRFEQILTNTAAKCEIPVIVQEESYTSKASVLDGDVIPTYGINDDYAYFSGKRVKRGLYRSADGTFLNADANGAANVIRKKYPDAFDGQNLKYLCETTNVVKFTDLYPGAKSSCQEHYNGKRHESSPASKARHRYRKDTRLQYRILFGKSKYV

SEQ ID NO: 35280 - protein, 417 aa, unknown
  TnpB Polypeptide
LYSQQTIDFIGFVKLREVKINILIYKTITVPVKCNKSDYNYLMQCNKYSATLWNNCIKADQESKEKYNKYLTRSELQLLMKKSVPYITANSICIIILKYITARDAMWRSIKAKHENSNKVKLPYKEKKYFNTDWNYPVIKTNKENNYLTLSKPLLSNNKKQKPLKCHLKNIPDNIVEIELIYRDGLKLAIKTKQENDNVLIQSNNESAIDLGEIHSITSIDNNENAIIITGRKIREIKQLRNKHLGKLKSRRSKCIKDSRQYKKYSKAIWRLKYTTDKKILNIIHQTTKIYLDYCLKNNISKVYYGDLDSCTRNTKKEKRGGKFVHQKLSQWNYGLLIRELMNKLTRYGIQLVKVKEYYTSKKCPICGVLNKPKGRNYMCDCEYIMHRDVNGAINILNDNSRYKIIRYRNLKYLQIA

SEQ ID NO: 35281 - protein, 412 aa, unknown
  TnpB Polypeptide
MPAIFKDKMLVRGIVFCLESDLPLEARSLLEDFRLAVNNAIRAGLQARVTSRNALCRLAYNDSRKEHPKMYSQHLVSAFEVAGSVLKNHRKRFRKGVTGRIPYVKRLMMKAENQAYKLDRKTGVIDLPIRAGCHVALRLVVSEYHRKYLDDTTLTLGSLTVLPNRVIVAFRKDAPKPYTPGSVMSLDTNEGSLDGVFVEGDIAKAVKADFQDVAIIQRRHHDRRRRLQKKKAHDRRTMRRLTRREGAREHHRIDHRLHQVADTVLRFAEGRRSAIVLEDLKGFKSKRSKELNRRLSMWPRRKLHQIIEYKAQWKGIPVVKVDPRNSSRTCPICRRIQDSRMGAEFACECGWHLDRHINASINLLQTAISNGMAGGLRFNPGAFQHDVMMILYEPAMAARSEPNGTSGIVGVT

SEQ ID NO: 35282 - protein, 414 aa, Moorea sp.
VRHQAVKVRIYPNQEQVHILAQHFGCARWWWNYALNKCIETYRETGKGLSRAALNSMLPKLKKEKETEWLKDCYSQILQSVSLNLSRAYQNFFEGRAKYPRFKSYHHRQSIQYPQRVKHVGDCLKFPGKLGTVKAKIHRSLDGEIKTVTVSRTPSGKYYTSVLMEYESDGQQPSTDGKVVGIDLGIKDFAITYDGEKTSKFGNPRHLARYQKKLAKKQRIAARKKKGSNRGKKARIIVAKVYERIGNVRQDYLHKLSRKIVDQNQVVVVENLNVKGMVRNHKLAKAISDLSWGTFVNFLSYKCQKEAKMLVEIDRWFPSSKTCSNCHYQIKELPLDVRAWVCPSCGTHHDRDGNAAKNIRAEGIRMLSSSGTGEVNASGEEVRPRRGRPSKLRHSSVKLEASTSPKGDATRTTK

SEQ ID NO: 35283 - protein, 225 aa, Cyanobacteria sp.
  misc_feature (135)..(145): Xaa can be any naturally occurring amino acid
LTDEAPDPIKSGNVIGVDFGRRSIAVTSAGDEWDGKPIKTVRDKFANILASIQKRASKGTRSSRRRCRQLLKRLSGKEQRFQSWLNHNISRAIIDQAKSQSAIVAIEDLTGIRDRTNTQPRSKTERRRSNSWAFXXXXXXXXXXXVEVVAVPPQYTSRTCHQCLHIGCRSTKVFKCTNCCWHGDADFNGSMNIAAIGAVVSLLRGSETLSCLISSRDLGLLKAPG

SEQ ID NO: 35284 - protein, 415 aa, unknown
  TnpB Polypeptide
MLKAIKVRLYLDKEQEVYVSKLLGCYRFVYNNCLAKKIESYKTDKTSLGLKDLGKHFHQDLTNEFDWLKEHNTKVLKQSIINMLDAYQRFFKTKSGFPKFKSKHDNISSVRFPEEAISSKNDFLSNRITLNKQLKSVKFKTSDKYHKYLNKYQSGIRSATLTKTTTGKFFLSILVNSDEIIKRKEPINDFIGLDLGIKDFIVTSTGEVFENIKTIRNNSRSLKHLHRQLSKKVKGSNNKTKARLRLAKKHEKLNNIKQNYLHSITNSLLDENQIIVIEDLNVKGMLKNHKLSKAIQELSLYKFKQILKYKAEWSNRNVIEVDRWFPSSKLCSECGYKYSEMALKEREWTCPQCGHKHHRDLNAAINIENEGRRLYKEQIGIRNPELTLVDYQEKSNLFEDRLKQENGIYEIYSFS

SEQ ID NO: 35285 - protein, 452 aa, unknown
  TnpB Polypeptide
MANLTVTRTYVGSIQNHRQVSDGLDSLGDSASKIWNVARWTAGRIWDVTGEIPDEGVLKSCMKNRSCWKDLNAQSSQKVIEELSDAFQSWFDLRHKFDEANPPGYRKHGDTRPRSTVTFKEDGFKHDPENNRVRLSKGSNLKEYWSDFLLCEYQTRPDIDLSEVNRVQNVRAVWNGDEWELHFVCKVELETNDSAGDEVAGLTLASRTSPRSRSRTNTFSTPVTRSKKTSTTSNEPSTTPKVRTPPEKSMWARRKLADRETHFYHVLTDTIITECVERGVGTLAVSWPEEVRESDWGKTGNKKLHSWAFDRIYQYLAYKGEIRGVEVLKENEWNTSKTCSACGDTTKSNRVERGLYVCSSCGLVGNADCNGAENMRQKITRVLTARIGVTAVWHSHRHTCSTARAGCFTRESKSCRRPANIPPAVREARRSRRGGCHQYRFGESDLSLTCSR

SEQ ID NO: 35286 - protein, 568 aa, unknown
  TnpB Polypeptide
MKNAAQIGFSIPNTFTIRLNKVSDEVDAVLHRMMRRQRSAVRVAYNQFREGKSSEEVYARVRALFPEMDSYEVSSIRVEGAQTLTSQKALLPTYRTYLQKQITKLEKKQKRNHDKNRADKLRRIIRKLEETTAHIEHDTVKPAVFGGRKLLKQVERGVKGAKEQWKFERSNQYFLSGDKSAETGNQHFGLNVVSDRQVILSVRLTGTKQWLELPAEYSHNQKNLAFLFSQTHYRKAVRLIRIAPGQYKAHITADEHVTGKEIFGKQPATGEFVCGIDLNLDHLTASLTDKDGQFRGFRVFKHPNLGELPKNKSEQKIFALAKQVVDWCKSKKVATIVLEDLNIARSSDQSTTMNRRTVSFEYRQLHDAIVRRGQREGLDFKQVNPAYTSWIGELKYQTQFGISRHIAAAYVIARRGLGMKEALPQEFLAVLPKMAEEYESKNAKARSEKKKVKYTDRVKTLREWKKNSPKTTKHVWKLWGVLLNYYKEHKSEARATHAGCGNANGRTYLASLPSSGGNTPPVLRFGTVEKPPDGDLFSFKVWTTQGLLTLTGDTPDPLAVDWVGIVPV

SEQ ID NO: 35287 - protein, 436 aa, unknown
  TnpB Polypeptide
MVEGLIIRRGYIFRLRGNAQAEAKLRRFSGCCRKVWNLALAEQQARRERREKYAGYVDMAKWLTAWRSDPATAYLSEAPVHALQNTLKSLDEAFRRFFKKQGGYPKFKRYGEPVGVRETDVDCFAVDQANGRVRLPKIGWLRYRKSRDIEGTLKIVTVTRQLDGWAISIMAESQSDSRVPEATAIGAADRGITNFLATADGRLVAPLNAHKKSLHRLRRYQRTVARKIEAAKVAAGIPKDKPFPKDFKLQPSRRLRKAQARVAKIHQKIARQRSDFLHKFSTEIASTHAVYCIEELKVRNMSASAQGDAESPGRNIKAKSGLNRSILDQGWSMWAGMVEYKLRWRGGRLIKVPAAYTSQRCSACGHVHADNRKGEKFRCRECGHEDHADINAAKNILAAGHAVLAGENTGHAIVEDAAQQGRPVKRLPAEGLRYAA

SEQ ID NO: 35288 - protein, 358 aa, unknown
  TnpB Polypeptide
MRRAVKVSLDFATKSKRKQINNLLTTYRVAVNFYIKKLWNGKGSLNKETLALHQNTRLSERYKSNALKQALEMVSATKKSGKALGRKASMPVFNGSAVLDSKFVSVQDGLKSFDLVVRLSTLRKQRRITIPTRHTKVSRKWLSIVNSKLIQGCCLSDNKLTLFVDVPDLLPKTNGRTIGLDMGVEKLISDSDGNFYGIDFKKIRDKILRKKQGSKAKRRAYTERKNYIGRVINSLPWEAVQTFVVEDLRGIKRGKNPKRNKNFRKAMAPWVVRQVVARIENKASENRVHLIKVNPSYTSQTCPDCRTVNKENRKGENFKCVTCGYTGDSDTVGAHNILVKTLDSVGSLKSPMLKKKLG

SEQ ID NO: 35289 - protein, 365 aa, Escherichia sp.
  misc_feature (85)..(116): Xaa can be any naturally occurring amino acid
  misc_feature (348)..(351): Xaa can be any naturally occurring amino acid
MKQQVSFKFRLKPDGQQERQMRRFAGACRFVFNRALALQNENHEAGKKYIPYTKMASWLVEWKKDTETEWLKDSPSQPLQQSLKXXXXXXXXXXXXXXXXXXXXXXXXXXXXXXXXEVSTPVHPSASMVGLDAGVAKLATLSDGTVFEPVNSFQKNQKKLARLQRQLSRKVKFSNNWQKQKRKIQRLHSRIANIRRDYLHKVTTTVSKNHAMIVIEDLKVKYMSKSAAGTISHPGRNVRAKSGLNRSILDQGWYEMRRQLEYKQLWRGGQVLAVPPAYTSQRCACCGHTAKENRLSQSKFRCQVCGYTANADVNGARNILAAGHAVLACGGMVQSGRPLKQEPTEMIXXXXIHALRGVEDVTLPL

SEQ ID NO: 35290 - protein, 547 aa, unknown
  TnpB Polypeptide
LSRACSIKERIRHHKKPLHYPISAARSLLLPRIITCDPLQVQRSDMLSSWDSRSQNFPSEIISSLASRAPDDIYLTEIINHGVRFLMSDRFILELKLRTELWQEHKLLKRLDAARQFYNAALTECLNRLDGMRDTKAWRYARKLPKGSEKTKAFRELRKKHELRKYDIMNLSAAWSDTWINEHVDSQTRQTIANRAFDATEKYMYGVRGRPRFKRHGELRSVESASANKPLRWKDDGLYWSANRGRNKIFIPAIIDEKDPVVKHGLDHEIAFARLIWRKEFGENVFYTQLCLKGKPLKRFERGRGTVGMDLGPSMIAVVNEEESYFEKFCSEIEDISKEKRRLKRKLDRQRRANNPDNFNKNGTIRKGPKSWHQSNRMLETRKELQEAERRLAAHRKDLHGAMTNWLVQMGDTIKTEKISYKSWQRSKKPFRLSRSVRDRAPGMFMEMLRRKADTYDIDLEEFSTYSTYLSQICHRCGQKKKKTLDVRIHSCDCGVEAHRDMYSAFLARFVEDDKLEVDRAEKAWSGAHNLLQAASSKYKPREHSSE

SEQ ID NO: 35291 - protein, 511 aa, Acidithiobacillus sp.
VHPHENRVLSVRFEAGRQLYNAVLGEALRRLDLMKQSRAWAAARKMPKGPPKSAEQKDRAAAFSLIAGTVGFTDYGLQAYATKCKNACWIGHHLDAHTTQKIATRAFQAAQRYQFRAGGRPRFKPKWKSLESMEGKSNATGLRWREDHLEWAGLSLKAIFDRKDKHGVQAFALQYPVKYCRLLRRTIRGKTLWFVQLVIAGAPKWKEKNPIGQGKVSIDIGPSTIAVVSETDAFLEKFCANVPDMQKVIRRLQRAMDRSKRASNPDNYHPDGTIKVPEKGERLRWVFTQGYFRLRSRLKELQRRLAAYRRTEHGRLANRVIATGNTVMAEKLSYQAFQRMFGKSVRDRAPGGFMNHLRRKAASAGGEVIEFPTRTTKLSQSCHCGDVVKKPLSQRWHDCSCGAHAQRDLYSAYLGLHVRQEHGAWKLDTESAREGWCAAESLLEKAVSGVVQAANGGPLPASFGIRARDRAALSRRWNDAVGGPGCCTHAAVSGMARARKTSASSTRTPRL

SEQ ID NO: 35292 - protein, 358 aa, Hassallia sp.
MLLSIKTKLKLSADQQIIMAKHAGVARFTYNWGLAAWNNLQKDGLKPNKYILKKFFNNQVKPEYLWIKEKGICQKITQYAFDNLGNAFDRYFKGLGQKPNFKKKGRHDSFTIDAGGKPIPVGGKLIKLPTIGWVKTYEGLPHTTCKSITISRTANCWFIAFAYEQEYEPTLKQYDAVGVDVGVKELATLSTGVVFPNPKNYKKNLQKLKRLSRAFAKKVKGSNNRYKGKIKLARHHAKVANLRKNTLHEITTYLCKNHAKIVVEDLNISGMLKNHKLAQVIADCGFHEFKRQLEYKAKKFGCQIIVADRWYPSSKTCSNCGHIQPMPLKERTYNCGNCRHSIDRDLNAAINLSRLAKA

SEQ ID NO: 35293 - protein, 394 aa, Hassallia sp.
MLVLEYKIKGKKQQYAAIDDAIRTTQFVRNKAIRYWMDASREAKVDKFALNKYSTELRKEFTSVADLNSMAVQSAAERGWFAISRFYNNCKSKKSGKKGYPRFQKDCRSAEYKTSGWKLHSTKRRIKFTDKKGIGTLRLLGKWDIQSYDTKDIKRVRLIRRADGYYAQFSIGIDAVDIQPKTGAEIGLDAGIESFYSDSNGHHEPNPKFLRKAESSIKHSQRRIYKKVKGSAGRRKARKVYAKKHLKVSRQRIEHAKRVARCVVKSNDLVAYEDLRVSNMVKNHCLAKSISDASWYLFRQWIEYFAVKFDKITIAVPPQYTSQKCSDCGIVVKKSLSTRTHKCVCGCELHRDVNAAVNILNLGKQARDGQSRSNAVGVGISTLIGENLLEQILT

SEQ ID NO: 35294 - protein, 392 aa, Hassallia sp.
MYAIKRELKLNNKEVSLLRGISGFKRFVYNYGLSLLIYSWDFENVKATDSKRIDAIKKVFTQVTMQKPENTWMKKYPSTVYQSAFIDLKSAFSRWRRNEAGFPVKKRKRKGDSFTVYKTSGIYPEKGNPALPFTNRVVINEKTRITLPGLKTFRLKEPINYTCSSQTFTVSRTANKWFVSFANNAEKLPPLIHPVEKIGVDLGVKSLATCSDGSQYSMPLTTKQAKIKLSKIQWHNRSKVLGNKKLGVKASKNALDFYSKVATLHARIANIRQDTTQKMTTDLSRKAYVIRIEDLNVQGMIANQKLAAAGSNNTLQEIRRQLTYKQAHYGTKVELVDRWYPSSKMCQECQHIQPMKLSERVFKCSKCGVSQDRDANAAINLERAPDSKVRLA

SEQ ID NO: 35295 - protein, 411 aa, unknown
  TnpB Polypeptide
MQFNENKGGFSMYSTPAIVSDPQRANPAPMEYRKNIFRNYSYPLHPTKKQAALLRERMRQRDDFFNKCAKVATSGALLGRPISEIENQINTLPCHYAALSNPAFCRALKGVRTNMIKLLHKLQTGTINWISPRSNTHLRKSLTFLSAKTSEQYTDLPTIGAIHTTFYRPLPANYRLCYVTVVEDCYGASFHITFTILYPCFFPAAQPVLFKNAIGLDYKQDGGYITSTGESGNFVHFREKAEPKLRRHYQAASRHHRGSRRWKKHMQRAAKCEKHIVNQRKHMHNILANRLARQYDAIFVENLDLASMKRDYPQLAKKINENAYSSFLRKLEHTCCVRGKSFIKVDHWYPSSQTCACCGKHIGKLPLEKRTVICPFCGTQIDRDHNAAINILKEGFDYYQKRTLQQSNYAS

SEQ ID NO: 35296 - protein, 257 aa, unknown
  TnpB Polypeptide
MKITCAFQYELYVDETRRAALSRNAGCRRFVFNKALGIQNERKSKGEKLLTYKELAHELVLWKKQPETAFLREAMAQPLQQALLDLDRAISDSFRPKSDPAHKGWPKFKAKDIGDGFRVPQFAPEHIDDANGRVKLPKIGWIRYRRTRAIAFECANGTLVPGVVKQIHVKKDCGRWFVIFTVEFEVLAPDMKALDVGIDVGVVHAVATSDGRFYDLDTEKIRSIEKRIAGLKRKLSLNQESRKKLAKLGLAEPFDKK

SEQ ID NO: 35297 - protein, 490 aa, unknown
  TnpB Polypeptide
MRRALPLKAYKYRIYPSDAQAVFFAKTFGCCRFVWNRMLDKKLQAYKKKERIPGVTPAEYKEEFPFLKEVDSFALCNVQLQLEKAFKDHFRNRKQFKLPKFKKKRDKQSYTTNNTHNSIRVDFERGLLYLPKIRGGLKIELHRRFEGKIKSVTISRTSDGKYFASILVETENPRNKVVEPKSKACGIDLGLEHFVTVTNDFGSYKVEHPKYLHRGAERLKRLQKSLSRKQKDSKNRERARLRLAKQHAYITNARNDFLHKLSKAIIDENQVVVVEDINVKGLLKTRLAKSVADSGWSKFLKYLKYKADWYGRTFIQVDRFFPSSKLCHRCGYKNEDLALHDRTWCCPACSEIHDRDVNASINLYFVGLGRPEVKPVERALVDDRSPNGLPKKPSRDEAGSSTVKVEQSATRPISTIVNKNAIISFVSARIISWGIRLVTSTSSFWKVTSTSSFWKGKSILVKVYLQRDFVLFLLSISAASSIITASKRRK

SEQ ID NO: 35298 - protein, 537 aa, unknown
  TnpB Polypeptide
MDKEGLKVLKEKKSNSNFVTVECLLAFDKDEDKERVLSTIRKFSSMVRFAYKRLLDGAERKELKKLLSRKYGINTRYSDDAILLAKQTLESCLEREQNPKKLVFGSRELFEQLKKKHLTGKSREKLRQKWEERRYGILQSRGDKSKEGNLNLRLVNLNNQWHLRINLGSGEYVWARVIRTAKRKTDKWTGFISSLEHAEKTGDWFPYTVRLKLRNGKIYAQFSKEENLPEVTITRDNGVIGIDINAYPFHLAIVHTAKDGNLEKYERISLDKLLEGSSEKREYLNWQIAHQVVEIAKRERKAIVVENLEKLPKGKRGDGLPKLRQKLQKWIYKALLQKIEIVARRNGIQVIKVNPAYTSIIGKLKYAPLHNIDKDTAGAYVIARRGLGFKERLPNNYRKLLQDKEFLSYSVAKVEDKIAKLRKEIEAEKNEYKRNKLRSDLRRLKGELRLLIQSLLDSGESESASQQTVNRKMERVRGRVQALQKSWQVLSVALAFSCLESLRDLSPLKRVILTRDWVGAAKRNGLVPPYLVRGRIH

SEQ ID NO: 35299 - protein, 386 aa, unknown
  TnpB Polypeptide
MEKIARCGARGGKLGIAEGRMIKTFKYRMVPTRKQAAVLQHTLDLCRFLYNCALEQRRMHRIGYYEQKRQITQVRAEFPEYRDIYGHVLQRVVAKLDLAFQSFFRRVKAGQKPGFPRFKSRDRFDSFAFNNRGFKLAGRYLQISKIGAIKLRLSRAIPERAIIKSLTVKRTGQNWYACLAVEYMPEHLPESLSAVGIDMGIENFAALSDGSFIANPRIYQSAQAEVRRAARRVARRKKGSHHRHRAVQLLRKVHEQIANRRSDFLHKESTKLIQKYGTIAVEKLNIKGLARTIFAKQVQDASWARFLQMLAYKAEEAGRRFIEVDCSYTSQTCPECGIIKKKPLSEREHNCECGCRMHRDTAAAKIILGRIDPSGANEEALSSCVA

SEQ ID NO: 35300 - protein, 308 aa, Enterobacter sp.
VIKKQAFKFRLEPNKSQSSDFFMFAGSCRFVYNKALALLNDNYHSGKKFMGYNQLATELVEWKSEESLSWLKASPSQCLQQSLRDLDRAFRNFFSGKAQYPKFKKKGRHDSFRIPCQRVRVDQDKKMVSLPKVGWVKYRKSREIIGELKNVTISMKQDKWYISFNTESMVPDPMHPSDIKTKIVLSDQCEFPIRLDSSMDSSHQLDEVKKLARLNRILIRRIKYSSNWLKTKGKIDRIKARLARCRLDNIHKVTTAICKKHAVVEVLSLMDSVSDKNDITLSMRYEFVRQLIYKQEWLGGEVIRRELA

SEQ ID NO: 35301 - protein, 407 aa, Leptolyngbya sp.
MVLRAFRYRFYPTPEQEGLLRRTLGCVRLVYNKALAARSQAGKERQEKVGYRETSKMLTQWKQEEDLQFLTEVSAVPLQQGLRHLDKGYSNFFTGRAKYPRFKKKRNGGSAEFTKAAFRWRDGSLYLAKSQEPLDIRWSRQLPKGAEPSTVTVRLEPSGRWHVSILVDDSTIKLLPQSEKSIGVDVGITHLAITSDGEKVENPRYLTKHYKRLRRAQKSLSRKIKGSRNREKARRQVAKIHEQIKDARSDYLHKLTTRLVRENQTLVVEDLSVKGMVRNRKLAKHISDCAWGELVSQLDYKCQWYGRTLVKVDKWFPSSKRCGHCGHIVESLPLSVREWTCPECGTVHDRDINAAKNLLAAGHAVTACGASVRLEGSRSGEQLRKTQKRKKQEPKLQGLGITVLLGR

SEQ ID NO: 35302 - protein, 365 aa, unknown
  TnpB Polypeptide
LKGQCGRPKRKPKTDRGSIYLTREVFRFDRCEDGNLRLFVGAKTNNIGYLSFKSHGKFEIQNSLYISKECGHYSVSFCYENGKDESELSSNAEHLAFLQGSTKEYLEENTIGIDRGVKIPVHAGFQTFDFSDNQKKNMLREDLYIKILQRKLARQKQGSNRRNKTKYRISSHHAKKANIRNDFAHKTSRLIVNNKTKVIVFEALKISNMTRKPKAKQDDQGQYVSNKAKQKAGLNKSILNVGWHIIEAYTKYKAYQAGKAVFKIPAPYTSQECAKCGHTHPDNRKSQDLFVCGDCGNTDNADHNASGVVKKRAINLILDTGTVLSDDGVLQLKSDSGRGGNRKTSRAKSSTRSTQRNVKKEELVA

SEQ ID NO: 35303 - protein, 407 aa, Leptolyngbyaceae sp.
MRTAYQYRLRPTSSQIAQMSEWLELLRRQYNYRLAERFNWWEDNRCDINACSIVHKASPPPKEQPDFYSQKRDLVNSKRLFPAYQDIHSQVLQNCIERVKKTFDRWLKGDSSGKRSGKPRFKGKGRYRSFTFPQVKQDCINGKFIKLPSFGKLKLILHRPIPDGFKIKTATITQKADGWYVILSLEDASVPALTPDTPAIDNTIGIDMGLKSFLMTDEAEEVAIPQHYRKAEKHLKRAGRSLSRKKKGSNRRKKAIRRVSRLHLKVANQRKDFHCKTAKKLLSKGKNIGHEALNIKGIARTRMAKSTHDAGWGQFLQILSIKAERAGLMTIAVNPGGTTQNCSGCGQKVPKTIQDRWHSCPHCGLELDRDHNAAINIKYLAVGHPVNKAQATPDGIPGVTEKPALYA

SEQ ID NO: 35304 - protein, 379 aa, unknown
  TnpB Polypeptide
MLRAIKVRLYPNKAQEQTLQKVLGSYRFVYNHMLARKQDAYKSDKTNLGLAQLSKYFHHELLKDEQYDWLKEQNTKVMNQAIRQMLTAYDMFFKEHNGFPKFKSKRDKQSALFPIGAISRTNAFETRYISLTTQLNSIKFRCSDLYFKRLQKYKDNIRSATLSKTKSGNFFLSILMDIPQNEFVNFNKTSRDVGIDLGVKDFVITSDGDVFENKHFYKKDEKKLAKLQRQLSKKRKGSSNFHKQCKRIAKVFETITHKKDDYIHSVVNYLLRHYDTIYMEDLNTSGMLKNHRLAKAIQEIGFYKFKMVLSTKASQNDKKVVLIGRFYPSSKTCSQCGYIHKGLKLSDRNWQCPKCVANHDRDFNAALNILYEGRRISVA

SEQ ID NO: 35305 - protein, 180 aa, unknown
  TnpB Polypeptide
MKDNSLETRIEAMLAGSRSNLKKLKRLGCSHSRKAKGGKNRKKAARKLARQHARIAHIRSDALHKATAQIVAKTKLDSERPKSIVIEDLNVSGMLKNRKLSRAIADVGLYEFRQQLTYKAEQAGSAVHVMSRWYPSSKTCSGCGWIDHDQTLSDRTFICHECGIVLDRDLNAALNLAASA

SEQ ID NO: 35306 - protein, 439 aa, unknown
  TnpB Polypeptide
MKQIISAKLKLNTTPEQFNALRKTQLAYRDALNHVSKHAFEHGKTSNTRKLQSDCYGEIRALYGLPSQMACNVPRQVGATYRGLWTKAKKNAADRASGRTKKRYKGLDQAPKYVSPTVTVNYKHDYNFKKDRHIGFLTVDGRLTIPYTGYDKHVALIQKGADIGAAKLWYNKAKKQFYLLVSLEIEKPDQTPEDHKSVVGVDVGLRYLAVAATTREESQFFPGKQIRAKANHYARLRKRLQQKGTRSATRRLVVISGRERRLKADANHVIAKRIIQRNPHSIIGLEQLTDIRERTTRRKRTKNGKKVSTKQRKANTAYSKWSFAELQGMIAYKAALNGCMTIKVDANYTSKACPKCGYTDDKNRPNHGLLFDCQSCHYHLHSDLVGARNIALRTLLVRQDWMSTGVLSERPDVSDREAKAARLLRYAGLRWSPDTSPCL

SEQ ID NO: 35307 - protein, 398 aa, unknown
  TnpB Polypeptide
MTLKAFKYRIYPTEEQSVFLEKHFGACRFVYNYFLDLRSREYKEKKRSVSGFECKRMLIALKKDNEWLKDINSQSLQEAVLNLEKAYQRFFAGLSDYPVFKKKRNHQSFTVPQHFSIDGNLFYIPKLKTGIQMKLHRPIDGIPSSLTISRTPSGKYYVSITCETLMPEVKHKPAATIGIDLGLTSFIATSNKEKVDHPACLRKSEKKLARLQRSLSKKKNGSNNKNKQRLKVAVFHEKIAYQRNDFLHKLSRKIVDENQAVYLESLNVKGMMQNRHLSKSIADSGWSEFARQLTYKGEWYGTKVVQIGRFVSSTKTCCICNAVNHDLSLKDRVWTCPSCKTVHDRDINAAIVIKKVGQDMPDIKPVEKRASILSFKRKGKPASVKQEAHVKMHGVSTP

SEQ ID NO: 35308 - protein, 383 aa, unknown
  TnpB Polypeptide
MIGYTVKIKFKSVEDELKMKKVLQLKQDLFNYLSEFIFNRDKIYNNQFKLHKDTYRDSRKLYPELKSQYIIKTEQDVIAKYKSAKSNKHRLDAPVQSNRLYCQLDKRLCTVRSDFKSIKITTCEKQIELDITLYKKFEQLLLTYKTSSPTIFYRNKQWYLSFSFYNDKEFVENNECLGVDLGLNRLIATSENYIIKGNKYNAVKRRLRYNIKCLQSKKTRSAKRHLRKISHKEYHFSINYCHHIVNHILKTYANTIVLEDLSQIKQKNVNKGTKYNNRISQAPWRMIRFMLSYKASALGKKVEFVKPFYTSREDYRGLPNGKRKGCRYYAADGTVLDADVNAANNIMLRYNKHSVPCSALDGQATVNWPIVIGKQARLQASML

SEQ ID NO: 35309 - protein, 462 aa, unknown
  TnpB Polypeptide
MGQTTRTTKLLLDFSGRSQGGANPGKREHLAATVEILNAARRFYLDFFLAHPDKLTERVKVSSKKTGEVREGVISADHLLTWAEFQTIETAEHPDPLPDWNFSKAFPDFPTRYRRSVIKDVIGKARGYLTTLLKWQRSGKKQGKPGIPTASNHPTLYAGTFSLDLDELDLRKSFIRLKVYTGEAWVWVHYPTWYNRYFDLRRAEPGWETESPKLILGKQSAAIHFLQSRTITAKKIVESKRDPDLVTVAVDLNVKQLAVITVRQHGVIQETRFVSDHGLDHHRYQHLGRVAKKQWQSGKAVKGERSNQQLWAHVRRQHGDCAHKTARAIVEVCEKYPGCVLVFERLRTIKPSGGSKSRRLNRKQANQLKGKINQLAKEKAYAIGVVSVEVNPHGTSQYCARCGCKGVRFTSQAGQRVIGKGGKLFACPACHYECHADFNASCNVHHSFFREFHWEIRARKSG

SEQ ID NO: 35310 - protein, 215 aa, unknown
  TnpB Polypeptide
LTIQREVPGPVIDERPILAIDLGERYLATVCGSNGINPQFLGKEVRGIRRHYGWLRKRLGERKLLSIIKKVGPTEQRKVNDICHKVSRQIVNQAKETGSVIVLGNLKGIRKKAKGRRMNRIVSGMPYYKLTQFIKYKAAWEGIPVVVISKAYTSKTCHRCGCLGSRPCQGLFLCHSCGLRYSADLNGARNILKRAGEYISSAGAALAQPVTQVRT

SEQ ID NO: 35311 - protein, 424 aa, Acrocarpospora sp.
VRLRYNYRLYPDASQRQTLARLFGCVRVVWNDALAKRKAARKAGLPWIGGGDLQKICITAAKRTPEREWLGEVSPVPLQQSLRDLDQAYRNFFDSVSGKRRGPRMGLPVFKSRRDRRQSARFTRTAFRLPGDGTLYLAKIGKVEVRWSRELPAAPSSVTVIQDAAGRYFASFVIEVQDAGQVLPNAEAEIGIDLGLTHYAVLSDGTKIANPRWLRRRARRLARLQRALSRKQKGSKNRERARIAVARQHAKVADARRDFLHQTSTAIIRENQTVVIEDLAVRGLVRGRLAKSVSDASWGGFRTLLGGKAARYGRRLVTVGRWFPSSQLCPCCGWRNGKVPLEVREWDCPSCGERHDRDLAAALNILAEGIRLREQVAVASPAGGRQDMVAAGLADTRNDCRGRVRPGEAIPTLAPPATYDAQAA

SEQ ID NO: 35312 - protein, 405 aa, unknown
  TnpB Polypeptide
MKYNYRYRLNPSDDVAKRLAWTLDTCRQVYNHFLHRLNRTSNTSAYSEITHLPALKACWPEWKKVHSKVLQRVVQRLYHNLSRLNGLKQNGHRVGRLKWRSPRDYRSFTYSQSGFKLKNTSGRSRLWLSKIGNVPIVLHRDLPEGTEIKEITVKREPTGNWYACLSIETPHNPPSKPERPVRVVGIDVGILKYVHDTDGRAVESLDLSDERARLRHAHHRLSRKEYGSNNWESQRTTMARRQADLKRKRRDFLHKLSAYYAREYDLVAVEDLDTRSLIELPSTSRARTDAAWGTFLRMLEQKCEREGTHFIEVSPVDTTTECSKCGVKTDKPLWVREHACPACGFETDRDANAARNILNRALTRLGMGCPESTPAETALPVETLVPAKRVVETGSPIPTQNQYGA

SEQ ID NO: 35313 - protein, 486 aa, Escherichia sp.
  misc_feature (282)..(285): Xaa can be any naturally occurring amino acid
MSTGLRFTLEVDGLPPDAFAVVSFHLNQSLSSLFSLDLSLVSQQFLSLEFTQVLDKMAYLTIWQGDEVQRRVKGVVTWFELGENDKNQMLYSMKVHPPLWRAGLRQNFRIFQNEDIKSILGTMLQENGVTEWSPLFSEPHPSREFCVQYGETDYDFLCRMAAEEGIFFYEEHAYKSTDQSLVLCDTVRHLPESFEIPWNPNTRTEVSTLCISQFRYSAQIRPSSVVTKDYTFKRPGWAGRFDQEGQYQDYQRTQYEVYDYPGRFKGAHGQNFARWQMDGWRXXXXNSFQKNQKTLARLQRQLSRKVKFSNNWQKQKRQIQRLHSRIAYIRRDYLHKVTTTVSKNHAMIVIEDLKVSNMSKSAAGTVSQPGRNVRAKSGLNRSILDQGWYEMRRQLAYKQLWRGGQVLAVPPAYTSQRCACCGHTAKENRLSQSKFRCQVCGYTANADVNGARNILAAGHAVLACGGMVQSGRPLKQEPTEMIQATA

SEQ ID NO: 35314 - protein, 394 aa, unknown
  TnpB Polypeptide
MPRNSSTQRAENGRIIQYTTLKVRLCPTEAQAELFEKTFGCCRYIWNRMLADQQRFYLETDAHFIPTPAKYKKAAPFLKEVDNQALIQEHNQLTQAFRVFFKHPEAFGYPRFKRKKDDKDSFTACNHVLESGPTIYITKDGIRMTKAGIVKAKFSRRPQAWWKLKRITVEKTRTGKYFCSILYECAEQAPKIITPTPETTIGLKYSMPHFYVADNGETAGAPHWLKRSQEKLANMQQKLSRMQPGSKNYQEMVQKYRLLHEHIANQRRDFIHKESRRIANAWNAVCMQSAALPELSRALTRGNVLDAGYGIFQKCLRYKLERQGKPLILVDRYAPTTRTCSVCGQVGEEVPLASKVWTCTQCGTVHQKQSNTAQNIKTQGLAQYFNRQAQKKSA

SEQ ID NO: 35315 - protein, 452 aa, Streptomyces sp.
VPRVPPTTGLSVGSRRRGGQRKAEETYGVLEAELTEWRPWSLPSLRKAFNAAKHTDARFAAWWEENSKEAYSTGLANAAAAFDNYSKSKRGQRKGKRVGAPRFKPKRKTRRACRFTTGTIRVESGGRHVTLPRLGTIRTHEPTVKLLARVKNGTARILSATVRHERGRWFVSFQAEVKRDLERVARPDTAVGIDLGVKTLAVMADSTGEIRTVANPGHYDAARKQLRRVSRTVSRRQGPDRRTGRKPSKRWEKANAVRNRVHHRVANLREDALHKLTTSVAAEYGTVVVEDLSVAGMLRNRRLARRIADAGFGEIRRQLDYKTRQHHATRLVVADRWYPSSKTCSGCGAVKAKLPLHIRTYECDACGLVIDRDDNAALNLAALAAACSTGTGVAGDRGTPKRVSKPRGADRKTRATRPRRMTEAGRAGGATLPHQRQTETRDRTQAEALTLW

SEQ ID NO: 35316 - protein, 441 aa, unknown
  TnpB Polypeptide
MKLTSSYAVEIKHISKLFRQTIKIYNDAISFCVKAFEEHWEVLETLDTGNKERFAYADALVHSTKSNDAVYPEFDIKFRKMPSYLRFSVINTALGYLSSYHSNLDNWKFSNSDGKAPSLQTHLNKLPTFYKGNMYLDDCDGDAVRLKLFVNNDWNWVTVLLKHTDVINIQRRMQNAKMSVPTLEKKNKKWFLRFAFEEKVDLNKTKLEEQRILAVDLGINTDATCSVMNIEGAILAREFINFASDKDQLYHTLNKIKKVQQRYGSNNIQKLWRYAKFHNEELARKIAKQIVYVATKYQCDVIVFEHLDTKGKKRGFKKQKLQMWKKNTIQKIVEHKAHKNGIRVSYICAWGTSKLAYDGSGVVLRGKNADLDTYELCKFSNGKVYNCDLSASYNIGARYFIREVQKILPAKVWSDIVAKVPECQKRTQCTYNTLLEINRVV

SEQ ID NO: 35317 - protein, 427 aa, unknown
  TnpB Polypeptide
MYGCQQDLIKNSEVLPFLEYLCTTANKLINCGIYLARQWYFKCGYVVGKYDLEKQLKANQNFKFLFAQAAQQTLRGVAESFKSYKELSKKYCKGELENRPRLPNYRKKGGLGVITYPKQALRLKEGVGTLHATSVRIPLGKKVKAAFGVDAFLLPFPSNLDFNLIREIRILPRNGCFYVEWVYKLETEQIELDKSKVLGIDHGLDNWLTCVSNAGTSFIIDGKQLKSVNQWYNKQIATIKENKPQGFWSKRLSRITEKRNRQMRDAVNKAARLVVNHCLENGIGRIVFGWNTGQKDGIDIGGKNNQKFVQIPTAKLKECIKQLCERYGIEFVETEESYTSQASFLDDDFLPTFGAKPESWKPSGKRIKRGLYRSGNGNLINADCNGASNILRKVAATLRLCLEGVSSGALTTPVRVHFWAACESPSL

SEQ ID NO: 35318 - protein, 461 aa, unknown
  TnpB Polypeptide
LRGKRRGGAYHQQRHRYDLRRRFGERRAGDHHGVLGAAVRQPLVQEPEAVRWPKAGCGGRVMLIAHKIALDPNNVQATCFARAEGTARFAYNWALAEWQRQYEAWKADNTPPKPSQAALRRQLNSIKAEQFPWMLEVTKNAPQMAIIQLGAAFKNFFAGRAKYPKFRKKSIRDRFSLTNDQFSVDGSRIRIPNLGWVRMRETLRFTGKIMSATISRMADRWFVSITVDTPDDSHLPKAENQGVAGVDLGVSALATLSTGEVITGPKAHKALLSRLQRLSRGLSRKVKGSENRKKAKVKLARLHARVGNIRRDALHQLTTDLTRRFHTIGIEDLNVRGMVKNRHLSRAVSDMGFFEFRRQLEYKAAQRGGIIVVADRWYPSSKTCSDCGHKLETLPLAVREWACPACASVHDRDVNAAINLRNLAVSSTVSACGEEGSGLGRKLETKPASVKQESSSKATYG

SEQ ID NO: 35319 - protein, 419 aa, unknown
  TnpB Polypeptide
MILCACFYIDKTEWFEEQFLYSRHLYNQGRYVINNHYKEHKNFISQTELNRILRNYEPEFNNYRNLCKAKLSQMILIHLCNNYKSYFQSVKDYKVNPSKYKGEPRLPKYKDSLNPLYFDYQSVKIRDGFIVITKDVKVHIPTNVYRDEFKSFKTVNFIPKGRKIKVVISYETAEIRSDLDADKYLSIDFGMNNLCACISEDGCFLINGRPLKSINQIYNKKSSELKERRPKIDKKYQDKRVNRIKLESLSLNRELRINSYLHNCTTYIVNFCIEHKIGTIVLGRNKNWKDSISLSKTVNQNFVGIPFYKLMNMLAYKCKRMGINFVLQEEAYTSKCDALAFESIEKHESYKGSRIKRGLFKSSVGKLINADINGALNILRKFLNSTKETSEFSVLQKIIGSGLVFRPVRITGNGIEAKL

SEQ ID NO: 35320 - protein, 250 aa, Streptomyces sp.
VGERDDPGTIGRRVQRLCVERGLTQRQLAEPAYTPAYVSTLESGRVRPSDDALRHLAGRLGVAFDELATGRSARRVTELRLRLTEAQRVFAVGEAEAAAEQYAELLVEAETYGPPGEQAAVVKSARGTVENPGKNVAQKSGLNRSISQEAWGRTVTMLTYKAARHGGTLHKVPAPGTSQRCSMCGFTTPGSRESQAVFGCKNEDCGWSGNADHNAARNILHLYRTGRALIPAAGRAVVRRARRVKPATAR

SEQ ID NO: 35321 - protein, 312 aa, unknown
  TnpB Polypeptide
VYSKKVSLPTYKEKDGRNLLVFTNQAISKPLLRDHNIIKFGGTIETTIHTKQNTIQQVRVVPHGNDYMVVEVLYNKPEQQTKTDNHRYMSIDLGINNLCTLGTNCKEINNIIINGKPVKSINQYYNKKYAKYKSIQSKCKDAYTNKLRTLRITRENKLNDYLHKTSRYIVNHIVSNNINTLIIGYNKEWKQEINIGKVNNQKFIQIPYIKLVNQLQYKCKLEGINVIIQEESYTSKSSFIDNDFIPTFKSTTELNYKFSGKRIKRGLYKSSSGMVINADLNGSLNILRKAVPNAFDKCYGIEVGSTPKVITL

SEQ ID NO: 35322 - protein, 463 aa, unknown
  TnpB Polypeptide
MITLKLKYSCEDSCDQDLILKYMKQYTHVFRVAYNKLYNQEKVKQVDLLKLNHIDLLDSWWIASAMIDAKMLYNRFKTKKIIFGGKKNFLKRCKHQIDKETFNLNRLSGLSSIGEKKSGTKSVHGNRKFKLTTDLKQVTLKLKDKKINLNLIGNYSKNLLYKLSQVYKHQISDDTPLTYKIDTNYIYITFDESTVLSSKLNLTYVTTNRVLSLDLNPNYIGWSITDWKSSSEFNVIKSGVYSFKNITDKIQDLKGKGFNSESEIRKHLNNKLEYETYQVVKNIIKKAIYYKVQLIGIEDLSIKSKNLSKGRYLNGLINNKWLRNKFSTCLEKYCNIYGFKFQKVKPEYSSFIGNFLFRSLNLPDMVLSSIEIGRRTYEFYNQYITKLNKIQKNIIQPNLKDFNSLCIKSLEEFNMQNTEFKDLKDLYYIFKNSKLTYRVPIPSNVQVFRFNSIKSAISIIYYN

SEQ ID NO: 35323 - protein, 379 aa, unknown
  TnpB Polypeptide
MLRTIKVRLYPNKQQEQTINELLGCYRFVYNYMLALKQQEYNDNKINLSLNDLSIYFRRTLNGEHPWLKKQNTKVMIQSIRQMLTAYDNFFKFNKSFPKFKSKKDKQSALFPIDAISRRNTFTERKITLTKSFKDIRFRCSDLYFKRLQAYKDKIRSATLSKTKSGKYFLSILMDISQDLYIKFKQTGKSVGIDLGVKDFVITSDGDKFENKHFFKKEEKKLKKLQLQLSRKVKGSNNRNKVRIKLAKAFEHITNKKENYIHSVVNELLMKYDTIFMEDLNVSGMMKNHCLSKAIQEVGFFKFKSILHDKALTNNKQVVLIDRYFPSSKTCNDCGYVYKDLKLSDRFWHCPKCGETHDRDLNAATNILVEGQRSINKNI

SEQ ID NO: 35324 - protein, 420 aa, unknown
  TnpB Polypeptide
MLRSIKIRLYPTAHQATQINRLLGSCRVVYNQTLDRKINQYKEHNISENRTTLSYWFHHELLNNPDFEYLKEQNTKVLNQSINDMITAYDRFFKLHTGYPKFKSKHNNKQSCRFPCDAISKRNIYTNYKLSLTNIKNIKFRCNKKYAEYLQKNKANIRQATLSKLPCGEFYLSILVDGDLTHKGVKDTNNYIGIDLGVKDFVITSEGEIFNNLHFKKNEIHKLKKLQKQLSRKVKGSNNRNKARINLAKVYNKINDKKQYYLHQVSNSLINENQVICMENLNVKGMLKNHKLAESISEMNFGEFKRILEYKARWYNRKIVFVDRFYPSSKTCCHCSYKFKDLKLSDRFWTCPQCGTHHDRDINAAVNILNEGLRIIGSSTTEFKLVDYPTMDGDSVMDQKSSDRLKQEVNKEQNSNLFKF

SEQ ID NO: 35325 - protein, 1009 aa, unknown
  TnpB Polypeptide
MTIWKAKAEKKKEELTKRYCEKFIEDLPISQAAKDELQPKCEVGFIKRPHSKIFEIMGDCIDETDTHEDFQKCMGSKSLNPKSVLYIKPVTPEVLEEIGVCESESLKATDKPTEQEFRSWCYAGINPPKVEFNKGIRDQITKDISDTSKLILTSSATEQSFHTPLQAVKKTGMGKKDQVQDMTLPSTHTITITKIFGLEPCDEGNTVTPQTFSRFEIVTNHLIRAGASLHDNVFKRKGGKAAKDFYDITRKTPSMDALWQWRDTQSFQLKERAWRCAAQPAYFALRDYKTRLHLLHHFIDTLQSLPDATLIFDSKFPQNVIFSAVYSTLPQLGMKLTKGQVSRVYLGNVLRWMRNLVKRGFRTKYGQVVATTFNSQPNPPHLAYELAHWLARDLPKFLDAYLRTLSRRLTWQVKRTLHSSRKTLPKNKTGASIRHILQRNILSMKTLDVKSWERARKSWREETKEILEGEFKSIDVATLATHAVQEGQTGLTPERIVNLLFNFRSRRIKLGAGELAEFKAYLVHRAVTELEYRRISLLKPRLAPTVQQILNNLLVEPRAWLKLPHFQKQTIPFGADDTRVYHDEDFKDLYILACHKQGVTIEEIIHNLLRKQIFKRGSEKYQKKMEETREYIEKLMNFDKKNNWLENIKKRNVPIRLQLRLEVRNPMWFELRTPKRFLKLVQTGYAPQKATLLKKRGGGLILAIPFEKEVPKSQCLGRSDLTLIQDPLIIAGLDPGLKTWATLSIGIRDKLVAGVWGQAGQEIARYFYDQKQYGERRTEWFKPLKNKMNPPDYKNGKFPNLKRRLTNLQRELRRCQSERDEYRYACRRKGNDYRHKQKFFELNRRVKQIWDSISALHDELTRQIATCILAACEHHRVNILRIEDLRWSKPSKKYEVNYFLASNQIHWFFGQIQARIADLAPRKGIFVEWVKAKYTSSRCSKCGHIGKIKAERKKARKGKIFKCPECGFQLDADLNAARNIRVAPISKNIPPSLYAWGGGSPYNPLSDDI

SEQ ID NO: 35326 - protein, 353 aa, Acinetobacter sp.
MKTLKLRIKDKHSKILEQLASEVNFVWNYVNDLSFKHLKRKGEFLSAYDIAEYTKGTSRLCGLHSQTIQAVTEKLVIRRKQFKKTKLKWRVSHKKSARRSLGWIPFKKVAIKYADGHIQYGKYQFKIWDSYGLSNYSIKTGSFVEDARGRWYVCLVVNSPKIEKSTATNLIGIDLGLKDIATCSDGTIISNPKFYRQYEQKLGIAQRAKNRKRVRALHAKIANCRKDHLHKASTMLIKKNALIVVGDLSAKKLVKTKMAKSVLDTGFSAFKTMLKYKCENAGVWFEEVNESFTTQMCSCCGEVTASSPKGRADLRIRVWECENCSSVLDRDLNSAKNILALGHKRLAGGISSI

SEQ ID NO: 35327 - protein, 213 aa, unknown
  TnpB Polypeptide
MEETYQIHENFLYLENKIFRGMDQIKQLRIYPPEKGSCKIIVVYEVPDQEELPQNGHELSIDLGLHNLMTCYDSGNGKTFILGRKYLALERYFHKEIARVQAQWYGQQSGKGVKYLATSKHIRKLYKRKHDSVTDYLHKVTRYLAEYCREQGITCVIAGDIRNIRREKDLGHRTNQKFHSLPYNRIYIMLEYKLKRYGIRFIKQPANKKSRLN

SEQ ID NO: 35328 - protein, 368 aa, unknown
  TnpB Polypeptide
VILSKKIRCLPTPEQLIKFKKSAGTSRFIYNLMLSENKKSYNEYLKSDIKEKSPFISGYDFGKHVTQLKKTSKYSWLSEVGGKVAKQACLDCNNAFKKFFKKLSGFPKFKKKGVRDSFYVNYETFKRTPEGFKGERLGNVRTAESLPKADNYYNPRIIYDGKYWYITFGIDVSEKVNENNNGKTLGIDLGIKTFVTVSDGTAIPNINKSKKPKLVYRKIKHFQRKLNRCKKGSNNRIKVVKKLQLLHRTLRCIRSNHIHQATTMLVKTKPAKIVIECLNVLGMLKNRKLSRAISEAGFHEFARQLEYKCRLWGIEFLKADRFFPSSKLCSKCGCKKDKLKLSERTYHCEHCGNIMDRDLNAAINLSYL

SEQ ID NO: 35329 - protein, 416 aa, unknown
  TnpB Polypeptide
MKLSFKFKPDFSHKQLAIVKELSWHCSKLYNTFNYQIKNNEAVKPIYTKLENNFKDNWHTKYLHSHNRQQLLKQLAQDWKSFFNAIKDYEKSPKKYNGKPRPPKFKYLDRNPSEIIFTNLAVRVRKNNLLLSLSKEIKSEFQVDSLKFKLPSVVQSLINLDNLQQVRIKKENFSGDWYLIIIHKVAEKENASGDNVMAIDLGLDNLATITLKDNPEGYIIDGKVIKSENRYYNRKITRLQKIRMKQVGSKHFKDTKQIKSLRLKRRNFVADYLHKASKKIVELATENDVSTIVIGDIKEIKQNNKHNKHFVSIPIQRLKDLIEYKAKLEGKKVVFVNEAYTSGCSAIDEESISKADYDKSRRIKRGLFKTGNKVINADVNGSLNIMRKHLKNGTPKMVKQIRDIGEVATPERLRVS

SEQ ID NO: 35330 - protein, 394 aa, Anoxybacillus sp.
MIKTYKVMLLPNNKQKTKLFQCAGVARWAYNFALAQEQENDKQGGKFLGDDHIRKRLTQLKKTKEYAWLNQYSNNITKQAIKDATTAYQNFFEGRAEFPQFKTKKRTRPSFYQDTAKIKITHTHVKLEKLTTSRKKNKQKLNWIRLAERGKIPYGKHVKYTDPRVVFDGLHWFLTIGVEEGEVKHEAYTEGMGVDLGVKNLATVSNGRTFKNINQMPKVKKLEKSIKQLQRKLSRKYEMNKIQTKGGEYRYRKTKNIKKLELLVLKKRRRLKNIRLNYTHQITATLVKAKPAYVVMEHLNTSGMLKNNKLSKAIQEQTFHEFKRQMTYKCAWRGIKFVVADRFYPSSKMCSNCGHVKEKLSLSERTYRCEACGMEMDRDLNASINLKNYAKSMV

SEQ ID NO: 35331 - protein, 405 aa, Oscillatoriales sp.
VYYHASEFFEVMEQILTLVVRLDVSQAQPELLVGTSLAFASACNWINQTVNPNLTNRNSIQAVCYHDVKTQFGLTANHVVRACARVAANRLTAKHKGRKVKHFKPTSFDCDSRTFRFIEKIWSVSISTTSKRVTLPLVASNYHRGKLTGQNPTSAQVCLHKDGNWYAHIQLKSEPSKIEASDKVIGVDLGRRDIAVTSTGQSWSGKNIQQIRDQYNRTRASLQKKASQGTRSTRRRARNILKRLAGKERRYQTWLNHNISKSIISEAKPSQSIIAIEDLTGIRERTNSQPRNKTERRRSNSWAFYQLRSFLEYKGIKEGVQVIAVNPAYTSQTCHCCLQIGRRNNKSFQCSNKVCGWIGDADLNGSLMIALVGLSVSQPRGSRLLSCDLNLRATESPHLLEDKCG

SEQ ID NO: 35332 - protein, 208 aa, Bacillus sp.
MPRFKSKKNRVQSYTTKQTNGNIGIVGNTIKLSKLGLVRFAKSREVEGRILHATIRRNPSGKYFVSIFVETNVQEVPKTESTCGIDVGSKDFAILFEGTTYTNPKFFRTLEEKLAKAQRILSRRTKGSSNWNKQRVKVARIHEHIANARANYLHKLSTEIIKIHDIIGMEDLQVSNMLKNRKLAKAISEVSWSQFRTMLEYKAKWYKK

SEQ ID NO: 35333 - protein, 158 aa, Bacillus sp.
LHATIRRNPSGKYFVSIFVETNVQEVPKTESTCGIDVGSKDFAILFEGTTYTNPKFFRTLEEKLAKAQRILSRRTKGSSNWNKQRVKVARIHEHIANARANYLHKLSTEIIKIHDIIGMEDLQVSNMLKNRKLAKAISEVSWSQFRTMLEYKAKWYKK

SEQ ID NO: 35334 - protein, 301 aa, unknown
  TnpB Polypeptide
LEKSYKAFFRRVKAGEEPGYPRFKGQGWYKSFTYPQAGFKLEGSKLTLSKIGSIRIFKRRGVDGRIKTCAIKKDNLGHWYAILVSEVGDVSPIEPKTAVGVDVGLKSLVTLSTGEAIQYPRYYIKMQGKLAAAQRCGDRKKKGSKNRAKARIKEAKISRRVTNLRDEFLHQISRKIVDSADLIVFENLNIKGMLKNHRLAKHIQDHAWGKLIQFTRSKAAKAGKIVELVDARYTSQKCSQCGIMVPKTLADRVHLCPNCGLEMDRDINASLNIRTLGLRGRAYQDPTPTLDFGSKQDGSMM

SEQ ID NO: 35335 - protein, 382 aa, Nocardia sp.
VQVRYNFRLYPTPGQRVALARAFGCARVVYNDGLRVRQQARAAGLPYVKDSVLQTQVITAAKKTSERAWLGESSSVVLVQALGDLHTAYRNFFASVTGKRKGPKVAVPKFRSRKDNRQSIRFTRNGFSLRSNRRLYLAKIGELKVAWSRALPSEPSSVTIVKDAADRYFASFVVQADDRSLPEVESEVGIDLGLTTFAVLSDGTKIVSPRFLRQAERRLRKVQRALSRKQKGSKNRAKARVKVARVHAKVADTRRDWAHKHSRKIIRDNQAVFVEDLCVKGLARTRLAKSVHDAGWSMFTRMLEEKAARYGRHFSTVDRFFPSTRLCSACGVVSEKKPLHIREWVCTCGAVHDRDLNAAHNILAAGRAERLNACGGTVSPAA

SEQ ID NO: 35336 - protein, 348 aa, unknown
  TnpB Polypeptide
MIQRQLKLKLTKGQESSLLEWLPTLTSIWNWAVRKIEMDAHGGIYYTPIDFQNLLAGTSKKLNIPSHTIQGMLKLAHQSWGRCFKKLAKKPRLKGQRNRLNSIPFPDPIAKPQNFRIKIPGLGPVRYHKQEIPDGKIKCARIIKRASGWYLCLFIDAQPAAIPNLADGIVGIDPGYKHLLTLSTGEKIEHPKELQRTIHRVRQAQLGGNKKLVARLQERTSNQRKDRNHKLSRRLVSENAVIAFSKDNLRGLSRSGFGKSVAAASHGQLRAMLDYKSRTGGRQYLEVASHNSTRICSHCGAHTGPYGRAGLSVRQWECSACGTHHDRDVNSAINTLIAAVGTTVERVA

SEQ ID NO: 35337 - protein, 420 aa, unknown
  TnpB Polypeptide
MEASRRDYGKALRGAFYAVRRGGLNKSKYNTYLQHKYGIASRTANSIIFDVQGRFNALKELKEYERKQLERKIKHLEKTVIPKLVEKRNQNSIKLQDGVGVSLIQQRNLRLRVVSKKSKLNRLKQKLGVLKYQLETGRLKLCFGTKRLLKQDYEKFIEHRDSQMSFLGAREETACNQVLQLTYNRRSNQFLIRLRRGFGGYKSAKGEDRYVYGKVYFNHHKEQIVSILRSKSSPLSYRIVKKNGRYYLYCTFEFQVGNSDIVTRSSYGTIGLDFNKGFVTLSETNQYGHLVQIQFMPYRFKSGNKTKADLQGVVAHVVRLALRGGKDVCIENLDFRVTKAKTETRIGKKYNEMLHSLAYREFSDAIESATYRNGAGLNKVNPAWTSWLAERIYCKPMKLNIHTGASYVIARRGQGYKDAV

SEQ ID NO: 35338 - protein, 420 aa, unknown
  TnpB Polypeptide
MEASRSDYGKALRETFYAIRHGGFNKSQYATYLQNKYKIVSRTASSIISDAQGRFNALKELKEYERKQLERKTKHLESIVIPKLVEKRNQNSIKLREGVAVSLMQQRNLRLRVVAKKSKLNRLKQKLKALEYQLKSGRLKICFGTKKLLKKDHDKFIEKRDSQMTFIGAKAETSCNQVLQLTYNRRSNQFLVRLRKDFGGYKSAKGEARYAYGKVYFNHHKGQLVSILRSKGSPLSYKIVKRNGRYYLHCVFEFQVENSIIVTRSSYGTIGLDFNKGFVTLSETNYYGHLVRTQFIPYRFKSGNKTKSDLQDVANHVVRLALQTGKDICIENLDFRTKKAKTEAKIGKKYNEMLHSLAYREFSEAMESMAYRNRVCLNKVNPAWTSWLAERIYCKPMKLNIHTGASYVIARSGQGYKDAV

SEQ ID NO: 35339 - protein, 381 aa, unknown
  TnpB Polypeptide
VLRRQAYRYRLCPDKSEDTLLRQFIGCSRFIWNAILFENDFRYLVGDPLKLNRAEFCNRLITLKEKHPFLREVHSQPMQQTLNDLATAYERAFDPKLSAEMPNFKKKKNAQGIRFPQGFRVDGRSVYLPKIGWVPFRASARTMKKRKILGKIKNVTVRLEGGLWYVSFQTERELSEPVHAHPESSVGGDVGVARFLALSDGTFFEGANALKRYQRRLARLQRRLAKKVKFSANWRKAKARITKLHTRIANVRKDQIHKASYAISKNHAVVVMEDLRIKNMTASAKGTVENPGNHVAQKSGLNRRILDQGWGELRRQTGYKLKWAGGLLKLVDPQNTSRTCAQCGHVSAENRMTQALFVCVKCGHAANADTNAAINILGRAG

SEQ ID NO: 35340 - protein, 381 aa, unknown; identical to SEQ ID NO: 35339
  TnpB Polypeptide

SEQ ID NO: 35341 - protein, 405 aa, unknown
  TnpB Polypeptide
MLSFKYRIYPTKKQVLRLNHQMQISKNLYNALFEKAKEHYQQTGKTFSQFDMNKHITELKKENPEFKELHSQVAQNISKRLGDSYKAFFRRVREKKNGKHVKVGFPRFKKYVSSLTYTQSGFKFNSERRLYLSGIGNIPIVLHRVPRGKIKTCVIKVYDSGKWFVGFANELPETEFKSNGKEPVGIDVGLTSFAILSDGQKIKPPKFLRKSEDKLKLLHRRVSRKKKGSRNGRKAIIILARGEEKVANQRLDFLHKLSKQLVMSHSVIGLEKLTIQNMTKNHCLAKSINDASWGMFRQMPHYKAWSAGCEVVDVDPRGTTTECSECGSNQDMPLSERTYKCHSCGHTEDRDVNSAKVIKARALSILAEYTVGLTGSHACGEATSNCLAKDKQVVSLKQELHGVRT

SEQ ID NO: 35342 - protein, 366 aa, unknown
  TnpB Polypeptide
MKLTLQIKLLPIEEQALSLLNTIRTCNIVCNRISDIAWEKKEFNQYRLHHLVYHQTRDSSNLSAQIVVRCISKVINAYKAGKKKKRVFKPLGAITYDSRVLSYKGNTASVWSIDGRLRIGFVCHNPRYLPHVKGEADLVYRKGKFFLFQTVEIPEENIKDVEEFIGVDFGVNNIATPSDGIQYNSKQLDKVRNRYSRTRQSLQSKGTPGGRKCLKRLKGREARFATVTNHAIAKQVVEKAKSLNMGIALEDLTGIRERTKVRKVQRRKHHSWAFAQLRFFPQYKARLAGIPFVMVNPRYTSQTCNICKMIGHRKGPSFSCPNCGNISDSDVNAAKNIAQLGIAVTDPERGSMICSIPLMPCQLAAG

SEQ ID NO: 35343 - protein, 408 aa, Colwellia sp.
MKRTLRYNYRLKPTVDHEVKLVEFGSYARGLWNLLLSENMRRYRYDKTFLFYHEMAGLIRDLKKFEEFSWLKAFDSAASQQVARDLETALKNAFTKGRLQQFPTFRVSFKQKKLHDDSFRCVNNSNCIRIENGSISIPKIGKVPIVLHRKLVSKIKTATVLFKHGKWYVSLTQEVECKSAKQVLSTLVGYDINSQHTVVGSNGLYVKNPKAFKKASVKLKQIQVQLSRRKKGSNRWHKTKSRLNKIHGKISRQRLAFAHETSCLIAKSSDIIVFEDLNVKGMQQFNGQMVNDNVMGMITELTKYKAELNGAVYHEIGRFVKSSGICCECKHEHKFDLSVRSFACESCGTVQCRDLSAAISVADTGEKDLMANGILVRALPKPQQKSPSKTKVFEQSKFGLGSEKKEAA

SEQ ID NO: 35344 - protein, 375 aa, unknown
  TnpB Polypeptide
VQLSETVKVYPTEYQKNLIVQTMTEYIGTVNSLVSDAVSGHSIAKITTADVSADLPSTLLNQCIRDAKSIIKKHYKYCHAAVLKNRSLAKRGCAIRVKAPSLPVMKKPCCYINNQNYKIKDNCIDFPVMINGKSKRISVSVKLTDRQKSLFSDAKFGTMRIVTKNHTLVAQIVYEVAEPELKLDGNIMGVDLGIKCPAVSYCSDGSVKFSGNGRKNKYMRRHYTYLRKKLQTSKKMKAVKRINDKEQRIMRDIDHKLSHDIVETAVAHNVKIIKLEQLQNIRSTTRKSRKNNHSLHTWSFYRLAQFIEYKAKLAGISVEYVNPAYTSQTCPICGHVHHANDRNYTCKCGFHTHRDLLGAMNICNSTEFVGNRQTA

SEQ ID NO: 35345 - protein, 453 aa, unknown
  TnpB Polypeptide
LIRQDDQECRDLYDKNFKYGEKTMRQAERHWIKEGHELYSICDNLTLKAKNLYNAGLYQVRQSIFNRNNSKEENKPSVLSWTELVSRFRKEKQPDMLALPSKVATNVLKLVGSSIGSYYQLMKCYHDSMNSSVVYKPRLPKYLHKTKGRCVVEFTNQTISKKRGANGELILCPKDLQLVIPTKIQNPKCVRIIPKLGVFVIEVIYEVEETPLKHTGNYAAIDLGVTNLASVTFSNGIRPLLVKGSKIKSINQGYNRLIAKAQSNLPTNQHSSRHIHRLWRNREKKLQSEFHQITSFFSMYFDEMSIEKVFVGKNKGWKQELKLGRKTNQKFTQIPFTTFISQLTYKCKLRGIEVVEQEESYTSKASFIDQDEIPIYGDIKTKPSFSGERISRGLYKTKKGFLLNADINGSYNILVKGLASLGKVLDRSLVSFHTRSLTGLGTQSNLDLITQYM

SEQ ID NO: 35346 - protein, 412 aa, unknown
  TnpB Polypeptide
VLKAYKYRIYPTSDQKEFLNKTFGCCRFVWNQMLHEKLDAYNKDIKVPQVTPAKYKTEYPFLKEVDSLALANIQLQLEKAFRNHFKNKNYFGVPKPKKKKEKQSYTTNNQHNKIRIDSDKNLIYLPKIRSGIKIELHRQFTGTIKSVTISKNPSNNYYAAVLVETEEVRNNIKEPISQKCGVDLGLSSFAAVTNDFGSYKIDHPHYLKKSEKKLIKLQRQLSKKQKDSKNREKARLRLVKCYQHISDSRNDFLHKLSKAIIDENQVIVVKDLNVKSMIQNRYLAKSISDSGWSTFFRYLDYKAQWYGRELIKVDRFYPSSRICSNCGYVNKKLKISNRNWTCPVCGTKNDKHINASVNLYKVGSERPDVKPVEMGSVDDRKVYALPKKQPIAEAGSQHLNRCGSSLVKLNQN

SEQ ID NO: 35347 - protein, 411 aa, Acidimicrobiaceae sp.
MHAFRSGVATAAAGLENFSNSQKGTRKGRTVGFPRFKSRDRAKPSVTFTEINHQESWFEDPDVLGGRTSPNGHRIRLMLPQSTPDREVQRRRANLTWIHTTESTRRLAKKVASGTGSIQKVTVSYTGGRWQASVLVRYLVRPASIRSTGSRGSSGELQSIGVDAGIAHLATLSQPVPGLTDEHGHIANPRVLEKQLERLAELDRKLARTQARSKNRSKVKRRRARLHGAITKTRELEIHRVTNALADRFDVVAIENLNVAGMATKKRHLGRALADVSLSELRRQLTYKMSDRGTTLVVVDRFYPSSKTCSACGAVRAKLDLADRVFECSTCGMSLDRDINAAISIEAEGRRLLSAKLDTLQPTPPTQHVAGLRPETRNADPRTEKTEVLMGTPALAACRAEPRSRALVSVQ

SEQ ID NO: 35348 - protein, 375 aa, Aigarchaeota sp.
MEVVLGVPFGYDASNEVKKLLEDFRNMVNFCIDYAYRRRVTSYARLRKGVYDEWKRRWNYSTHFCHSACKIALAILKGHRRKHKDDKPEARKLFMQLDPQLYRFYGDKIRISVKPREFLYIDLKYGEYQRKFIDAWREGKLKTGEITMNETKIVISFKKEVDLSNPKDWIAIDINESNVTAVSSNPHILKIETDLRTIHTTYFNIIRNVQRLRKFKPKTAKRLLKKYSGRRRRKVADECHKIARNIVEFAEEHRMGIIMEDLRGIRKRIGYGRRLNRRLHSWNFRKLQFYIEYKARLNGLPVIYVNPKGTSSLCPVCGGKLAPNGHRLVSCECGYENDRDVIACLNMLRMRGAPLPLKALHEPLTVEVRGRDENL

SEQ ID NO: 35349 - protein, 317 aa, Aigarchaeota sp.
LQKDAQVTVIGKVFRPNRLKVLALNRALGEYFRLVKWYLGFNSKSKNFLYTNGYERAKRLYNLNTALIQTARDKVVEILKSFEENRKENSILRLKRISIRFDKRCYSFSKTTNVLTPYWLTLSLNKKERISLPIIFGEKQKQRIEETFRGEWKFTTVEMVKRNGEWYAHFVLSKTIELPDEAETIIAIDRGEHTLATAVAISKSNPEKPMKGQFWRGEEIKRIRGLYGHIRRKLQEKYRVGKIKELKGRERRKVKQQLHMIANQIIPYAKQFPKPVIVMENLNGIRRKFKNSKNLNRRFHSLPFRKLQAIVEHKEKL

SEQ ID NO: 35350 - protein, 373 aa, unknown
  TnpB Polypeptide
MDKVIRYRIYPDKEQLNKIIGTIGCCRFVYNQALNWKKLAYEADGTRITYNDCAYGVTRIKKMYPWLKEADSAALQQSLRDLESAFKRFFTVKGTGYPKFKSKHHSRMSYRTVNNQDSLKILERSLVIPKLGPVRAVIHRSPEEDWRLTSCTVSIEADGSVYASCHFAASEVQKPECVDVRKVIGLDYKSDGLYMDSLGNVCDNPKNYRDSQKKLAFEQRKLKHKTVGSKNYEKQKKRIGKVHCTSANRRKDFLHKESLRIAKSYDLVCVEDLNMKELSRHAFGNGKATMDNAYGMFLTMLEYKLQYRGKKLIRVDKWYPSSQICHSCGERNTDVKDLRIRKWKCPKCGETHDRDRNAALNIRNEGIRMYLGI

SEQ ID NO: 35351 - protein, 515 aa, unknown
  TnpB Polypeptide
MSNSLTTTIIAKLVISETDTFEINSLMCKYQSARRMGFNQIVKDKNSDRGKIESYIKERLPVLNSRYRRDAIMEAEGIISSQKELLPIYLENNERKLKKSKEKLEKYAEGVIKPKRSVEIVLSGIGRRIEILMEKKIELEEHIKNNTIPSIVFGGKKNLEKLQKEELSKEKWKELRSNSFYSRGDASKEGNLHTRLYYDELKDEFKLRISIPVDGKRCNYIYCPVSVPKEARHRGKRELLISAIENSLPYSIRILRDNDTYEAHITLSEEVYGNYLYEIPFRAQKVAGLDINVDRIAVVLADRKGNFLKRKTFYCHELEYVRKNKRDYIIHKTIKDVFECLKSEQVECIVIEDLKFKQDLDTNKKLNRIKSNFTYRKLYEAITRKALRSSVDIKLINPAYTSQIGQMKYYSYGLSRHESAAYVIVRRGCGYSEKIPKVIIKKIPVLIERLKTGLEGAKEAARKKLLKQLEVLKNWKNYSPINTKHKWKLWALISKLQSLLCSEFPVEGISGVSSG

SEQ ID NO: 35352 - protein, 407 aa, Okeania sp.
MKARFKYRIYPTPGQKYRLAKLFGSVRVVWNDSLAYSQQKYKSAEKKPTNSELQKLFITQAKKTEEREWLSEVSNIPLQQSLNDLNQAYQNFFKSTQGKRKGRPVRPPKFKSRKSRQTARFTKGGFKIGQHKIYLAKIGKLKIVWSRELPSAPSSVTVIKDSAHRYFLSFVVEIQPEILPQTDNSVGIDLGISTFATFSDGTKVDAPKPLKKRIKKLRKLSKSLSHKTKGSKRYEKARVRIAKFQAKLKDTRTDFLHKLSTKIIRENQTVVLEDLFAKHSEGNVSGMVKNRKLSRAISDLGWRTFRTFLEGKAEKYGRDFRVISRWEPTSRVCSCCGFKGGKLDLQVRDWECLNCGAKHDRDENAAINILVAGGQSETLNGRGGKRKTTAKVAAACEASTRRGAKGR

SEQ ID NO: 35353 - protein, 375 aa, unknown
  TnpB Polypeptide
MLAGMRVRLYPTEEQEIKFRKFCGAARFVYNECLFCRIQVYEEELRSCSVQELIEHIQDLKYSKEYSWLLEIPEAVTKQAIKDLDKAYENFFRRGNKGFPKPKKKGRCKDSFYQRTDRLKQVDDTHVKITGIKEPVRMSKCFIPERVMNPRVVFDGKYWYLSFTYEVEELPKIEDGEVVGVDVGLKNLAITSDNVVYKNINHSYRVMQLEKRLKRLQRRLSRKYELNKQGNKFVKTNNIKKLENQVRLIHRRLRNIRNTYIHTVTMDLVRTKPRMIVIEDLNVRGMLKNKHISAGVQKQCFHKFRSYLAYKCKFFGTELVVADRFYASSKICSCCGYKKRFLSLSERVYRCENCGHIQDRDLNAAINLRNYGLAL

SEQ ID NO: 35354 - protein, 416 aa, Halobacteriales sp.
MAIQVTRTYVGSIQNQQQVSDGLELLGDSASKIWNVARWTVDRIWNATGEIPDEGSLKSYMKNCECWNDLNAQSSQKVIEELSHAFQSWFDLRHKDDEANPPGYRKHGDTRPKSTVTFKTDGFKHDPENNRVQLSKGSNLKEHRSDFLLCEYQTRPDVDLSEVNRVQNVRAVWNGDEWELHFVCKVSLETTDSTGDGVAGIDLGITNIATVAFPDEYVLYPGNSLKQDKHYFKRAEYDTEGENGPSEKSMWARRKLAERETHFYHVLSDAIITECVERGVGTLAVSWPEDVRDSDWGKTGNKKLHTWAFDRIYQYLEYKGEERGVEVLKENEWNTSKTCSRCGDARKSNRVERGLYVCSSCELVANADCNGAENMRRKITPSPRGEDRSNGCVAQPSVHLFDRESGTFRTREQVVS

SEQ ID NO: 35355 - protein, 275 aa, Okeania sp.
VYNRRIPKGFKVKTGTVIREVDGLYISFTIEDKTVPVEVVEIQPTEQNSKGIDLGLIYYAVTSDGEFIEVPKFFRLSEHRLSKLQMRLAKKSKHSKPWKILKRKIAKLHQLIARQRLDWQFKLAYHLFSDCQVIFLEDLQIANLVRRCKAKLGDNGQFLPNGQSAKSGLNKSLQDAAFGQFVQVWEYVAWKLGKRIIKVDPKGTSQHCWECLNKVSKSLSERWHSCSKCGQELDRDYNSALLIQKIGLLSTQEEDITSVKTAVSFYLTEESRALP

SEQ ID NO: 35356 - protein, 237 aa, unknown
  TnpB Polypeptide
MIWVKEEVNIAKDYDNIMSIDLGLNNLATITFENNTNSYIIDGKYIRSKNSYYNKEIAKLTSISMKQCKNSKYFKRTKQINKLQTKRNNFIKDYIHKASKKVIDVAIINRCHTIIIGDFKGIKQENAAKSFVQTPQQQLVDKIKYKAELLGIKIIMQNESYTSGCSALDLEEISKDSYNKNRRIYRGLFKSNKGILINADINGSYNIMRKYLKCTPRSLIKMMDNGFLNNPIRLRVA

SEQ ID NO: 35357 - protein, 766 aa, Mycobacterium sp.
LFALRSRIRPGPSRFGASAAAAPTGGVHGADDASEQPVLVAVHTPHLVVIQCHAADSTVSGEGSGLRLDLLGGKHARHRSEHGIAVQQFEIARQLFDAVDLPAAFDLDSHRTAELVAAHQIHRTDRGRVLAAHQGVAGAQELDVLGQQDLQVRLHAVLHQAGIDAELMAGVVLDIFDRDAQLFAGLVLDHPHRHTIAVILGEPAGRTHPIQRLVGAIVGMDADRTVGLEQQQPAGRRQVGGQPPHIVDGALGNHEAHSNHLRAIPGRTNRCVTACLPNLSVVRAMLTAEMTRHTTFRFCLDPTVEQHSLMSRHAGASRFAFNQCLRIVKTALTQRDAGRDTEVPWTGFDLINSFNSWKRSEEAGRIFAVGNDGVAATLVTGLSWRTEVRQQVFEEAAVDLGKGLKAWSDSQSDQRSGKHIGFPQFKKKTNTVPSFRLRNNRPKGQLPPIRVGECNRPRSITLPGIGQIGVFDDTRRLRRMLTNNRAKILFATLTCRRGRWWVSMNVEAVDLHPGQHHPARDPADDTGWVGLDRGLSAFVVAATADGKEVARIAAAPKALAKGMVKQRRLAKSLSRKQKGSRNRKDAATKLGRHHHHVANVRRHFLHDVTNALVKAHDRLVIEDLNVTGMMANHRLAGAIADASWTEFARLLKYKQAWRSGDIVQADRWYPSTKRCSACTAVNATMTLADRVFTCDCGYVADRDTNAAVNLALWGQNHHPSPDPRTPKRRGRATNARRREGADQYSSRIGETSPDETGTDVQPPRAV

SEQ ID NO: 35358 - protein, 420 aa, Chroococcidiopsis sp.
MLNMTWEFKIEPTPEQVDTIERIFDVCRQVWNFALRERKDWLNSRKSPVNACSIEQEYILRADEPYPGYHTQAKRLTLAKEQYHKLKDVHSQVLQQVLRMLDRAFEDMRAKKLGFPRFKNKYRLSSFVFPQLGKNPLQGDVLKLPQLGRVSLRLSRPIPEGFEIRQARIVRRASGYFVMLALQLDVSVPDTPMSGHPRGLDLGFEKFVATSDNEQINRPRFLQTLHRELKLLQRRLKHKKLGSNNRHKLNRKIARIHQRITDTRKDWQFKLANHLCDDAGMIFVEDIDFRSWARGMFSKHSADAGFGQFVNILQWVCFKQGVFFAKVDKNYTSQQCPECGAHTGKKELNERIHSCPVCFYTTPRDVAAAQVIRNRGLELTSGSGSGHDLEVKQTVCGLDAAGTSGNVSLASTGRSRKLKK

SEQ ID NO: 35359 - protein, 441 aa, unknown
  TnpB Polypeptide
MTRNYKYKLYASKHSKELSRMVTSANFVWNHIVTLSRRYYRMYKKSLSPARIKKHMVKIYRNQPYWSKFHTHSLQEICERYENALNQAIKKKRGFPKAHKPHNNGSVLFKGSGGYKLYDNGKHGILVVNKLGRNWRFKFKVTRPWGDVKNIIIKRDCDGCLYLTVCCDVPERRLERENEGPIGMDFGMKTFLTLSNGERIDIPDYHKQSLKETRKADSSYSNKLNAKVYGTSFRRAKKARQKAHRKVTNRRSDFHWKLAHQLCKRFSFIAIEDLNIKGMQRHKRWGRKISSLGYSEFVKKLEVVALKYGTEVKKIGRYEASSQTCSECGHKDSVTKDLKVREWTCPECGAVHDRDVNAAKNILRFGVAENTTGKGVSPDGSRSKTIEGIPSDGSGDGHVSCPAPSENPMTSVVGVRQEKTEPAEKKEKELLLDSINRINKE

SEQ ID NO: 35360 - protein, 389 aa, Okeania sp.
LKARYKYRIYPSQIQIKKLNQLFGCCRYVWNQSLAYCNQLYISGEKKPSYTDLTKQFITQTKKELAWLKEVASTPLQQSLKDLDQAYKNFFNSCTGKRKGIKVKPPKFKSRKSRQTARFVGANYKVGQDKLYLPKVGKIKIVWSRPLASQPTSVTIIKDSANRYFASFVVETLPEPLPNTENSIGIDLGISTFATLSNGQKIFAPKPLKKSLKKLAKFQRKFARTEVGSKRHEKARLKVAKLHAKIKDIRAYFLHKLSTNLVTNYDCIVLEDLNVSGMVRNHKSALAISDLGWRQFRTLTEAKCEKYGREFRVINRWEPTSQKCSNCGFRGGKKELNVREWTCLSCGAHHDRDINAAVNILEVVQPKTKVKTAKETVAENPVQLSLFAL

SEQ ID NO: 35361 - protein, 386 aa, Okeania sp.
MLLGFKTELHPNNQQKTLLAKHAGVARHAYNWGLWLTRNILNHNSNNPGSKLKFPTAIDLHKLLIAMVKPKNCWYYEVSKTAPQYALRYLSNAWKRCFSKVSGQPKFKKKGKDDSFTLDGSISVSFNHIKLPRIGWVKTYEILPDNVIPKSVTINRKADRWFISFKVETATIITEKSADVVGVDLGVKTLATLSTGEIFEGAKSYKKLESKLSRLQYLNRHKTKFSNNWKKAQLKIAQLHNTIANIRKDTLHKLTTYLAKNHSQIVIEDLNVSGMMANHKLAKAVADMGFYEFRRQLDYKCELYGSELIIVDRWFPSSKTCSRCGTVKESLSLSERVFNCEHCNFSCDRDLNAALNLAMAVSSTVTACGLDNADVARSEAGIEQVI

SEQ ID NO: 35362 - protein, 310 aa, Okeania sp.
LNLPGKKGYPKFKKFTRSVEYKSTGYKLSPDRKTIEFKDGFKAGVFELWTSRDLVWYSEQQISRVRVVRRADGYYCQFLVNVERKETHNFQSNVVGIDLGLNAFYTDSNGKAVENPKYLRNSEKRLKKLQKRVSRRHEKGKKPQSNNYHKARKQLARQHLKISRQRKDHAIKTARALIQSHDLVVYEDLKIANLVKNHHLAKSISDASWYQFTQWLEYYAKLHGIVCVAVPPHFTSQNCSNCGQTVKKSLSVRTHKCPHCGYIADRDHNAARNILAKGLEMLGAIVNSTEGHSESGGNPKATGESDLWRG

SEQ ID NO: 35363 - protein, 451 aa, Limnoraphis sp.
MIVREAKLLNGSKSQYARLDDAIRTAQFIRNKAVRLWRDERDVDKSRISRLCKELAKEFPFANKLNSMARQASVERAWNSISSFYRRSLGQHSLSCKLRSRRKPPSREFALAPAGGAGSDRCREGASIKGYPQFKKHCRSVEYKTTGWKLSDDCKSMNFTDGFKAGEFSLFCNSDVRKDLFTLKINRVRVVRRADGYYAQFCFNANRSEPGNYTGKVVGLDLGLNYFYKDTNDNAAIYPKYLRSSEKRIKKLQRRLSSKFVKGKKPQSKNYQKARIRLGKAHLKVQRQRKDWAVKLARCVVTSNDVVVYEDLKIQNMVKNHHLAKSISDAGWYQFTQWLDYFGKVWDKAVISVSPNFTSADCSNCGFRVKKSLSTRTHKCPKCQTEICRDTNAALNILKKGMSILGAEYNSTEGHSETASFEETLGETSTSVNEETSDLISGVDEPRISNS

SEQ ID NO: 35364 - protein, 430 aa, Lactobacillus sp.
MIYACNFISQYIFEHAFELKQSKLNKALYHDLRDKFELKSQMAQSAIETVIARYKTVKTQLFQHPFRYDTGKKDGKGRGIWAQIYRDLTWLWQPINFKRPQLDLQRGRDWSYLSATNQLSLNTLNGRRKVDFVCKGFDQYLDQTKWKFGSLKMLQLRGKWYIHLSATTAIPEFEAEQAVHVVGIDRGLRFLAACYDEKGKSILFSGQKILRKRRKYKKLRAELQAKGTKSAKRRLKKIGQRENRWISDVNHRLTKTLIDHYGSNTIYALEDLTDVAKRRLKKIGQRENRWMSDVNHRLTKTLIDHYGSNTIYALEDLTDVRFATEKSPKDQRYEIVSWAFYQFEQFLTYKANLNSSAVVKVPAKYTSQRCPKCGRIHKDNRDHELHLYTCDKCGYKSNDDRLAAMNIQFLGTLYRSGKEAPQFNKQASVE

SEQ ID NO: 35365 - protein, 438 aa, unknown
  TnpB Polypeptide
VIRAVDQLFKVLRRTVVLECYANKIAREALRGIVEPLKTMIGEMVEYALKYNASQNTLHRVFYERYRREYPWIPTRVIKGAYRDAVRRAKSFRERLKKGRAYTGKPKVRRVTIVYSDNQDWRIDCGSLKIRTHRGWVELSYANNRQLLKYLYGGWIPASELKLKTNGGRRVLAYITFTKIYPVFYDKKNVIAVDGNENNITIAIFKNGVLVEVIRVETGLGKLVIAYAVRRKRISKGKSTKTREVKRKLKMLREGDRKQDMLYKVVNFIEELARENNAVVVIGDISGDDKGRMEKNKSRKLRHRIHQWSVATLIKLLEDRPIHVVRISERGSSSVDPFTRKRINGYSPLVIRTAVRGANGRFKVVKIVLRVAYVDGRIVERDVVGAINIGLKYLSSDGSPMALGSTGAHEVWVKLMNPHQGPTPLTEIKVFGDTIKYR

SEQ ID NO: 35366 - protein, 390 aa, unknown
  TnpB Polypeptide
MQRAYRYRFYPTPEQESLLRRTVGCCRFVYNRALALRQEAWAQRQKKLTGYDLIKKITEWKKDPETEWLKEVSNVPLQQAVNDLEVAYQNFFAKRAKYPSFKRKSSGGSCRFTEYGFRIKNGEVWLAKTKAPLDIRWSRPLPEGATPKQCTVRLTPSGKWFISFLCNVEIEKLPPVAKSVGLDMGLTALVTTSDGEKLTNPKTVKKYRRKLASAQRHLARKQKGSKRWLRAKRKVARIYEKISETRKDQLHKLTTRLVRENQTIVVEDLSVRNMVRCHRLAGSISDASWSMLRGLLEYKCNWYGRELRVVDRWFPSSKTCHGCGHVVEKLPLNVREWGCPKCGTRHDRDVNAAINILSAGTVDYTDGGNVKPKRTGSVNVVPCEVGIPGL

SEQ ID NO: 35367 - protein, 397 aa, unknown
  TnpB Polypeptide
MIVLEFKLKGKPQQYRVINDMIRTAQFIRNKALRYWMDNQNVKLSDLYKQCAVLAKEFEWAGKLNSMARQASAERAIFAIQRFFANCKANKPGKKGYPQFNKSTCSVEYKTSGWKLSSDKKSLTFTDGFAAGTFKLVGSRDLHFYAPEEIKRVRVIHRADGYYTQFCINVERVEEVVPTGKAVGLDVGLTHFYTDSTGESVPNPRHLRKSEKALKRTQRSVSKKKKGSANRRKAINRLGRKHLRVSRQRKDFAIKTALCVVKSSDFIAYEDLQVKNMVKNHKLAKSISDAAWSQFAQWLQYLGKVYGKTVVAVAPQYTSQDCSVCGNTVKKSLSVRTHVCSCGTVLDRDHNAALNVLAKALRQAGIDLNTAGHAGINAWGQTDLYSLVVTSASKPTG

SEQ ID NO: 35368 - protein, 397 aa, Lentzea sp.
VKGQVKRAFRYRFYPSEAQTVELSRTFGCVRKVYNLALQARTEAWAQRGERVGYEATSALLTAWKRTEELAFLAEVSAVPLQQALRHLQTAFGHFFAKRARFPRFKSRKKSRASAEYTRSAFRWRDGTLTLAKMAEPLDIRWSRPLPEGAVPSTVTVSRDPAGRWFVSLLCEDPGVTPLPATDSVLGIDVGLDHLLVLSTGEKIGNPRHERRDRTALAKAQRALCLKQKGSNNRAKARIRVARVHARIADRRTDHLHKITTRLVRETQTLVIEDLAVSNMLGNQCLARAIGDAGWRQFRQQLEYKADWYGRDVIVVNRWFPSSKLCSVCGALAAAMPLRVRTWTCGCGATHDQDVNAARNILAAGLAVTVCGAGVRPQRNTPGGRSVTKQKTLRREP

SEQ ID NO: 35369 - protein, 348 aa, unknown
  TnpB Polypeptide
VELGPCTAQGGVCGHRWPGSEKRDRQLVQQALKDLDRAFKAFFEQRARFPRFKSKKRDEPRFRIPQRVKVEDSKVYVPKIGWIRMRQSQPIDHPIKGATFKKDGGGHWYVSLTAEFEIPDVPLPPANPERVVGIDLGLEDFAVLSDGTRIAPPKFYREGLSKLRKAQRQLSRKQKGSRNREKARHRLSKVHARIRNQQQDWLHKLTTDLVTRHDGLCIEDLNVKGVAKTKLSLLVLDAALGELRRQLEYKAVWYRKHLAVIDRCFPSSKLCGACGSINQNLTLSERVWRCGCGAVHDRDLNAAQNIRAEGIRKIPVAVGHTETLNAWGEGVRPTYRRLSSSNQESHRL

SEQ ID NO: 35370 - protein, 461 aa, Candidate divison MSBL1 archaeon
MQVTVRGELFPSDSEAEQLDELMRIQSSCMRYAYNRLCEGKTKSVIEADLKDTFSEINSRYRRGGYFRARANYESAKELVKSGEQESPEKVVFGGREDLKKRERGEISNKDWKRIRNSQLYSRGDKSKGGNLNLRFVERDDQPYLRVNTGNREWIYVPAYLPDHVSEPLSGEEPYGVRILRENGGYELRVSFEENHEPEIGFEKGHVGVDFNQDTIDLAATGEHGQFKGKKTIECSGLTSARRGKREWLIGNYAKEVVDYAKYWNRGITIEKLEDVARGRPNQHEFVHAKFLEAVRRRAEREGVKVREVNPAYTSVIGRWKYSSSHHITSHQASALVIARRGKGIHEKLRGLKTLAFEAMEAGEGEEGVPDRRVHSWSLWSLIGDLPSRKGAEHTDPEPRPRRPPGRVSHRESRGMESPGASAPTSCGPSRATERSSDRGDPPEGKTVIPGGGPPAREATA

SEQ ID NO: 35371 - protein, 388 aa, unknown
  TnpB Polypeptide
MKQVLTVSCKLEVSPEQSIKIDATLQAFAKACEYVNQTVPPTLINELAMQSLVYHNVRDMFGLSAQLAIHTIRRVSGNRKTSKKDGKPVTGFAPTSVTYDARIFSFREKDWTVSLTTTGGRERFPLAIGNYQLGLLKGQNPKTATLCKRKDGSYYLNIQLESQPTEPPPSDEILGCDLGRTDIAVTSEGDKFSGKEITKVRNHYAKLRANIQQKASKGTRSSRRRCRGLLKRLSGKEKRFQSWVNHTISHRIVTSAQSKNQIIALEDLTGIRDRTNKQPRSKKERRLSNSWAFFQLRQFLVYKAIKHSVKILFVNPAYTSQICHKCNHIHPVKGESYRNGKRFVCGHCGWKGDADLNGSKNISALGASVNKPEGSRLFCNIRRSSQGY

SEQ ID NO: 35372 - protein, 512 aa, Geitlerinema sp.
MQKQGKSTSSKTRLDNDYTMSSPTPNSQRQLELFATVESQVQSNKTTCSDKSNTSKKNSRKRKSSKTSAQDSTTNEKDLKPYYSDVCKEIVSNLYCPIGIDLSASASSLSSLSSNPVVEKSWFSTVKTSPPKLNLPKTYYQSCTSLAVGCTEGEVIQKSKKIRITPTTAQKAILKHWFGVSRYVFNKTVEYLKQPETKANWKEIKGGILSSLPEWAKTVPYQIKSIAVKDACTAVREAKKKTANGQPSFVKFRSRKDRVQSFYVPSSAIKEKGVYHTKLGVLNYRESLPEVIKDSRLIRHRGQYFLCVSTETQVTPAESQGGIVALDPGVRTFLTFYSPTCFGKLADGDFSRIQRLCHHLDQLVSKASKATSPRKRRLKKACDRMRTKINNLVKEVHHQVANWLTQEFDVILLPTFETSQMSSRAGRKFRSKTVRAMLTWNHYRFQQFLLHKAKERNKTVLLVNEAYTSKTVSWTGEIVKNLGGRKKIKSPSTQEWMDRDLNGGNFSQSFGR

SEQ ID NO: 35373 - protein, 431 aa, Thermococcus sp.
MKRAVTVKLQPSKAQEKALSELAQISSKVWNKVNYLRRQEFFEGKPIDFNKTEKTVYEEFKSEIGSATVQQIARKNAESWRSFFSLIRNKRNGELPKWLKPEPPNYIKGEGLIVLRNDQYRIEGNNLILKGLGKFKRLEVQFKGRIHLKGKQGRLEITYDPIRRKWYAHISISVEKKLQGGEWVEVPREPLGNFSAGIDLGVNNLMAVYVENGESFLVNGRPLKSIAFYWQKQIAEYQSKLNKSGAKKSRKLTRMHQKAKLQAKHYINTAVRQTVERLYRLGVSRIVIGYPKGIARNSDKGKRQNYLLFHVWRFNTVIKRLKEVAEEYGISVIVVDEAFTSKTCPVCGKPHEGARFVRGLFKCPATGLIFNADLVGAFNILKKVVKTITPSLPVLSASRGNWPKARPEGLKAHFELGFNEAPQTSPPLARG

SEQ ID NO: 35374 - protein, 431 aa, Thermococcus sp.
MKRTVTVKLQPSKAQEKALSELALISSKVWNKVNYLRRKEFFEGKPIDFNKTEKIVYEEFKSEIGSATVQQIARKNAESWRSFFSLLRNKRNGELPKWFKPKPPNYIKEGGLIILRNDQYKIEGNKLILKGLGKFRRLEVQFKGRIHLKGKQGRLEITFDPVKRKWYAHISYTVEEKLINGKWVKLPREPLGNLSAGIDLGVNNLMAVYVENGESFLVNGRPLKSIDFYWQKRIAEYQSKLNKSGAKKSKKLSRMHQKAKLQAKHYINTMVRQTVEKLYHLGVSRIIVGYPKGIARNSDRGRKQNYLLSHVWRFNTVIKRLKEVAEEYGIQVLVVNEAFTSKTCPVCGKPHDGARFVRGLFKCPATGLIFNADLVGAFNILRKAVKTITPSLSALSGGRGNWPETRPEGSKTRFKLGLNETPQTSPPMVRG

SEQ ID NO: 35375 - protein, 417 aa, Thermococcus sp.
MTKLVLTYRMSHNWNVNSFLKEYQRLLQRAIDEISENTTWREKKVTHRYSVGSRNYHYYETTRLIPYFPQSNEFKRELRNKLLKDWPFAKHYIDSAIKTAYSILKSWRGNYLKGKRKRAKPVVKRKFVRVKTTLMKVEGSRIRITVKPREEYLELDFSKEWFYERVKDWKVGELIIRENDVLLTFSKEVEFSGRIKIGIDSNLTSLDIFHPEKGWIRVDLSELHRIAETYDRIIDGLKSVQRKAPKRIGVLLKKYWTRRRNRIEDYLNKLAVQLSREFPDAVFVFEDLNKFKMLQNGSRKFNRKLSRATWKKIVGKLSYRVPVEFVNPAYTSSTCPVCGSWLESRNGRVVCHNCGFEADRQFVGSFNVFVRGLGVALSGAELDDLLPNEPRGELNVMKPKSVVRVDLNGGRFTHVPP

SEQ ID NO: 35376 - protein, 242 aa, unknown
  TnpB Polypeptide
LKKLCCYINNQNFKIQDNYISFPVMIDGKSKRISVKTKMTDKQKLILSSHRLGTMRIVIKNINTLVAQFVYEINEIEKVNESNNVMGVDLGIKCPAVSYCTDGSVKFYGNGRKNKYMRRHYANLRKWFQKAKKPTVVKRIKNKEQRIMKDIDHKISREIVNTAKKHKAKVIKLERLENIRSTTRTSCKNNPSLHTWSFYRLAQYIEYKAKLVGIEVEYVDPAYTSQKCPQCGNIHRSYRLLR

SEQ ID NO: 35377 - protein, 400 aa, Desulfovibrio sp.
MERLQAYKFQLRPKTGQESLMRRFAGCCRFLWNKALALEKETYENEGKRLGFSLLCKALRDWKKENDTSFLAEAHSQILQQALKDLDRAYKNFLAKRADFPRFKRKGVHDAFRYPQGFRLDEGNSRIFLPKIGWVRYRKSRATGGTPKQVTVSLSAGKWLVSIQTEREVPEPLHPSQGAVGIDMGVARFATLSDGSSVRPLHSFRKHEKKLARLQRKLAKRVKFSANWQKLKARIQRLHRKIANVRNDFLHKATTAISKNHAVVVIEDLKVRNMSRSASGTREAPGKNVRVKSGLNKSILDQGWFEFRRQLAYKLAWLGGKLLVVPPQYTSQTCSCCGCVDKQNRPSQARFKCTACGFECNADYNAALNILAAGHAVSACGAGRAQAPALKQELAYGTAH

SEQ ID NO: 35378 - protein, 419 aa, Persephonella sp.
MIIEYTYRFRIYPNKEQEDFLNIQFGHCRFVYNYFLTLSKKEYEEQGIKWKYSRYQSMLPALKKEYQFLKQANSQSLQVALQNLDTAYKNFFKREAGFPKFKKKKSKQTVHIPQHFSIERKSRKRGLLKIPKLKTPIKIKIHRNIEGQIRSISITKAPDGRYYLNVLTKKEIRSLKETGETAGIDVGIKEFAIIYDGENTHHIENPKYLQKSERRLIKLQRQLSRKQKGSKNWEKARQKVAKQHQKIVNQRKDFLHKVSTAITKQYDCFVVESLNIKGMIRNEKLSKQIADVSWYEFMRMLEYKAKWYGRKIIKADRFYASSKTCNVCGYKNNQLTLSVRKWKCPICKTTHDRDENASKNLYKIGLTHLTNLRFEHAERHSTGGRVGTTRAEACGAGTVGGMFSNGQTTRHPAVKQETS

SEQ ID NO: 35379 - protein, 340 aa, Methanomassiliicoccus sp.
MLLTFKLKHGRDLSAELTKARKVAEYAIEHHSFSSADVKHIGLKSVIACQVLRKYGRNRLLKQIHHVQLTVPGQAVKIDEDHKELYISCLKLRLDISHMPNFERVNQVELDKEYAHVTVTISEPPVREVNQWVGIDLNSTGHIAVAANPATGKVNKYGKEAPHIHRKYGKMRRHLYIHGHPRVAKKKIRSKENRKIKDINHKISRAIVDQAAQQACGIKLERLSDIRATARQSKSTRPSLHSWSFYQLQFMIEYKAKLLGVPVAYVDPAYTSQQCSRCGEIGIREGKDFACPHCGHVDHADANASFNIALRPSIEESVGRLHADRDVCKGLIGVPQEAPA

SEQ ID NO: 35380 - protein, 383 aa, unknown
  TnpB Polypeptide
MLKAFKYRLYPDKEQAEKIDKNIGCVRWIYNYALAKKMKAWQQDKKNLSRYDISKDLPILKKQEETKWLKEADSKALMFSLLNLDNAYKKFFKEHKGYPKFKSKKKSRLSYTTYQGIEIDWDNNKLNIPKNKNIKIKLHRKFEGEARQITISKTPTNKYFASILVKTKDKEKKKRKITEKTAIGIDLGIKTFITISDGRKIDNPRVLYRFEKKLAKEQKRLSKKKKGSNNKNKQRIKVARIHEKITDIRKDFLHKLSTELTHENQVKSIIIEDLNVRGMLKNHCLAKAITNVSWSKFIELLAYKCDWYGVNLLKIGRFEPSSKLCSKCGIINQELTLADRKWTCKNCGTKHDRDINAAINIKRFGLNPKIRQGLSKSKSVETT

SEQ ID NO: 35381 - protein, 365 aa, unknown
  TnpB Polypeptide
MNINKAFKFRIYPNNTQKQFLAQSFGCARFIYNRFLRQRIDYYAETGKGLTYPDNANALTQLKKLPEFEWLNDINSQSLQQALRNLDVAYHNFFNKKAKFPNFKKKSNKQSFSVPQNFSIHDNELDIPKCKGIKIKLHRDIEGTIKSITISKTPSGKYFASVLCELDIPEPIYSGNEIGIDYGVKAFITTSDGNIIESPKFLRKSELKLKQLSRSFSKKQPNAKNRYKAQKLLARQHDKVSNQRQDFLNKLSKRLVCDNQAIYIESLAIRNMIQNHCLAKSISDSGWNTFVNMLKYKGVWYGCRIIEIDRWFPSSKRCHVCGYIKDNLTLSDRYWLCPECNTIHDRDVNAAINILTFGRAGIAQT

SEQ ID NO: 35382 - protein, 478 aa, Deinococcus sp.
MPPPDPHIHLRHPLYPTPTQQRELDALWALARQIWRVLAVHARLEADGQPQSLQEVAALVVAGAMPPTSRAARSVPRRTTAERRNELEAVARALGWRAHLGSSTLDGLVQAFGRSVRALGHVADPACISLNPPETFALTYRGLARPVDDLHVEIAGISGLVLAPVYLMPGPARLAVHAWQNAFFASLSTTRSDLEAALLTGDTDAGARYLAHLARYGPLELHLAAARSTPALGSPITLHLAQGVQLHRSVAGDEISWAFQLTHLSPPRHQALLAIDPGQRALWTWITAHHGQGQVPNPLAQTHPWQPGLPTPPDGLVRRSHDLRYAHVRRHQLLYATQLQPRLERALAHFLTFAGVAIEDTALARMAQRGLDYAPFVAFSGTRQYERFLTDLAQHDPARRIAVWVPPEGTSVDCSVCGLPDAMRYWRRVGRCRGCGVRLDRDVNGARNIYQRAAAMWPVTTLPWVPAALPRPRRRGTR

SEQ ID NO: 35383 - protein, 394 aa, Bacillus sp.
VNILLRCKAFKFRIYPNKNQIELINKTIGCTRFVFNFFLGKQKEKDAYWYIVEEMVQNGQLPANNWKGMCLNKFETVKSLPELKKQYPFLKEVDSIALQKSVENLADSYSRYYKKQNKQPRFKSKKNPIQSYTTKYTNGNITVFENKIKIPKLGLVRFAKSREVKGRIMSAIIRRNPSGKYFVSLATETEVTELPKTKSAIGIDLGLREFATLSDGKIYSNPKFFRTLETKLIKAQRIMSRRTPSGANWYKAKIKVARIHEKIANTRKDYLDKISTEIVKNHDIIGIENLTVSNMLKNHSLSKAISEVSWSQFKTMIEYKANWYGKQVVAVASNYPSSQLCSCCGYKNKDVKNLGLREWDCPKCNAHHQRDINAGLNLKNEAIRLLTAGTAGIA

SEQ ID NO: 35384 - protein, 485 aa, unknown
  TnpB Polypeptide
MSQKVRINGVKHVGASVFLGVDHCGNPRWTRNPERIMVWLCDGWRARFNQRREQRPHNVPVKDEAGGIVDWVKEPLGGSNVAELLSDKEARLQCSWMAGIPAPILSSTDRIENTEWSAGLKRKKTIGGRVPGFKSRHRGLNFVCWRNKDKTGNAIFHKTGRKSGVVVITGMNPSQWRKSGEKLHWRIVIHVRVSQPIRPYTSVHIDWTHRSLVFVNMPLPLPRTGDGAIGLDRGCVHTLASSGGIFMDMPKPSKTELKRLKYLQCRMSRQDRVNEARGGRTAKFESKRRRRTLSEFNALNSRIIRRRNDWIERTTTRLARENILVALEDLDVQAMTRRPKPKPDPAKPGQYLHNGAKAKAGLNRSILSNNWSRLMKRLKDKMDANGGKLVIVPAAYTSQTCHKCGHVAKGNRDSQAVFRCVECGYQTNADVNAAMNILDRALVKTGGDTASDVEGPQWRPDEASTPSTQAGSSVGVRSVKGIPRL

SEQ ID NO: 35385 - protein, 451 aa, unknown
  TnpB Polypeptide
MSQKVRIDGVKHTGASVFLGVDHCNNPCWTRNPERIMVWLCDGWRSRFNQRREQRPRSTPVKDDATGEITDWTEEPLGGPDISPLMSDSQARTSCLWMAGIPSAILASTNRIENTEWFAGLKRRKTSGGRTPGFKSRHRGLGFVCWRNASKTGNALFHRTGRKSGVVVIAGMNPTGWVKPGGKAHWRIVIHVRVSQPIRPYTSVHVDWTHRSLVFANMPLPLPRTGNDIIGLDRGCVHTLASSDGTFEDMPKPSKTELKRLKHLQRRMARQDRVNEARGGRTTKFASKRRQRTLTEFNTLQGRIIRRRNDWIEKTTTRLARENILVALEDLDVQAMTKRPKPRPDPDKPGRYLHNGAKAKAGLDRSILSNNWSRLMTRLKDKMDVNGGNLVIVPAAYTSQTCHQCGHVAKENRDSQAVFKCVECGYRANADVNAAMNILSRALDKTGGGTA

SEQ ID NO: 35386 - protein, 392 aa, unknown
  TnpB Polypeptide
MRKLLKSFKTEINPTLEQIQKINKTIGTCRFVYNFYIAHNKGVYEAEKKFISGMDFQKWLNNTYLKENPEYLWIKEVSSKSVKKSIMNAENAYKRFFKHQTSFPKYKKKNRSDVKMYFVKNSNTDTICERHRIKIPTLGWIRLKEKGYIPTTKQGYVIKSGTVSQKAGRYYVSVLIDVPETEKPQLNDFGLGIDLGIKDFAIISNGITKKNINKTTKLKKLEKQLKRKQRCLSRKYEDLKKHNNVMKEGTTRQNIRKQVSKVQKIHRRIDNIRTDYINKTVVEIVKTKPSYITIEDLNVKCMMKNKHLSKAVASQKFYEFRIKLEAKCKELGIELRIVDRWYPSSKLCHACGCIKKALKLSDREYVCECGYKADRDFNASLNLRDALTYKIA

SEQ ID NO: 35387 - protein, 370 aa, unknown
  TnpB Polypeptide
MEYSYKFRIYPNATQRTQISRTFGCCRFVFNHFLAKRKAVYEQTGKTFNYYDCASALTKLKADLEWLKDADSTALQSSLRDLDTAYQNFFRRVKRGEKPGYPRFKGKRDHRQSFKSKCVGMNIKVLDNAVQLPKLGRVKCRISKEVRGRILSATVSQNPSGKYFVALCCTDVGIQPLPPAGAMVGIDMGLKSFAVTSDGVKYPNHKYLAKAEKKLACLQRQLSRKTKGSNRWEKNRLQVARLQEHISNQRQDMLHKLSTELIRQNDVICVENLAPTNMVRNHKLAKSVSDASWGEFRRQLEYKAVWYGKRIVAVDRFYPSSQLCSSCGIQWSGTKDLSVRQWTCPVCGDVHNRDVNAARNILNEGLRLIA

SEQ ID NO: 35388 - protein, 355 aa, unknown
  TnpB Polypeptide
VLEHGALPEEALLPHAGRIAQPHPRDQAAHRQSQEVEEVRMAQGIRFHGASGIGAESQGYRAFFERRAGFPHYKSRRGPQSSYHCTNVSVGPNYVRVPKMEPIKARIHREVVGKVKSITLEADAAGDYYAVVLWEDGLAEKEPLKEIYEDQVIGIDVGIKDLLTVSNGRKEPNPRHLKRARKALRRRSRQFSRTKKGSRRREKARRRLARAHKRVANARNDNLHKVSSRLVNESQALAAESLRIINMLKNHCLAESIADAAWSELFRMIAYKMKREGKYFVQIDTFFPSSKTCSCCGFKLEKLDLATREWTCPHCGSHHDRDVNAAANIRAEGIRKLRAEGLPVLRRETSSPNAR

SEQ ID NO: 35389 - protein, 409 aa, unknown
  TnpB Polypeptide
MKRSNLFNLAPTREQHRILHELATNCAKLWNEINYLHRQQYQNYLRLGWNPQAYKKYVPLVGSATAQQIVRKNNEAWRAFLALKRMEKNGKLSSTIKQVKPPGYWKRDGRYMLRILFRCDSYHMREGHLDLPRHLSIPFKGKLKWTGKQGRLEVAWDTLSKKWRVFQAMNVKPLITPLGSKTCYIDMGVRNLATVWIPEWHQPIAYQSGRLLADWWYWTKRIAQHQQRLLTVNGKKKSRQLARLYRIRKKRFRHAVATFARQLVKDLYARGVSTIVIGELTGIRTNTKHSRQGNTMVHNYWSHKHVADRLKWTAQEYGIKVERISEAYTSQTCPRCHSRHSLRVLRGFRCLDCGLEAHRDAVGVLNIAARCGEYAVRPMAWPMLLHWDGCGWNRNNGMPTQEKRIVVEA

SEQ ID NO: 35390 - protein, 277 aa, unknown
  TnpB Polypeptide
LNIAYRFRIYPTEEQKILLGKTFGCCRFLYNQMLNDKIREYEKTKKMLKNTPAMYKKEYPFLKEVDSLALANVQLHLEKAYKNFFRDPKTGFPRFKSKHHSRNSYTTNVVNGNILVESKRIRLPKLKWIAMKKHREPAEGLRLKSVTVSMEPSGKYFASLLYEGYSCENQAAEPDYSTAKILGIDYAMQGMAVFSEKVETEEAGFFRKNEKRLAREQRKLSRCVRGSHNYELQKKKVIRCHEKIRNQRRDHLHKLSRKICSQRFTQISLLYLHEAFL

SEQ ID NO: 35391 - protein, 373 aa, unknown
  TnpB Polypeptide
MVKIRHKSYKIRLYPTEKQILLFEKTFGCSRFIWNQMLADKIQYYKETGKSLNNTPAQYKKDYPWLKEVDSFALCNVQLNLQKAYKSFFQSGFGFPNFKSKKKMSRQSYKTNNQNGMIRLSNNNKIKIPKVGWVKVKAHRQVKGLIKSATISKTATGKYYISILCETDIRPFKKTNSNVGIDLGLSHFAILSTGEKIENPRFLISASKKLAKEQKILSRRGLLAKQRGKSLNDCMNYQKQRLKVAKLHEKIQNQRRDFLHQLSINFIKNHDKICMEDLSSKNLMKNHHLARAIGDASWAEFIRQLNYKADWYGKKIVTISRWFPSSQLCSNCGFNSGKKPLHIREWTCDSCGSHHDRDLNASINILNEGLSLV

SEQ ID NO: 35392 - protein, 485 aa, unknown
  TnpB Polypeptide
MRHTTFRFTLDPTSAQARMLARHAGASRFAYNQCLRLVTDALEKKISDPTLAVPWSGFDLINALNAWKRSEAAGRSFVVAPNGTITKQVNGLAWRGEVSAQVFEEAAVDLGRALSAYKLGRVARVKGHRTGFPRRKRKGHCRESFRLRNKVGSSGACSIRVGEGHPRSVTLPRIGTVRVHDDTRRLRRLLRPVAQDNARTGKLVMAPRARILFATCRRHGARWHISLNIQAPDFHPHRRHPSRLANDHAGFVGVDRGLSAFAVAATATRTEVGRFAPPRPLQHSMLRLRTRSRTASRTQPGSSNHAKAVRRLSREHARIANRRRSFLHEVSSQLVKTHDRLCLEDLAVANLLGNRQLARAISDAAWTELARQLGYKAAWYGTELVVCDRWFPSTRTCSQCGRVAPRMKLSERVFCCHGCGLVADRDCNAAANLAAWAEAASMAATWAPDRRAGGRVTNASGGEGAGHRCRDGKPSPMKEEPRLTP

SEQ ID NO: 35393 - protein, 360 aa, Paenibacillus sp.
VRVAFVYRLYPTREQKRTIHFTLERCRLLYNRLLEERILAYKTEGKILNYYDQANTFNERKQHIPTLKQVHSQVLQDVAKRLDKAFQAFFRRVKNGETPGFPRFKPQQRYDSFTYPQGGHAIKDNKVRFSKIGDVKIKLHRQPQGKIKTCTITVKNGRYYACFSCEVDPQQLPVSEEKVGIDLGLLHLAVTSDGTMVEAPKQLRRNECRLKQLQRFVTRKKCGSKRRKKAVHILAKLHEKVANQRKDHAHKVSRQLVDRYGFIAFEQLNVQGMVKNRHLSKSIADAGWSQLIQFAKYKAESAGRVVVQVDPRHTSQLCSNCGTTVKKTLSVRVHRCDHCSYTADRDENAARNILQRALAL

SEQ ID NO: 35394 - protein, 479 aa, Pyrobaculum sp.
MVLNHLYFLVAELVKKAEKKRGRGGRRAGGEPKRGMAPAGGHPAQMPSTRTARLRLLPTTPQERKLHKLADAAAKAWNEVNYLRRQQFFAKQGVDLRGTYREVYRKYRDVLKVNVGQVLNKNNEAWLSFFALLAKLNAGELHMKKVSPPGYWKDRLLGKRVKRLIVRSDRYYVEPINDGEGYIVLKDFGMRVRYAGVIKWSGKQGRLEIVYERGRWFAYLTVEVGKPAKPRQYVRGTYDRIQIRQPRGNKRAFIDVGISNLFAVVIEGSDKAILIKGTPLKAEYFWWKRQKALYQSVRDVRRNLGLPWAEWHRRYLRALWKMRERLRHYRNTAVRGLAEMLWESGVSEVYVGYPEDIAHDQQSEYVVSVWGYRRLVQRLAEVLAEYGIKLYVVDEHSTSRACSICGEIHENGRVYRGLYVCRKFGVALNADVNAARNIAANLGFETPAPRRIETYYPTSNGLTPKRGNGRDPHSAAPAL

SEQ ID NO: 35395 - protein, 413 aa, Pyrobaculum sp.
MYAYRTLRVEIPWRLVEERPDVLDLVTRMRLAAEEYVRRLLKEVTGQEESGLTAEELDRLLTPDRRELAVKIIEEVFPKYDLKKYFVNQGKVFWRDVVFHRAVPLDAQLRIENERDVGRAVFVDLRSEVLKVRRLNETFVVRLRRNDIAWIRERLEEGAKLKLAFLGVERRRGREPTYGKLYIALVFARETAPVEPKAVVAVDVNRLDHGIMVGLLVDGKIVRRMRLLDEGAVRELRRLHEEISRLDERAAREADPARKRRLEDRARHLASKRFRKMRDVVIRIAGEIIKLAREHQAVIVLDTMEDESYRELKEGDGSGVRKHFLDGLGQLRRRLQTLAEWYGLPYLEERLYSTICPRCGAKMEGLSNRRMHCPSCGFSDHRDNVPLIWAKKRYWELLQKQPAFSATILLLTS

SEQ ID NO: 35396 - protein, 417 aa, Pyrobaculum sp.
MYAYRTLRVEIPWRLVEKRPDVLDLVTRMYLAVEEYARRLLKEIAGQEEPKLTAEELDRLLTPERRELARRIIEEVFPKYGLKKYFVKQAKMFWRDAAFWRTVPLDAQLRVENEKDVSRSVFVDLKSGVLKVRKLGIPPFAVKLKKSNVAWIRRRLEEGARLKLAFLGVEKRGGEKEPTYGRLYVALVFAREAAPVEPRAIVVVDVNRLDHGVVVGLVVDGKVVKRKRLPDEGAVRGLRKLHEEISRLDERAAREADPVRRRRLEDRARHLASKRYRKIRGVVKDVVSEIIKLAREHQAAVVVDTIEDESYRELKEGNGSGEKKHLLDGLGQLRRRLQALTEWYGLPYLEERLYSTVCPRCGAKMEERKRVMRCPSCGFSDHRDNVPLLWAKRRYWEILQKQPVFSSTLATITLLSL

SEQ ID NO: 35397 - protein, 420 aa, Pyrobaculum sp.
MGVYRALKIRLPYRLVEERPDVLDLAVRMHLAAEEYARRLLKELTGQEELKLTPEELDALLTPDKKELAHRIIEETFPKYGLRKYFIDQAKVFWRDVVFHRMIPLNAQLRIENERDRSKAVFVDLKNGVIKVRRLEGTFVIRIREKTAKWIRERIAEGAKLKLAFLGIERQRGKREPTYRKFYVALVFAREVTPVEPRGVVAVDVNRLDHGIVAGLLVDGKLRHTLRLPGERAIKELKRLHEEISRLDERAAGEADPAKRRQLEDRVRYLKSKRYRKIRGVVKDVVGEIIKLAREHQAAIVVDTMEEETYRELKEGSWSGEKKHLLDGLGQLRRRLKELAEWYGLPYLEERLYSTVCPRCGAEMEELNNRRMRCPSCGFNDDRDNIPLLWAKRLYNELIAKAVAGAQTTSAQMALSQTQN

SEQ ID NO: 35398 - protein, 476 aa, Pyrobaculum sp.
MAELVKRAEERRGRGGRRAGGELKRKMAPAGGHPAQMPPTRTVRLRLLPTTPQERKLHRLANTAAKAWNEVNYLRRRQFFAKQGVDLRGTYNEIYNRYRRILAPAALQQILNKNNEAWLGFFALLAKLNAGELPPHVKKVSPPGYWKDRLLGRRVKRLVVRSDRYYVEPVNGGEGYIVLKDFGMRVRYAGRIKWSGKQGRLEIVYERGRWFAYLTVEVGAQPPAGNPKGYVRGTYDRIQIKQPKGDKKAFIDIGINNLFAAVIEGSDRAILIKGTPLKAEYFWWKRQKALYQGVRDVRRNLGLPWQSWHRRYLRALWRMRERLRHYRNTAVRGLAEVLWESGVSEVYVGYPEDIAHDQQNEYVVNVWGYKKLVQRLTEVLAEYGIKLYAADEHSTSKTCSICGEIHENGRVHRGLYVCKRFNVALNADINAARNIAANLGFKTPAPKKIEAYYPTSNGLTPKRGNGRDPHSAAPAL

SEQ ID NO: 35399 - protein, 232 aa, Pyrobaculum sp.
LRRGVRIALPLAFGNRQKQFIEETLQGLWELDSVELVKRDGVWFAHFKIKKNVVTYGAEEAKTLIGVDLGEWNAVAAVAISRDSPSKPMRGQFWGGQRIRFVRGKYAHIRRSLQRKNRLDLVKRIGSKEGRTVNQMLHEIAKGVVEYAKQFPKPVIVMEDLEGIRDRISGSNKLLNRRLHSWSFRKLQKYIEYKALLSGIPIVYVKPKNTSRTCHRCRFAADEVKGRGFKPG

SEQ ID NO: 35400 - protein, 364 aa, unknown
  TnpB Polypeptide
  misc_feature (347)..(348): Xaa can be any naturally occurring amino acid
  misc_feature (352)..(352): Xaa can be any naturally occurring amino acid
MAIQVTRTYVGDIQNHQQVQSDLDSLGDAASKIWNVARWTADRVWEATDEIPDEGTLKAYMKTRDCWKDLNAFSSQKVIEELSDAFQSWFDVRQKDETANPPGYRKEYDTRPRSTVTFKDNSFKHDPEHNRVRLSKGANLKDGWGDFVLCEYDTRNDVEFSTVDTVQNVRVVWNGEQWQVHFVVKETIETLDSPGDGIAGVDFGVSNIAAVAYPNEYVLYPGNTIKQDTHYFQRKEYNTEGENGPSQQAQRLRQKRTRRETHFYHTLTKTIIEECVDRDVGTLVVGWPEDVRSDDLGKTNNKWLHTWAFDRLYQYLAYKGEERGIEVLKENEWNTSKTCCKCGDTAXXVTVXSVVCTYATPAGW

SEQ ID NO: 35401 - protein, 398 aa, unknown
  TnpB Polypeptide
MLQDLAEEYRFQILAMEVMPDHIHMLVDCRPQFYISDMIKIMKGNLARQMFLLHPELKKELWGGHLWNPSYYAVTVSDRSREQVSAYIEGQKEKEKRKPEYRDHSGNVWFLRERWKKMRTVSSYGVEIRKQNIPARQTMEIYRQAVGYLTEIYAQVWEELRKIPETKKRFNTAEHMVHMTKKNTARFDFDLRFPKMPSYLRRSAIQHALGSVSSYETRLGQWKETGVLSGRPKLTCRNHAMPVFYRDVMYREGAEGTDEAYLKLYDGHDWKWFRVYLKRTDMEYLRRNWKGKKTSAPALEKRHRRYFLRFSCTEEVTLTKTPVKEQIICSVDLGINTDAVCTIMRSDGTVLGRRFIDHPSEKDRMYALGRIRRFQREHGSAQTQGKMGIYETSEHRTG

SEQ ID NO: 35402 - protein, 410 aa, unknown
  TnpB Polypeptide
MLLGFKTELDLNNRQRTLASQHAGVARHAYNWGLAICKRAIEEKQKIPTAIDLHKRLVAEVKKENPWYYQVSKCAPQQALRNLEIGFKKWKEKKARFPVFKKKGRRDSFYLEGNIRISGNRIKVPIFGWLKCHEQLPAACPKNVIISRRADRWFISFKFEVPEPELREKKEEVVGVDLGVNNLATCSNGRVFTNPKPHRRLKKRLKRLQRQVSRRKKDSQNRKKAVKRLAKVHKRIADIRNDNLHKITTYLAKRYKVVVIEDLNVSGMLKNHKLAGSVADCGFYEFKRQLEYKTKLYDCQLVVADRFYPSSQLCFRCNHRQKMPLKQRVFKCESCGFGPIDRDLNAALNLVKWYFEVYLRSITTPSSGESYACGDSSAGVVEVNSVTRYELLKQEESSNTGQSSVLFSVA

SEQ ID NO: 35403 - protein, 444 aa, unknown
  TnpB Polypeptide
MKLRKFTVVAQLHKEQNYDLIEYVESCFATYNKAKRETFHVIKRDTDFNKSEFNTYLQTKYGILARTANSIISDAYGTLNALRSLRQYEKSQLEHKILSLEVLVSKLEVKVARNKNLLRLNDKSVSLFIHHNLKQKLVAKKNQLNHKKQKLENLSYQIENGVYKMCFGTKYLLNHDYAKFVEHRDSQMSFIGDRSRYAGNQIIQLSYNHQNNQFDIKLRKDIGGFKDKRGCCVMGKVHFNHHKQELISILRNRNSPLSYKIVKKNGRYYLYCTFEIQRDDTSFITHSSCGVIGLDFNKGFVTLTETNQYGHMIDIGLIKYRFKKGNATQTDLEFIANLVNKRALLTGKDIVIENLDFKDTKAKTVSSDDKGKKYNDMLHSLAYSKFVCIMENVCYRNYVWLRKVNPAWTSWIAKQKYCPKMKLNVHTGASFVIARRGQGYTDRV

SEQ ID NO: 35404 - protein, 402 aa, unknown
  TnpB Polypeptide
MLVYEYKLQGKDKQFQALEEVIRTTQFVRNKCIRYWKDNRGVNPYDLYQYCAVLAKEYDFAKKLNSQARQAASERASSAIMRFYKNCKDKSIKKKGYPQFQKDCRSVEYKTTGWKLSDDSRRITLKDGFGAGTFRLVDKRIRTRDLSAFNREQIKRVRVVRKADGFYVQFCLDVDRKEELAPSGKTLGLDMGLSSFYTDSNGEKVECPKFLRKAEKRIKFLQRRVSRKHKGSANRKKAKNRLARKHLQVQRQRKDFAVKAARCVVASNDVVAFEDLAVRNMVKNHHLAKSIMDASWSLFRNYLVYYGKVYGRVTVAVPPQYTSQDCSACGKRVKKSLSERTHACSCGCILDRDENAALNILAKGLEQANILITNILITNILITNILINGTDGQSETEVMKVA

SEQ ID NO: 35405 - protein, 369 aa, unknown
  TnpB Polypeptide
MKTYKYKFSHQSNIIMLGNLIDDLHNVHVHLLRLQRRYYRLYGGYIPLKRILKHITKLKRTTKPHWHQLPSQMIQDVAIRIDLGYQRFFDNIEDRKLGKTTKKIGKPKIKPNHKYKSVTFTQAGYKIEGNRLTINCLKKSFTFWKHREWTGMIKKVTIKRDNVGDYYLHLTCEDCEPTEKLPLTGSEAGADFGCKTFLTLSDGTEIKSPQFYKQGLNAIRSANKALSRKQYLSNGWYRAKRYLSCIHKKIADSRRDWFFKLALRLVRKYDKIAIETLNLEGMKRLWGRKISDLAFGEFSLILQWTCAKYGKTFLKSGRWEATTKPCSDCGYHNENLTLDDREWICPECGSHHDRDVNAAKNILQAGVPA

SEQ ID NO: 35406 - protein, 334 aa, Microcystis sp.
MKLVQKHLIKFNHKNYSVIDKLGFLSKNLYNCAVYLNRQVFFSHQPFLTMTELHHALKMSPDYQALPAKVSQLVLKQVEKTFKSYQKAKEQYKKSPDKFTGEPKLPRYKDKEKGRNVLTYNYQAISKKALKQGLIKLSGTNLEFKTNLKEVLEVRIIPKLGAYCLEIVYEQPSSSSQEGERYAFIDLGLNNLAAVTSNIPEFQPTLVCGKALKSCNQKYNKTLAKLKSELPSLQKTSKRIQGLTLKRNCQVDYYLHTASKYIIDKLLAHQINLLVIGHNQGWKQNINIGDRNNQSFVNIPHSRFIEQLTYKANLVGIEVQTTNESYTSKCSFLD

SEQ ID NO: 35407 - protein, 295 aa, unknown
  TnpB Polypeptide
VKLLSISREIFQKPSFYVNYESLRRVNGGFRGEKLGFVKTTQPLPRIPKGSHYKNPRISFDGKYWYLSFSYEVLDISVDLTDLVIGVDLGVKNLATLSTGEFIENINKSRRVKQLEKQLRREQRHLARQMQANTKGYLTTANGSRKPIYKRPLELCSNIQETKRKIKLIHRKLHSIRMNHLHQTTFHLVKQLPKGIVIEDLNVKGMLKNKHLAKHIQNAMFYEFRRQLEYKCLQYGIYLVVADRFYPSSKTCSYCGSIKSDLKLKERVYKCDSCGLEKDRDLNAAENLAYYFYRG

SEQ ID NO: 35408 - protein, 487 aa, unknown
  TnpB Polypeptide
VIAPHIESISAAFDRGAVHSLNEQDLLRSGCFSDSRVILVREFSETMNQLITAKLKLNLTAEQKLAVRDTALAYRDALNYTAMVAFDSSKSSNGTKLQKLVYNHLRSEFRLGAQMACNVPRQVAATFKSLATKLKQNNEAIKKGHTKKRFKGLDKAPKYASRTVTLNYQRDYTFKFDQQVSIGTLNGRIVVHYEGWNKHLESIQTCSNIGAAKIVYQRSSKIYYLMVSLEIELLDINPTNITRISGIDVGMRYLAVETDLNNKSAFYSGKAYRHKANQYQKARRSLQRKDTRSAKRRLIALSGRERRFIADVNHQISKKIAKPNSLIGLENLTGIRDRTKSKSGNSASKKQRRANRNKAKWSFAELHGYIDYKANLAGSLATKVLAHYTSQSCPKCGHTSKANRPNKGLMFRCECCGHELHADLIGARNIAMRTLLVRQDWTSTGSLSVSPDVSRNETKADILQSFSELRWSVDTSPHHIGTPIDDG

SEQ ID NO: 35409 - protein, 398 aa, unknown
  TnpB Polypeptide
MHLAFISLFLYFERRIMTKTIKRSYRFRIYPNPSQKELIEKTLGCCRQVYNDFLSMCIESYEADKSYTIKKYDLINLLPEYKKTFPYLKEVDSVALQQTVVHLYDAYTNFFKHNAEFPKFKKKKNDYGYTTMNINNSIRFVADDIQIPKLGRVKVKLHRRLPESFKLTMASVSRKGKYYYVSLSGEEEYLDYGEYIKESLNPNDSIGLDFSLAHLFVDSNGNHLDMPTYYQDSLTKLAKEERKLSRMKKDSSHYQKQLLRVKNLHEHIANQRKDFLHKVSRKLANTYDYVFVENLDLQEMSKRKPDLKLGITIFDLGYGIFLNYLKYKLEWLNKKLVKVDKFFPSSQLCSCCNYRKTDLTLAQRSWTCPECRTKHNRDLNAAINIKKEGTRMILNPSN

SEQ ID NO: 35410 - protein, 365 aa, Methanosphaera sp.
MKTRLLTNKCRIKPNKQQEDFLLSQLENCDFVYNNLYKQYQQDLKEDLENHIVATYKNEYFYKHLEKLIEENPKLKTTNKHVLVDVYHRLLQSINAKNNVLTDTTDKHILRSFKIPKYDFQIINSYFHHNNQRFKLRNFRKFDGKILHAIISYKRYEWHISIVYAINVKQLPKTGKAIGIDLGIDHFATLSDGRTIDMPDIEYYNDKIRNCYHKINQTIPGSQNNKRLKIQLQKNFTKKVNIKENFLHQLSMELVREYDIICVEMLEIQDILVNSNVPNKNILENDWQKFIRMLDYKSEFYMKDLVHIDRYFPSSKRCNVCGYMHQNMPLSVRTWECPSCHTKHNRDVNAAKNILNEGLRSINKH

SEQ ID NO: 35411 - protein, 458 aa, Moorea sp.
MPKKVGATKKISTQIVPVVGMAKSVEIELLSTMKKLGVVRSESYNKLGSINHWGLDWKKAYPEVRSFRSPESLGLPSKLMEWTVSDVAKAITASQAACTEAVIKKVYKRFPGKDDQKKRKELCKQLKTVAFLDNSLLHRFVRKEFQRGHSWVKNQIVYQQGGYKCQRLSRNTYQLELAGLKRGNRNRIVVRSNRKIKGQIRLIHNQLLQRFEIHFLVDYGTVGIPTERRSVGVDKGYTEAFYDSEGQAYGEELGKIATKKSVRVAWPFGHRICAKNRNRGKLWALHIKLEKIDPAKSARILENNLTRKTENRRYRKNQSELTAIIGAASKSLLNGESLKVFAEDLTQPIKNKRQSKAVSRKLNSWMKGVMRDSLQKWADWTGSVVTEVQPSYTSQIDSRNGTLLGKRTGDNFTGFDGVVLCGLFLVGAAYPRQGMTRGFAGKTPNSNYLMDGGESPPH

SEQ ID NO: 35412 - protein, 403 aa, unknown
  TnpB Polypeptide
MKKASHSQSTKRQAALGVVTRVLRLRLKDKHAKHLLEQSREVNQVWNFSQDLALKVFEREHRFMSAYDMAAYTKGAAKEGLSLHSQTVQAVSEEYVTRRKQFKKVKLRWRVSHGTRRSLGWIPVKASALSYRAGQVHYQGKALSLWDSYGLADYQLRSGSFSEDSRGRWYLNVSVDVKQPAKTVGASAIGIDLGLKDFAALSNGQTVEAQQFYRDLEPALAVAQRAGKKDRTKAIHAKISNRRKDFLHKLSTEIVKEHGAIFVGNVNAAGLAKTNMAKSVLDAGWSTFRSMLQYKGDSAGSWVREVNEAWSTQECSCCHARTGPKGLAGLGVRRWTCSECKAEHDRDTNAARNILARGLRELAKEFSMAGEAKACEAAMNKDGQLSQVGYDLPVAGIIAPSGR

SEQ ID NO: 35413 - protein, 370 aa, unknown
  TnpB Polypeptide
MRKTFKYRLYPNKQQQRLLEQQLEECRWLYNELLAARRDAWEQRLESLRLYDQQATLPMLKAARPTLARVQSQVLQNVAVRIDLAFQAFFRRVRAGETPGYPRFRGSGRYESITYPQVPVGCKLDTEARRLRLHGAGLVKILLHRPLEGTPKTATITRSSTGKWYICFSCECAEPSPLPTTGQPVGIDVGLKTFAALSTGDEVANPRFFQAEEKALAKVQRRLSKEEKGTPERGARRKVVARVHERIAWRRDDFTHQHSRRIVDTFDLIAVEDLSVNRMTHNPCLAKSIHDAAWSQFTALIAYKAAWAGRQYVAVNPAYSSQDCSQCGHRQTLSLSDRTYICPCCGVVLDRDYNASLNILRLGQQSLAAA

SEQ ID NO: 35414 - protein, 342 aa, Streptomyces sp.
MDVIGVAVELLQLGLEVRADLHFFAGLKGKRPTMGPPRFKSRKDNRQSIRFTANAGWKITPGGKLRLPKIGDIAVKWSRPLPSVPSTVTVIKDAAGRYFASFVVETEPSEVLPETVPEVGIDLGLSHFAILSDGTKIDSPRFLRRAEKKLKKAQQALSRKAKGTNNRGKARLKVARAHARVADARREFHHQLSTKIIRDNQAVAVEDLAVKGLARTRLAKSVHDAGWSAFVAMLEYKAARYGRTFVRIGRFEPTSQLCSACGVKHGPKPPNVREWTCEACGAVLDRDINAALNVAKAAGLAVPACRARVGQGPIPAQREETGTHPKPHPTTVQQAGISFLSL

SEQ ID NO: 35415 - protein, 369 aa, Bacillus sp.
MKSEVEVMLKAYKYRIYPNNEQRLFFAKTFGCVRFVYNKMLADRIDSYEESQKNMDKSIKYPTPAQYKGDFPFLKEVDSLALANAQLNLNKAYANFFRDKSVGFPRFKSKKDNHRSYTTNNQKGTVCIENGYIKLPKLKTLVRIKQHRQFLGMIKSATISQTPTGKYFVSILVEENEQLFPKIDTKVGIDVGLKDFAILSNGTKYGNPKWLRKAEKRLAFLQRSLSRKKKGSSNRNKARLQVARLHEKIANQRNDFLHKVTNEITNENQVIVIEDLKVKNMQKNHKLAKAISEVSWAKFREYLDYKAIWKGRDLIIAPKNYASSQLCSCCGYKNKDVKNLNLREWDCPSCDIHHDRDVNASINLLKLAM

SEQ ID NO: 35416 - protein, 484 aa, Thermofilum sp.
MGAAARGPASQVKGGETMSGEGKGSRNGEKRVEAFRVWEVKANRAVRLRLRSLYFSVASAVERACEDLERKYGDAFRREPERFGRELIEEASKTSGLPKGLLWYAVEWCKMLAEAREKSKKRSRFTPPPIPLLVKVVSGGIVLHGGDNAAAALNASKGELRIPSVGVAVRLRPSLIRAVLEDTQRFEDVKLTLWLTSKGRLRLVAHRAVRPAWWDGNSKLAVIAIDVNSSHGLYMMVFAFDGGAKLLAQRVLRSPNMTMLRLLAAIMRSYSKLGSWELAVRRFRQQRDVEKLQRMGRGYAVEEALRLAERLRAKMNLTPEKAERIARQASRKVRKVNDDWIRSVLREMRSLVRRLRDRGYLVVIVADVPRAESLKGSQLQRTLLRVAERLKNLALYEGAKYFEPDNNVSGRQCPVCGARGVELGKRYYRCSKCGLVYGRDWAACANAAKLFLEACDAEKQLEALRSWLRTSRALVHGAPRSIAR

SEQ ID NO: 35417 - protein, 399 aa, unknown
  TnpB Polypeptide
MKYRAYKYKLYPNEEQKVLIAKHLGSCRFIYNYALDKKVRAYQTDKTNLSRFDIQADLPNMKKSEEYCWLKEVNSLSLQASLANLDSAYTKFFREHKGFPRFKSKKDSKQSFSIPQNTRVDFENGRIFIPKFKGGIKTKFHRTFEGIVKSSTISRTATGKYFVSILVEVNEPDVPMKPICENKAVGIDLGIKTFAVLSDGTEIPNPKHLKQSLDKVKKLQRSLSYKNKGSKNRDKARRKLALAHEQVTNRRNDFLHKVTSYLVNNYDTICLEDLNVKGMVKNHHLAQALEDIAIGTFNTLLEYKAKERGVNILRIGRFEPSSKMCTCGYINHNLTLAMREWICPKCGSIHDRDLLAANNIKRFAFRNINTVGTTEIYACGDMSEDAHSAQEAHESSVRG

SEQ ID NO: 35418 - protein, 424 aa, unknown
  TnpB Polypeptide
MKITSTYSVRLRNFNRVFDDTVEVYRHAVDYFIELVIANWNTHFANLSRANDCIRVAEGLSVRTKKRPMTPYNFCHDFEKFPSYLRRVAIKAAYGQVSSYQTRLAQWKAKPGQKGRQPGLPKAGRSFPVMYRDNTFIRAGRNSVKLKVRIRNTWDWVDVELDKHDVDYIALHCATRNELSPALRKRGKKWYLDFSFEEKVILDKVSLDTQRVLGVDLGINNACVCSVMDSKGTIIGRRFKKLPVEQDSLERALRRIRKAQSNGAKRMPRLWARAKGVNKDIAVKTAGFIMTVANEFKVDVIVMEHLDLAGPTESESTSRHRLTAASFMAAVSPLWTTPVSPTASSVTALVGAVGVPLAGRRTKASKIIGRHLPLLGAPDWSEGESPPLSFLPQPHRPPEGRGPPGRSPPQWRPGPKERSHLPAG

SEQ ID NO: 35419 - protein, 449 aa, unknown
  TnpB Polypeptide
MQQILTAKLKLITTPEQFAALRQTQLAYRDALNAVSQYAFAHGKTSSVTILHKGMYLTLRTRFSLLSQLACSVERQVAATYKGLWTKLKKNSEHRRMKLTKKRFKGLDQPPHYSSPTVQYTYERDYTFQKEQRVSIGTLNGRISIPYQGYDKHLALIRQGATIGDAKLWYDRPKKRFYLLVSLTIELADPTCDQASEVVGVDVGIRYLAVTSTSTGKSTFHPGKRIRHKANHYARLRKRLQKKGTRDAKRRLRRIAQRERRFKIQANHCIAKQIIEQHPHTLFGLEHLTDIRERTKRKKRKRKKNGKGSEPVSPKARKANRVYSQWSFAELQALISYKAALAGSLAIKVDANYTSKTCPMCGHTVDENRPHKGLLFICQRCGYCLHADLVGARNITMRTLLVRQDWIRTGCLSIIPDASDREAKAARLSRYAEVRWSPEVNRRSQTGGH

SEQ ID NO: 35420 - protein, 415 aa, Chloroflexi sp.
MKRPLNARFRGGHVHCLFIHKIAHDLFPAFLQDDTVVTDLKRQPDYTWLKEADSQVLQAKIEDLDRAFENLFERRANYPRFKSKKDQQSIRYPQRFKFNGNRIYLPKVGWVKAVFHRSLEGMPKNITVSKTKSGEYYVSVQCEMEMDVSPNGKPAVGVDLGLKHFAVLSTGEKVEHPQYLRRSEQRLRRLQRRLSRKKKGSHNREKARLLVARQHEHVARQRADFLHKLSHRLVTQYGMIRLETLNVNGMLKNRSLAKSISDSGWGMFGQFCEYKAAWYGSDVQRVGRFFPSSKACHVCGLINDKLSLPDRFWTCQGCGTEHDRDCNAAINLLNRPTVGAIGRKSPGRPCKTSEPIGKAQRSPNREAKGRHRGLPLLLAFGSSRDPSGTRGQFRPDNINEQVAVHDLKILSRLTA

SEQ ID NO: 35421 - protein, 367 aa, Ruminococcus sp.
MLKAYKYRVYPNNEQKMQIAKTFGCCRFVYNQTLAYRKEAYEKEKKTISKTGCNNYCNRELKKTYEWLKEVDKFALTNAIYNMDSAYQKFFKEHTGYPKFKSKHDTHKSYTTNFTNGNIAVDLENGKIKLPKLKEVKAKLHREFHGKIKSATVSQVPSGKYYVSILVETEHEKLPHRNQNIGLDLGIKDLCITSDGIRYENPKIIKKNERKLSRLQRQLEYKEKGSRNYEKKKKEIAICHEKITNSRKDYLHKISHEIVSENQVIVSENLQIKNMVKNHHLAKSISDVSWYELTRQLEYKSKWNGREYVKIDTFYASSQLCFACGYQNTDTKDLSVREWICPNCGTKQDRDINAAKNILAEGLRQIA

SEQ ID NO: 35422 - protein, 386 aa, Saccharopolyspora sp.
VQLRYSFRLYPTSGQQAALAKAFGCARVVFNDAVRARHDAYQAGSPVPKAAELSRLLITRAKKTAERWWLAEVSAVVLQQALRDAEQAFRNFFDSLAGKRKGRRMGAPRFKTRRDVRQSIRFTANARWSTTSGGKLRLPKIGDVAVKWSRVLVGKPSSVTVIKDVAGRYFASFVVDTDPEAITDAAPEIGVDLGLKHFVVLSDGTKVTAPKFLRRAEKKLKRAQQALSRKEKGSKNRDKARQRLARAHARVADARRDFHHQLSTRLIRENQAVAVEDLAVSGLARTRLAKSVHDAGWSGFVAMLEYKAVLYGRKVVRIGRFEPTSQVCSHCGVKDGPKPLHVRVWQCEACGVWLDRDINAAVNIAKAAGLAVTACGAHVRPPEFGG

SEQ ID NO: 35423 - protein, 374 aa, Clostridium sp.
LLKARKIRLLPTKEQEILMFKSIGCSRFTYNWALNKCILAYEQGEKYSMSNIRKEFTKLKKKEDFKWLNEVSNKTMVESMRNLDKAFKSFFKNKSCYPKFKTKRKSSKSFYVRYEHLYFKDNICNIEKIGKVKFKTNYKIPSCNYSNPYCSFDGKYWYLSFGIEVEENQTTLNEDLSIGIDLGIKDLATINVLDKPIKNINKTKRVKKLNKRLRRLQRQVSRKYEANKEGNKFIKTNNIIKLEKQIKLLYRKLSNIRNNHIHQATNKIIKMYPFRIVMESLNIGGMMKNKHLSKAIAEQGFYEFIRKIKYKCKFNKIKFIQVDKFYPSSKTCSCCGSIKKDLKLKDRVYRCEKCGLEIDRDKNASINLGNYGLV

SEQ ID NO: 35424 - protein, 209 aa, unknown
  TnpB Polypeptide
MSNGDFVEPLNPFKQEQEKLAKLQRKLARQKKGSRNSRKTKRKIARLHRYIANSRRDFLHKTSTKIAKNHSIIYVEDLKVSNMSASASGTKESPGKNVRQKSGLNRSILDQGWYSFFQMLSYKLERGGGKLIKVDPRNTSRTCPRCGFVSAENRKSQATFACIGCGYRSNADEVGAINILRAGRARLACGMSGAVRPLSAGTQRDLLQH

SEQ ID NO: 35425 - protein, 558 aa, unknown
  TnpB Polypeptide
MVNKQNDSKNQVIKYIEEQKKIMNDEEYKKYLKQFHKLSDRHILAAETDMSSSDIQKVVMLSDKIRKAGNELVCLMRKNYNQLIRTKKYRKLLKLYGSTEDKEKRKSLAKQLNDMQKAYDVTWDFCRTSMIPIGKKYGIDAVFALTKAEDVWRGVEKCLYGNGKMIHFSKYGELPCIRAKQINRGIPILVKNDILQFKLGNTVFSIKITDRFQTDEVNAVLSYLAEPELMNIKAVNTLLNEAYCIDTFRPCYATLVPKTIRGKHRVYLHLTIEGKAKPKYDKLDNPRYKYGNGIIGADIGAQTVAYTSDTEVGLKNLSERGNNIQVSERLERLYYRAMDRSRRATNPQNYNEDGTVKKGKKSWKYSKHYKKLRAKHSELCRINVVNRQLAINEDVNHLRSLGDTFITEPKNASKLMKRTKETTKNSKGRFNRKKRFGKSIKNRCPGGFQTAVEKKFKVSGGTYIEVPNNYRASQYDHTADDYIKKKLSDRLYKLRDGTLVQRDWYSSFLLSCYDYKTKDINKDKCNMDFDKCYTKEKDLISWIKTNKIKVLNSGIKVA

SEQ ID NO: 35426 - protein, 200 aa, Salmonella sp.
MKRAYKYRFYPTTEQAELLAQTFGCVRFVYNSILRWRTDAYYERKEKIGYLQANARLTALKKEPEFAWLNDVSCVPLQQSLRHQQTAFANFFAGRAAYPAFKSKRHKQAAEFTASAFKYRDGKLYMAKNKIPLDVRWSRPLPSVPSTVTISKDAAGRYFVSCLCEFEPGTTPAPVKQKGQRLKEPRQSPLKGSPTPRENC

SEQ ID NO: 35427 - protein, 218 aa, unknown
  TnpB Polypeptide
MASISEQNTPNEEPQRNTSSTNVTIVQEQPAPTPDANTGEADGQAVMGVDLGIKVPAVAHVSGKGTRFFGNGRSQRSMRRRFYSRRKKLQKAKKTRAVKKSKGKEARWMKNINHQLSRQIVNHAHEQGVGTIKVESLAGIRKDTTRTSGGAKARKNNRMRNSWSFYQLTMFLTSKAERLGINGEQVDPAYTSQECPACSARNKAQDRTYVCADCGWAA

SEQ ID NO: 35428 - protein, 378 aa, Microcoleus sp.
MLVLEFKAYAKPNQFQSIDEAIRICQFIRNKSIRLWMDGGAKSWFDLSKYCAIWAKEFDFANKLGAMARQASAERAWASISRFYENIKKGIKGKKVGFPKFQKDSRSVEYKTNSWKLAADRKSITFTDKCSIGKLKLKGTRDLNFYQPDQIKRIRLIKRADGYYVQFCIQVDRVELVPMTGKTIGLDVGLKEFYTDSNGEMVPNPRFLRRGEARLKRAGRLVSRKVKGGLNRRKARVILGKRHLKISRQRKDHAVKLARCVITSNDVVVYEDLRVSNMIKNHCLAKSISDASWYQFRMFLEYFGKVFGRITIAVNPAYTSQECSSCGVVVKKSLSTRTHICQCGCEMDRDHNAAINILNRGISTTGHVGTSIFEIVNA

SEQ ID NO: 35429 - protein, 405 aa, Microcoleus sp.
MQLVERHIIKPNHRFYREADRLSWLCKNLYNSANYIYRQNFFANQQTNALAVYHAIKASEDYKALPAKVAQTTLGLVLKAWTSYHLAVRNYQEDPIKFKAPPQIPHYKGAREHKRADGRYVVVFNCQAVSKRALKKGYARPSGTNIWLPSKVTSILEIRIVPKVGCYIVEVVYEKLEQPLQVNQRVSAIDLGLNNLATLTYNVAGLVPKIYDGRAIKSTNQYCNQASATLKSLLPAAQKNSKKLVKLWHKRNCKVDYYLHTTSSAIIKELVNHQIGLLVVGWNQDFKDGINPGLVDGQKFASIPHRRFVQMLQYKAQLAGIKVVLVEESYTSICSALDLEAIQKKSEYIGCRLKRGLFRTKTGQLINADVNGSLNIGRKAVGNGFIPNSIEGFVVNPVRLKAYKH

SEQ ID NO: 35430 - protein, 544 aa, Microcoleus sp.
MSLVSGLAPKHRDKNTQMKGKSKASKTALDKDSTMSSPTGAVQLELPLFANVGSVQPSNETTLLGKLNSCENNIKQPKSSKISVLDSISKGKDCKPYWSDLCAQISSKLLLPLETGCADSDLNYSSLWSNKTVEKSWFFQALYRVKKPNSQPIFLPSFISTVAECTDGEATAKKSRKIRIFLNADQKALLKRWFGVSRFVFNTTIKYLQEPGTKANWLAIKTGILNSLPDWAASIPFQIKSIAIKDACQAVKKAKADFKKDGQIRHCKFRSRKDTKQSVFIPKTAIKDCGIYHTILGQSKLKEALPKDFSDGRLTLAYGEYYLIVSEEVQPRQTDNQGRLVALDPGVRTFMTFISEDSYGYLGNDSNLQIQKLCFKLDKLISKMSKAPSAQKKRFKKASDRLKSRIQHMVKELHHKTAKFLVENFDVILLPSFESSEMVSKSRRKIRSKTVRQMLTLSHYQFKKHLEWKAWESGKVALTDINEAYTSKTVSWTGEIKQIGGSRVIKSADGQSMNRDLNGARGIFTGEALVDTPWLKKHLNLCVC

SEQ ID NO: 35431 - protein, 296 aa, Deinococcus sp.
LSLYVVRKLDLPASPLLDHLARAAGELYSRTVVAYWRILRKTGTGKNGRKPVFLSQYGMERICISPDLHSYTSDAVVGNFYASIKSANTRKKKGSKEAKYPRRRKRFFKITWKSASIRLKKGQLILSNGKRNEPLVIPWAFDLPRQVEIGWKKTGGYELRATYVGVSPRPALGNGVAAVDQGELRTATVYDGEQTTLYSGRLIRSKSRYRAKAIARLDAEISKTKRGSQRRKKLVRAKRRTVGKLNRQIQDILHKQTQHLVSTLHQRGVQTVVIGDIRDIRSSIKYGAKTNQKLHG

SEQ ID NO: 35432 - protein, 310 aa, unknown
  TnpB Polypeptide
VKHGQTAGTQAGVQVPLLPAPEQEQLLRRTVGCCRKVYNLALEARSTAWTAERRSITYVQTSAMLTQWKQTAEYSYMNEVSCVPLQQALRHLQTAFSNFFKQTGDYPRFKAKSHGGSAEYTRSAFKWDAERNELTLAKMRGPLPIRWSRTLPRKTEPSTVTVSLDAAGRWHVSILVEENIKRLPKKNNAIGIDLGVDSYAVTSDGETIANPRHYRKLAQRLEREQQELSRKTKGSNNHRKAALKVARTYARITDMRRDFLHKLSTRIIRENQTVVLEDLNVKNMAKRCAPKPDPDNPNHWLPNGQSAKTG

SEQ ID NO: 35433 - protein, 285 aa, unknown
  TnpB Polypeptide
VKKVVQVKLLPTPEQAQALEATLRSCNAAATWIAETIHGTPARSAFNIQRAVYADAKLKFGLSAQPTVRAIKKAADAYKTLRANLQAGSYGRVGSPRRTKVEGKPVVFRPDAAQPFDDRCLSWQHQDRTVSIWTTTGRMRGLAYTGLSAHLDLLATNRQGESDLIRRGRNWFLIATVDLPDVAPADPAGGFVGVDLGIENIAVTHNPATGEHHDWSGKAVKDRRHKNRLLRTKLQKKGTKSAKRLLKARSRKETRFAADINHQISKTIVAEAKRTGCGIAVEDLT

SEQ ID NO: 35434 - protein, 382 aa, Halogeometricum sp.
MHIHRTYRAKILNHRQVEDSLDRHGWSASKLWNVANYHSRQVWEDTGEIPDDSDLKGELKTLPKYKGLHSQSSQRVLEELAEAFNSWYGKRKTDSRANPPGYRKRNYYDSEGRRVHEEHPRSTVTWKQKGIRHDTKNGRVRLSKGANHKEHPRAWEYILVDYETRPGVTVENLQQVRAVYDKAKGRWELHLVCKHEVETPDAPGKETAGVDLGICNFAAVAYSTEQADLYPGNRLKQDGYYFPKEIAKCDDSGGEEATRLHAKWSERRTHFFHSLAKHIVERCVEQEVGRINVGELAGVREDENGESKNWGRHGNLTCTGGRSTGSRRYSNTRRKSRASRSWKCRRATRAKRVASAVGKTTISVSNAAYTCVRNTTMRSTRT

SEQ ID NO: 35435 - protein, 470 aa, unknown
  TnpB Polypeptide
MDEEYSISQLCISISPFAAYNTFRYLSCFYRTDSNNNLRNPCWSNVKMKINKGIKVRIYPNKQQQELLNKTFGCCRFLHNKMLEERRTVYDTLKEEKDHLYAHKYKTEKQYKKEFPFLSEVDSKALQSETRNLLQAFQNFFRGIRTGKKIGYPKFKSKKKKQTYTTYNINNNIRINHKAKRIKLPKIGWVKYRDDRNVVHPIKHVTVSRTRTNKYYVAIIIEVEIDVEPITTIPLHRIEAFDMSAPNFLINENLELTNPRFYRNQERKLKRLHKLESRKQKGSKNREKARLRLARGYEKIQNQKMDWTHKLTHSLSNQFDAIILEDLNIQGMQQFNSGLSKSVTLDFSWYQFISYLRYKLEWQGKPLVLVDRFFPSSKRCSVCGQINNDLQLSKRTWTCQCGATHHRDVNASTNIKEEGLQILHDQGITIINDNHATVGTTESHASGDYVRPALAGSGQGRRNPLAFRQW

SEQ ID NO: 35436 - protein, 371 aa, unknown
  TnpB Polypeptide
MLLNLKYEIFPNIEQREMLDRWLQYCRQTYNSALLDKERKYKQNKGNYNRYDMQRQQTLDKKNYPFLKKMSSQPLQEVFQRLTKAFDNFFRKNAKYPKLKTYKDYTSMTFPQFGFNKKGNRMAMSFSDNGKLYNTKLGEIDILLHRPLEGTIKQLILKRQGKRWYAIFCVERQVLPTIIDINHAIGIDVGLYKYAVLSNGSEYENPRFLRKKEKQLKKAQHKLSKKKKGSTNYIKQVQRVRQLHEKVANQRKDFLHKLSYNLSKDYSVIAVENLNIRNMVRNRKLAKSISDAGWGMFRNMLAYKCEKDGGTLIKVEPTFTSQDCSCCGNRVKKSLSIRTHICTKCGTVLDRDHNASLNILQKALEELLLAN

SEQ ID NO: 35437 - protein, 408 aa, unknown
  TnpB Polypeptide
MPTRGVAFRLESDLPSEARFLMEDFRLAVNNAVRVGLQARVTSRNALNKLVYKDFRCNHPGMYAQHLVSAFEVAASVMKTYRKRIRAKAEPRTPYVKRLMMKTENQAYKLDRDSGIIDLPIRAGCHVKLKLVVSQYHRRYLDDPTLSLGSLTVLPDRVIVAFRKETPKLYAPESIISLDTNEGSLDGVCLQGNSSTVVKASFPEVAAIQRRHHDRRKKIQKKKAHDRRTSRTLCRREGMREHHRIDHRMHQVANTVLSFAEKHKSAIVLEEFRGMRYKKSKDKDLNRRLSLWPRRKLHQFIEYKAAWTGIPVVKVDPRYSSKKCPICGRIQDSRMCTLFECECGWCQDRHINASINLLQTAISKGLEVAGGLRFDPGAFQHDVMMILYDPVRGARSEPNGTRRVRAVT

SEQ ID NO: 35438 - protein, 338 aa, unknown
  TnpB Polypeptide
MLKAYKYRIYPNNEQKVQIEKTFGCCRFVYNQTLAYRKERYEKEKKSVSKTDCNNYCNRELKKEYEWLKEVDKFALTNAIYNMDSSYQKFFREHAGYPKFKSKHDNHKSYTTNFTNGNITVDFDGNKVKLPKLKGVKVKLHRKFSGQIKSATISQVPSGKYYVSVLVETEHVELPHTTQNTGIDLGIKDLCITSGGKKYENPKIIRKNEKKLEKLQRQLAHKEKKSQNYYKTKKKIALCHEKITNTRKDYLHKISHEIISENQVIVSENLQIKNMVKNHHLAKSISDVSWYELTRQLEYKAKWNGREYVKIDTFYASSQLCSVCGYQNTETKNLTVRE

SEQ ID NO: 35439 - protein, 398 aa, unknown
  TnpB Polypeptide
MNATMTTLRRVYRFRLEPTSTQEEGFRRYAGARRWVWNWALACRQEHYKATGKGLSRVALSALFTALKKEPDTAWLSEVDSQLPQQAIIDLYKAFETFFDHRARYPRFKSRKRDTARFRIPQRVTLTDGYLSVPKIGRVKVRQSQAVEGATKSATFKRDACGHWFVSLVAEMEMPTVALPLPTDQGTVGIDLGLKDAVVTSDSERVTAPRFYRAAQRQLRRAQRSQSRKVKGSANRAKARQRVARVHQQIAAKRNDFCHKLTTALVKNHDAVCIEDLNVKGLAKTKLAKSIVDASMGTIRRQLQYKGVWQRTHVVAVNRFYPSSKLCHECGYKHDGLTLSDRVWACPSCGCVLDRDLNAARNIKAEGLRILAAGHADSQNACGECVGRPMGAALAIPA

SEQ ID NO: 35440 - protein, 365 aa, unknown
  TnpB Polypeptide
MIRAYKFRVYPSKLQDMEMRKHLWLSKNLWNEMLEHTKEMYSAFGKFPTKKSLRQFTQKVGLYSQVGQELTDRLLDALKTKMRLKKSGVKGGFPRFKSFDRMKSLQYPQSGFTLGKKLVVTPFGELSIKQHREINGEVKTLSLKREASGKWYAIFTAECEITPKKNKGGRIGLDLGLKSLAVLSDGTVVKNPRHLRKHEVKLAFLQRNLSRCKKGSRNRYAAKHKVALLYEKVKNTRKDFLHKLSSSLVSKYSLISLENLASKELAEKNYGKSIHDAGWGMFANMVRYKAESAGCVAVFVDPKNTTKECSVCGALSKKELWERTHLCPNCGLSMDRDLNAAHVILKRATAGLAGCNAHGLAATVA

SEQ ID NO: 35441 - protein, 536 aa, Nocardiopsis sp.
MAGTGTRRLRTLADPFPAPAPSGVSVRDRLKGLTPEDEAVLRAVGAHLGSLASTDLAARCADGTGHDKDSWAARKRELTPESSSRWAGALTRASNEQWALARRSQAAHLHRLQAGIDTLRHRLSQPLGTKGARGAPGGYASRQEWHAKSRRLAALEHRYAVAVADWEVGRVHVVRGGKRLLNSRHHLDRAQLTEAGWRARWEAARFFLSADGESGKSYGNETIRITPEGQISIKLPAPLTEYANAPHGRYVLSGRVAFAHRGTEWVDRVEADGAVAYRIHLDTDRSRWYVSASWTLQAVPALPMQAALAHGVIGVDANADHLAAWRLDTCGNPIGNPHRFEFDLSGSASHRDAQVRYALSRLLRWATASGVRAIAVEDLDFAREKTREKHGRRKKFRRLVNGFPTARLRSRLVSMAHTLGVAVIAVDPAYTSRWGAQHWQKPLSTKRRKVSRHDAASIAVGRRAQGHPVRRRTAPPPHHRSDGVEHRTVQAAPGGSGREGNRPPVTERAHDARGRTEQERGDPAHPAPFGMGAVPA

SEQ ID NO: 35442 - protein, 268 aa, unknown
  TnpB Polypeptide
MFSLPVMGGRIKVKAQWKGTPDEYRTARFGTARLISKRGKWYLHIPIILQVPDPTPSPKNIVGVDLGIRMLATSYDGETTVFQHGGEVKSKRGKYKRLRQQLQKRGTRSARRRLKTIGDRENRWMTDVNHQASKALVNHYDRDTMFVLEDLTGIRNATEQVRVKDRYVQVSWSFHQFRQMVEYKAKRNGQKVVFVDPAYTSQTCPKCGKIRKANRDKKRHLYVCRNCGYRSNDDRIAAMNLRHKGYDLLNSQYAASMTDGVRVQSTTL

SEQ ID NO: 35443 - protein, 236 aa, unknown
  TnpB Polypeptide
MPDVYKIFNITVERTSTGKYYASICIETEVQPLHKTGKQVGFDLGLTDLLIGSDGTRYERPKFAYAYKDKLTKEQRKLSKMRTKLKRANLNIDECKNYQKQKHKVAKLYEHIANCAKDFNHKLSRKLVKEYDFIAMEHLNVSGLVKNPRLAYSIADVRWSQLLNFIKYKCLWYDKRFVQVDRFYASSKICSECGTYHKDIVNSLSVREWTCPDCGTHHDRDMNAARNILNQALSVA

SEQ ID NO: 35444 - protein, 399 aa, Lihuaxuella sp.
VFLKVPGFKIFEIVVFTLKPSVLFLKKRFGTISRIRKREGEIVRRTYKFKLEPTAEQIEIIEQTLDLCRWLYNSMLEQRKLAYQFRNVSLTLYTQKRELPKVKEAFPEFKQVYSQVLQDVCQRLDQTFQAFFRRLKKGEKAGYPRFRGKNRYDSFTYPQSGYKLEGKYLKLSKIGKVRIKLHRQMEGKLKTCTIRRKNGKYYACFSCEVKPVVHSTGKQVGVDLGVKHLATTSDGEFFEHPKYLSKAEKRLKYLQRMVSRRKKGSNRRRKAVAMLAKCHEYIANQRRDTAHKISRYLVDHFDFIAFEDLNIKGMTKNHHLAKSIADAGWRMLISFTTYKAEYAGKKVVGVDPRNTSQACSECGQIVSKTLSERTHQCPCGYIADRDVNAARNILKKALA

SEQ ID NO: 35445 - protein, 472 aa, Nocardia sp.
MISTPAPTAGSAADDAGCSRGSAVVGQGQTRRGDRVRANTALRFRVYPDRGQEERLTAWSHTCRAVWNTALAQRIWAYKSARRVTLRAVAQCKELTEARRAHEWLKDLPAQCAQQVLRQLDTAYDNFWNPNHPAGFPQFKKKSHRQGIPVPGQAIQVRQVSRRIAQVHLPKIGWVRFRLSRPIDGTIRNATIGRDGLGWHIAFGVHRFESVVPSVPPGPPVGVDMGIACSVFVSDEAAARQRPDLLTPGEQARLRGLERRRARQLAYAKRHNGGRHSNRLRRTIGQIAALNARQARRRADWNHKLTTDLANNHGLIAVEDLKVRDMMRSAAGTVEQPGRNVRQKSGLNRGIADQGWGEVRRQLEYKTRRRGGELIAVPAAGTSQTCRNCGVRDPRSRQGCGRLFACTGCGHTEHADHNAAHTILDRALSTAGRGGVCRGGSGGPQSTRSPRGRGTRRGSRSREPSSTIATAL

SEQ ID NO: 35446 - protein, 381 aa, Nocardia sp.
VQLRYNFRLYPTVGQQRSLAKAFGCARVVFNDALAARQEAFRAGCKISDSELSKRLTKAKRAPERVWLGEVSSVVLQQALADLNAAYRNFFGSVTGKRKGAKVAPPRFRSRKDNRQSIRFTKNARFAVTSGRKLWLPKIGDVAVRWSRELPSDPSSVTIIKDAAGRYFASFVVQVHDQLLPVSDSEVGIDLGLTTFAVLSNGKTIENPRFLRRAERKLRMAQQALSRKEKGSKNRAKVRVKVAKAHAKVADTRRDWAHKHSTQTIRDNQAVFVEDLCVKGLARTRLAKSVHDGGWGMFTRMLQEKAARCGRTFGKVDRWFPSTQMCSFCGALGGKKPLSVRAWTCACGTVHDRDLNAAKNILAAGRAESLNACGGTVSPAA

SEQ ID NO: 35447 - protein, 501 aa, Nocardiopsis sp.
MKTATEQHTGQQPKPEKKRDKRGFEPRPGWVVQAFVFALDSAAQTEQRLRSHCGASRAAYNWAISHVLAVWDQRKAEASYGIAEEELAPWRSWSLPSLRKEFNAAKHTDPRFAHWWADNSKEAYNTGLAGAAAAFDAYSKSKCGERAGARMGRPKFKSKHRSRLACRFTTGAIRCEDTRRHVVLPVVGRVRTHESTRKLHRRLANGTARILSATVSHRRGRWQVSFQVEIERAVRAPARPRSVAGVDLGVKALAVVADSDGQVRHVANPRHLNGELQRLRHASRRVSRRQGPDRRTGQAPSQRWVKANIERNRVHHRVANLREDAIHQLTTSLAREYGTVVVEDLNVAGMVKNRRLARHIADAGFGRIRRQLDYKTTWNGGRMIVADRWFASSKTCSGCGAVKTKLGLHVRVFDCDECPLVLDRDVNAARNLAKLAQSMSNTGTGVAGDRGAQAPKPRGADRKTRTTRRGRTTPAGRAGGATPRTRKEAGDRRRGTQLRLW

SEQ ID NO: 35448 - protein, 389 aa, unknown
  TnpB Polypeptide
MIKTYKCRVGLSKTGHERLGEVFSMSAELYNAGLESRIDCYRKTGNGRSLYDQYKELVQVRADLPEFEAVSSIVFRGVLSRLDKAYKRFFKHGGFPRFKSGRRWRTIEINDRCWRMLKREGNKLVLKVKGLPSIVVKPSRELPPNALLKAIRITRKSLRTEVALSYELPEPEQVGEARNPVGIDMGISKRLTFSDGETVEKREIDRKKLIRLQRSVSRKVKGSNNRRKAVSLLAKEWQRVSDKERDYLHRLTAEIVKMYDFIAVEKLETKKMLGNKRLARSISEQAWGKFITLLNEKAESAGVKIVAVNPKGTSQECSSCGAEVKKDLSVRTHKCSCGLVMDRDINAAITILHRGITIAGGNVTRMAGRMREKLEIAPARPRTVYGSVS

SEQ ID NO: 35449 - protein, 378 aa, Bacillus sp.
MEVNQMMINKAYKFRIYPNQAQAILINKTIGCSRFVFNHFLSLWDHAYKETGKGLTYGTCSAKLPAMKKEFVWLKEVDSIAIQSSVRNLADAYTRFFKKQNSAPRFKSKKNNVQSYTTKQTNENIAVVGNKMKLPKLGLVRFAKSREVKGRILNATVRRNPSGRYFVSLLVETEVKELPKTQSYIGMDVGLKDFAILSDGTIYKNPKFFRSLEKKLAKAQRVLSRRTKDSFRWNKQRVKVARIHEYMANARKDYLDKISTEIIKNHDVIGIEDLQVSNMLKNHKLAKAISEVSWSQFRTMLEYKAKWYGKQVIVVSKTFASSQLCSCCGYQNKDVKYLNLRNWDCPSCRTHHDRDINASINLKNEAIRLLTAGTVEIA

SEQ ID NO: 35450 - protein, 459 aa, unknown
  TnpB Polypeptide
MQQIITAKLKLKTTAEQCQSLRQTQLAYRDALNYVSQYAFAHGKMSNHERLQKGTYDDIRLHYKLPSQMACNVPRQVGATYKGLWTKLKKNIEHRRAGYTKKRYKGLDKPPRYISPTVTYNYGYDYTFKPGQQVSVLTLQGRIIMSYQGYEPHVALIHHGAIIGGAKLWYDKAHKQFYLLVSLELKIAEPTPDTLPTVVGVDVGQRYLATTATLSNRSRFYPGKRVRAKADHYARLHKRLQKKGTRSATRRLIALSGRERRLKLQANHSIAKSIIVSHPHTLIGLEELTGIRERTKRRKRRRKKHGRGTEPVSKKARRANRHASQWAFAELHDLLTYKAVLAGSLAIKVDADYTSQACPYCGYTDRRNRPGKGLLFICQHEHCPYRLRTGQAYTLHADLVGARNIALRTLLTRQDWIRTGILSVRPDVSDDETKAARLKRYAELRWSSDTNSSLEGWSN

SEQ ID NO: 35451 - protein, 382 aa, unknown
  TnpB Polypeptide
MAVIQKGIRVRLYPNEEQEVLINKTIGCCRFVHNQTLADCKQSYEQTQHFPSQSERIKNLVPLKEIYDFLKEVDSTALQQSVRDLNSSLNNFFKNRSHFGFPKFKSKHEQKQSYRTPYNDSNAKILDNKHIKLPKLGKVRTKRFDMPESYRIFNITVEKTTTGKYYASICIETDVQSLPKTGKQVGFDLGLIDLLIGSDGTRFARPKFDYANKNKLAKEQRKLSKMRTKLERVDANLDECKNYQKQKRKVAKLHEHVSNCAKDFNHKLSRKLVEEYDFIAMEDLNVSSLIKNHYLAYSISDVRWSQLLNFIKYKCQWYGKEFRQVDRFYASSKICSCCGTYHKDIVSSLSVREWTCPDCGTHHDRDVNAAKNILNQALSVGV

SEQ ID NO: 35452 - protein, 500 aa, unknown
  TnpB Polypeptide
MKTKIKEETLPVKYRLRPNKKGKKYLNQCFGNTRFIYNWLLAFQNDYYEAVSKYSKEQNIDYLSSLPRDTEEQQKFYASEFKRLRDELILPYDKGVEILKTIRPEINELETERCLLKKVKDEKTKKMVEAVPKQANKMIAIVNAKRQIKFLREEYPWLKECSGEPYYHTALNLDDAWKAFFDKRQSDTGKPSFKGRWTKQSCTFDSVKVDFENNAVTFPLLKKAPQKFRAHRIIDGEVKTATVERTKTGKYFITINFRQSVAFPEPPKKVTLNKTLGIDLGVGDNYLTKATGKSDDKGEIIDNPRFLKTIFRKKQRLDRNMSRKTCGGKNWLKAKNKCDKLHEKLTNLRDNFQHQISHQITNDDNISHVVMESLDIKQMSAKKQAIKNENGSYAKNGQGLKRLQNRATLDASLGALKDKIKYKSHRRGKVFTQVDKYFASTQICHVCGHKNENLAISTKKFKCGGCDAQLHRDVNACKTLAQEGVRIVNPKPKRKKTKVK

SEQ ID NO: 35453 - protein, 399 aa, unknown
  TnpB Polypeptide
MDVIVRTLKLKLNKTQETTLNQWLHHLTGVYNWGHKKIEHSATHQDYFSKYDFTNQLADHGDKKSIFVQDKKYFSKYIFKKLLEDHGNKNEPQNPDSTKVYDVLGIPSHTIAATLLQIYIAWDRCFKKVSKKPKLKGQRNKLNSIPFPDPFKFPVKNRIGVPYLGKVRFYKQDIPLAKIKNGRILKKASGWYLCICLDTNSKFPVKDTDKVVGIDPGFSTLLTLSDGTKIENPRELRKGAKRLAQAQRGKRKKLAARLSEKQSNQRSDRNHKISRKLVENYATICYSNDNFKSLARTRFGKSVSEAGLGQLIGMLTYKSRLGGRKLIPVNSVRTTMTCGTCWSLTGPTGFRGLKVRSWECSACGAVLDRDLNSAQVVLKIGLGTSLCTGIHKKSLKPTT

SEQ ID NO: 35454 - protein, 406 aa, Thiorhodospira sp.
MIQRSYQFRFYPTAVQMVLLAQCFGAARWVWNTALAWRSHCYKIAGEKVTGVDFSRELTWLKKIEAFAWLATIPSTVLTQALRDQDRAFANFFAKRARYPRFKKHREAASIRFQIDQRGVMNAYRAGEFLKLPGLGLLDVRWSRIPGGVPKMVTIRRDAAGRYFVAFMVEEAIQQAPVSTQSVGIDVGLKDVIITSAGQKSGNPRYLRRYQRRLKMAQRRLSRKQKGSNRWHRQKRRVARIHARISDSRKDFLHKQTTALVHDHGVIAIEDLCVKGLVRTRLAKSMSDAALGELRRQLEYKCQWHGRVLLVADRFAPTSKTCSSCGTVQAEMPLRIRDWTCPDCGAVHERDVNAAVNVLMFATGGRPEGHARGGRETPSAGVPVDLGKLAPDEARTKPECAGACHG

SEQ ID NO: 35455 - protein, 360 aa, Paenibacillus sp.
LRLTYKYRLYPTREQKQHIQFTLERCRLLYNRLLEERIIAYKTEGNSLNYYDQANTFKERKQHIPALKQVYSQVLQDTAKRLHKAFQAFFRRVKSGEKPGFPRFKPQQKYDSFAYPQGGYALQGNKLRLSKIGEVKIKLHRQIEGKIKTCTITVKNGKYYACFSCDVQRQELPSTLEQVGVDLGLKHLATTSEGGTFEAPKHLKQNERKLKELQRAVSRKQRRSNRRVKAVHRLARLHEKVANSRKDHAHKVSWQLVSRYGLIAFENLNVRGLIRNHHLAKSIADAGWSQLVQFTTYKAESAGRVVVQVDPRNTSQQCSNCGAIVKKSLAVRIHRCNHCNYEADRDENAARNILQRALVS

SEQ ID NO: 35456 - protein, 396 aa, unknown
  TnpB Polypeptide
MKTIHRTYKFELRPTQEQKVLLDKHFGCVRFVFNHFLNERKEQYQVNKKSDNYYAQAKSLTELKKQEETVWLKEVNSQTLQFALRSLDTAYLNFFRGNAKFPKFKSKKKKNSFTVPQHTKLEDGRIYVPKFKEGVKVIVHREVKGEVGKCTFSKTPIGKYFVSILTEEQYKPKEKTGTVCGIDLGLKDLVITSDGVKFKNHKYTKKYEKDLAKAQKHLSRKQKGSNSFEKQRRKVAKIYEKIANTRNDNLHKVTYQLVSDYDIICLEDLHVKGMMANHKLAKHIADASWGTFVRFLEYKADWNDRKVVKINRFYPSSKTCNVCGWINQDLNLFEREWTCRNGHKLDRDINTSINILNEGLKIIGAELSDYTGGDGVRLSNKQLSVKPEAHLSLANG

SEQ ID NO: 35457 - protein, 141 aa, Fusobacterium sp.
VDSLALANAQRNLEKAYKNFFRNKAIGFPKLKSKKNLVQSYTTNNQKGTVTIFENGVKLPKLKEVVKMKVHRNIEGIMKSATISRNGSGKYFISLLCETDIQELAKTNSSIGIDLGIKNMAILSTGEKIENLKFRKQLEKK

SEQ ID NO: 35458 - protein, 290 aa, Fusobacterium sp.
VIRGKNKYYVQITFEGVPPKKHEVRNHAEVGLDIGTSTIAIVSDKEVKLQILAENIGINEKEKTRLQRKLDRQRRANNPNKYNTDGTIKSNNKEKWKKSKSYLKTQLKLSDMQRKIAEKRKQSHTILANSILEIGTIVKVENMSFKGLQKRSKKNEISEKTGKFKKKKRFGKSLSNRAPALLIEIIDRKLRYIGKNIIKINTFKVKASQLNHETEEYEKKSLSKRWVEIVGNKIQRDLYSAFLIKNVKENLEEVDIEKVKKEFKNFVRLHNEEMERIKKSDIKRLKCMGF

SEQ ID NO: 35459 - protein, 138 aa, unknown
  TnpB Polypeptide
LHKLTTQLVRENQTIVVENLAVKNLVKNQKLAQSISDASWDEITRQLAYKCRWYGRNYIEIDRWFPSSKRCSNCGYIVKKMPLKIREWECPNCGTHHDRDLNASKNILAAGLAVSDWVATVRPKQSKSVKAGAKKHQT

SEQ ID NO: 35460 - protein, 442 aa, Bacillus sp.
MFVTHAFQIPYEKELYEFLRSMQREAATVWNDIVREATSYYFTWKKWLSKTEIQSVRKQTYNLHSQTVQAIADKYEVNRETIRKLRKTDKKAKYSWRKKHFYCVPLKKASMDITDKTIVIKRADFKINLIDLLTKKKKKGWNEKFPKKNAHITIPNLAHEDISNCNYAEIVWRNGAYWFCYSVSIPEKDLSGQEQKVAGGDLGEIHAVTVATEDKALLISGRTIRSISQFRAKALADLSKKMSRCKKGSRQWKKYKTARNRIRQKSKNQLEYLEHKTTKEVVEFLEQENVTHFVIGNVSGIEKSTRKNQKKKQKTTKKRRQQLSLWNQGKMKQKLTYKSWLKGIQIDKTEEIYTSQSCPFCGGRHKANGRSFKCSVHKTEIHRDVNGAQNIARKLYQMDVKPIVSIVYKQPVWHRRFLSEDMRQKTKHPNDKPKKSIACRMA

SEQ ID NO: 35461 - protein, 367 aa, Clostridium sp.
LNIAYRFRIYPTEEQKILLGKTFGCCRFLYNQMLNDKIREYEKTKKMLKNTPAMYKKEYSFLKEVDSLALANVQLHLEKAYKNFFRDPKIGFPRFKSKHHSRNSYTTNVVNGNILVESKRIRLPKLKWIAMKKHREPAENLRLKSVTVRMEPSGKYFASLLYEGYSCENQAAEPDFSTAKILGIDYAMQGMAVFSEKIETEEAGFFRKNEKRLAMEQRKLSGCIRGSHNYELQKKKVAKCHEKIRNQRRDYLHKLSRKIADSFDAVAVEDIDMKAMGQCLHFGKSVQDNGYGMFREMLEYKLAWKGKKMVKVDRFFPSSKKCCKCGRIKKELKLSERVYRCACGNEMDRDRNAAINIREEARRMLTA

SEQ ID NO: 35462 - protein, 397 aa, unknown
  TnpB Polypeptide
MLRATKVRIYPTPKQVAFLDRQFGAVRFVWNKALAIKTHRYRARGQKLKGKRDLKPLLAVAKRSRKYGWLADFDAMSLQQTCINLDRAFINFFEGRARFPRFKRKHGAQSSYHCTGKIAVGEDWITVPKVLGRIPAIVHRQTVGKLTSITLTKTRTGKYFAACLFDDETEPPAPPQVVRDVIGVDVGLAHVAIDSTGRKTDNPKFLKRAQRNLRRKQKALSRKQKGSKNRAKARLIVAKAHEKVANARADFQHKLSKRLVGENQAIIVETLRVRNMLKNRSLARAISDAGWHSLTSKIAYKAERAGRHFIKLNQWEATSKTCADCGYRLAELPLDVRAWECPGCGEHHDRDVNAALNIRRLGIAALRASGLHVPAPGGLRKTVHATAAAFEGGSPRL

SEQ ID NO: 35463 - protein, 416 aa, unknown
  TnpB Polypeptide
LGYRTITTTVFVETIHLRGLSKNQEDHCFGLRLEAGRCWTDMVQAHVASRGNKKWLKCADLEKQFKGKYTLHSTCVQGLAQKLKANISTARQLRFLQKQANQPETAKYPYRKKKYQTVIWKESALRWRPDGRLSLSNQRGTPPLILSLPERYRDTDICKAELTWRADHYELCVTIDSGIEIKEPKSSGLVAGVDLGEIHIAAVATENGDTLLVSGRALRSSKQLRNKRHADYTSLLSKCKKGSKRYRKLLRSKARASAKCYRQQRDILHKASRHVVNFCAVNNVNVLAVGDVRDIQDGVDLGKKTNQKVSQWAHGKFKNYLVYKAASLEINVKEILEDYSSRTCSHCTNVKNNAPKGRVYTCSCCGAVIHRDLNGACNICSRARYGLYGYVQTHTQMYLRPIRRSRAFDTGHKLPM

SEQ ID NO: 35464 - protein, 349 aa, unknown
  TnpB Polypeptide
MSSVLRSFRLKIYANKNKLAKLDALITWWQQEVNKKINLYWQLPKVSGSHPPKETKRGGRLVQDASQKAWQIVKSAKKQTNPQLPIFEGSEIDLNEKSIVFQDWITKSFDLWVKATHFEKYHRLALPCKKTGELNKAVGKGGQLRKSAKIIKVRGEYYLQVYVELPEKKPSLTNSKLGIDVGLTNAVATSDGQFYGKELRDLRIRTKHRKYLKKTSPFKQGLNHVTNQLIKDYPSTDFIVENLLFKGKRKRSKTFRRRNNNWAYKHLANRLVQHGELEGFQVIKVEPAYTSQTCPECKYVDKENRNGDRFICKKCGYSNHADIVGAINILERVSQAHSVPESCIQKGKI

SEQ ID NO: 35465 - protein, 402 aa, Ruminococcus sp.
VYKYTHGKGDKKLLKSFKTEISPTAEQKNKIDRTIGTCRFVYNFYLAHNREIYEQESRFVSGYDFSIWLNNNYIPNNPEFAWIKEVSSKSVKQSIMNAQKAFKNFFDKKASFPKWKKKSNSDVKMYFVRNNKTDCKCMRHKINIPTMGWIRLKEKGYIPTSKGGYIIKSGTVSCKAGRYYVSVLIEMPENEKHILNNLGMGIDLGVKDFAVCSNGKVYKNINKSSHIRKLEKKLKREHRRLSRKYESLKKSKNNLKGEAARQNIRKQKLKVQKLYHRLDCIRTDYLNKAVSELVKTKPKWITLEDLNVRGMMKNRHLSKAVAQQKFFEFRTKLTAKCKEYGIELRLVDRFYPSSKLCYKCGCVKSDLKLSDRTYVCSECSYIADRDFNASLNLRDCLTYQIA

SEQ ID NO: 35466 - protein, 570 aa, Sphaerotilus sp.
MRKADEPEGKTFTYQARVPVDAGAAAALDAYAELFGRVERTLFAQSTAQGVKPEKLKNEYLKRFGITARQFNAIRVGLDGKTDSVKERRTGLIDEAKTRLKKAQATLKKLGTAPKSETPEARAKRLGKLHQKTRRAVTMAARLEGMQADHKAGKVRIAFGSRRLFRAQFDLSGNGFADHAAWRDAWHRARSEQFSVLGSKDETGGCQGCVATLADDGTVSLRLRVPDSRVLASKYVELHGIRFAYGMDQIRAALACGRVVERVSATGKPTKTRDGKALTWRFVRDGKGWRVFVSVSVDPVATISTAQAGAVGADFNADHLAVAETDRHGNLIAHQRIDLDTRGMNADQRRAAMGDAVKQVVERARAASRPIVIERLDFREKTARLEGADPWRARMLSALAYRDFDSMLRAAAFRSGIEVIAVNPAYTSVIGAVNHAARLGISVHAAAAFAIARRGLGLKERPFAAYRSTATDCQHGIVAVPARNGGHVTFALPARNRAKHVWTQWAAVRSSQSAAHAGHFRSGAAKAAPAPLSQAIQAVSATRWTKVRSLGANRQQHCSAGVPVFDDVPF

SEQ ID NO: 35467 - protein, 378 aa, unknown
  TnpB Polypeptide
VLKREMSVLTMEKAYKFRIYPNKTQENLIQKTFGCVRFVYNYFLDKRIKAYEADKTTLNYSKCSAELTKLKKEYEWLKEPDKCSLQNSLKILDAAYQNFFRRKEAGYPKFKSKKNRHRSYKTNYTNNNIAFVDGKIKLPKIGKVRFRDKQIPQGKIINATISQTPSGKYFVSICCTEVEKPAFVRTDKYVGIDLGIKDFVITSDGNKYNNHRYLQKSLSKLAKLQRELSRKTKGGSNWDKARIKVANLQEKIVNQRKDMLNKLSTELIRKYDVICLEDLQVKNMIKNHKLAQAISDVSWSEFVRQLSYKAEWYGKELVKIDKFFPSSQTCHICGYINKDVKNLGIREWICPECKTAHDRDINAAINILNEGLRTFNIA

SEQ ID NO: 35468 - protein, 359 aa, unknown
  TnpB Polypeptide
MKLTAQIKLTPTTEQGQALRRTMNCVNEACAYVSGVAFTTKTYGQFALQKAVYLDVKSKFGLTAQAAVHAIKKVVDSYKKNKDTLHKFYSRGAITYDDRILSWKPDQSQISIWTLEGRQRISFVCGEKQRELLKNRQGESDLVEIDRNFYLLVTCNMEEPDPRKIGDYIGIDLGIVDIATTSDGKKMSGAKVKKLRKRHNQLRKKLQSKGTKSAHRLLKKRKRKESRFARDTNHCISKEIVAVAERTLRGIAIEDLKHIRARLRVEKPQRVMLSSWSFGQLRSFIEYKARGAGIPIVLVNPAYTSQSCPQCGNVSKRNRKTQSKFSCNVCEFSGNADVIAAKNIRMAAVNRPDAVSRVA

SEQ ID NO: 35469 - protein, 395 aa, Geitlerinema sp.
VAANATLFFGTPLFSQTIVPSGFRLPCHPLSYSQCLQSSVLNLSRAFVNFFEGRARYPRFKSKHKRQSLQYPQNVNSYGDKLHLPKIGEVYCRVHRWFEGTIKTVTVSRNPDGRYHASILIDDGSEKPEPNADGKAIGIDLGLKHFAVTSDGEKYNNPRHLNASTPLSVESERSRGLKKHERNLKRKQRKLSRKQQGSNSRQKARRLVARVHSKIANTRADFLHKLSRSLGARSLAPCDGAGSHRKIVNENQVIVVENLAVKNMVRNHSLAKAISDVGWGMFSTLLKYKAEGEGKVYLEVDRFFPSTHLCSETLLPLPKMGLDVRSFECPQCGQIHDRDINAAINLKNEGLRIWASGTGASASGGNVSPKGGRIRSTLSEAIPSEAGSHSSIASR

SEQ ID NO: 35470 - protein, 236 aa, Geitlerinema sp.
LKKKQKGSANWLKLQKKIARVHQRIADTRKDWHFKLAHHLCDGAGMIFVEDLDFRIMAKGMLGKHTLDAGLGQFTNQILPWVCWKRDVYYGKVDARGTSQECPDCGAEVRKDLSTRIHHCHNCGSTKPRDVASGQVICSRGQRQIENACGVEATGDRVTDSSWLAVKQEIFGATQGISLHTRNGLLGEDVNSKERSPKTLPNSDICEMHQIPRIYKIPGISPHHAIECSLDKNRFI

SEQ ID NO: 35471 - protein, 448 aa, Geitlerinema sp.
MLVLEFKVKGKPHQYAAIDEAIRTAQFVRNKALRYWIDNRGVNKYDLNKYCRVLAREYGFARELNSTARQASAERAWSAISRFFENCRKSVPGHKGYPKFKKNSRSVEYKTSGWKLLDPKHIVFTDKKNIGRLKLVGTWDLAFYSTEQIKRVRLVRRADGYYAQFCVSVEVRETLEPSGNTVGLDVGLKEFYTDSNGECEPNPRFYRNAEKKLKRAHRRVSKKQKGSANRKKAVNQLGRVHLKISRQREEHAKRLARCVIRSNDLVAYEDLRIKNLVRNHCLAKSIHDAGWYQFRKWLEQFGEKFGRITVAVEPAYTSQACSSCGTVVKKSLSTRTHVCQCGCELDRDHNAAINILNAALSTVGHTGTLVRLRSPSAVEVNASGDLTATLAGANLSEQVGSLKEESPRRDSWGVSSCDFWSGGVSHVIEVEEKHRIHHGHKISRQRDD

SEQ ID NO: 35472 - protein, 532 aa, Geitlerinema sp.
LHQRIGQFQKTGNHGTARIVGLKPLGKIEKCLTTIRIARTVTQQQQRISLIHIQSLSILTFVQRRDRVQWLQKREQSPRLLSVGRTRRSFSAPRPSRRRYRNLRPAAVIKKRKSNFRLQSFEHSVTVMLNLTYQYKLDLTKQQQQTYDEWLETSRRVWNYALAERKDWYKSRACPIDRCSLRGEYIIPPDAPRPSFSSQCKALTQARKVYPELALAHSQISPQPPLGRGATGGLRRLEKAFVSMWERGHGFPRFKKPGRLRSLLFPQLGKDPVRGNRVKLPGVGWVKMRLSRAIPEGFVVKRATVVKRASGWYVMLTLQCDIEVPDITPHGEALGIDVGLSNYLATSAGELVPRPRFFVDLQSKLKLLQQRVSQKVKGSNNWRKAHYKVAKLHEYIRNCRQDFFYKLAHHLCDGVGMVFAEKLNFKAWARGMFSKHTLDAAHGEFLRILKWVCWKRGVFYAEVDAKGTSQICPSCGTNTGKKELSVRVHQCPECGYTTDRDIAAAQVVVQRGLATVGQTVKMLGEGLSVGSP

SEQ ID NO: 35473 - protein, 400 aa, Geitlerinema sp.
VCRHVWNFALRERKDWLKSRKSPVNACSIVQEYILLADEPFPSYHVQAKRLTAAKAEYPALKTVNAQVLQQVLRKLDGAWESWRLKRSGLPRFKKPNRMRSFVFPQMLKNCIPPSPPLVRGVGGIKLPQLGWLEVRWSRRIPEIFQVKQARIVRKASGYFVLLSFQADVEVPDVMPHGHPVGIDVGLEYFLSSSDGEQVKRPRFFEKLHRKLKSLQRRLKNKQKGSANWLKLQKKIARVHQRIADTRKDWHFKLAHHLCDGAGMIFVEDLDFRIMAKGMLGKHTLDAGLGQFVNQILPWVCWKRDVYYEKVDARGTSQECPDCGTQVRKALSVRVHQCPECGSTKPRDVAAAQVICTRGQRGIENACGVKAAGAEVTQSSWRAVKQEIFGATQGISQHTH

SEQ ID NO: 35474 - protein, 425 aa, Geitlerinema sp.
VIKKRKSNFRLQSFEHSVTVMLNLTYQYKLALTKQQQQTYDEWLETSRRVWNYALAERKDWYKSRACPIDRCSLRGEYIIPPDAPRPSFSSQCKALTQARKVYPELALAHAQISPQPPLGRGATGGLRRLEKAFVSMWERGHGFPRFKKPGRLRSLLFPQLGKDPVRGNRVKLPGVGWVKMRLSRAIPEGFVVKQAQVVKRASGWYVMLTLQCEIEVPDIVPHGEALGIDVGLSNYLATSAGELVPRPRFFVDLQSKLKLLQQRVSQKVKGSNNWRKAHHKVAKLHEYIRNCRQDFFYKLAHRLCDDVGMVFAEKLNFKAWARGMFSKHTLDAAHGEFLRILKWVCWKRGVFYAEVDAKGTSQICPSCGTNTGKKELSVRVHQCPECGYTTDRDIAAAQVVVQRGLAAVGQTVKMFGEGLSVGSP

SEQ ID NO: 35475 - protein, 269 aa, Geitlerinema sp.
  misc_feature (234)..(267): Xaa can be any naturally occurring amino acid
MFKAYKYRIYPTHEQQVTLAKSFGCCRWYWNYALNLCQETYRTTGKGLSRGYLQGLLPALKKEYPWLKEDVYSQCLQVVALNLSTAYRNFFEKRAKFPRFKSKHGRQSISYPQNVKFEGTYIKLPKVGLVHCRQHRSFEGTIKTVTLSQNPDGKYYASVLVENPKEPPLLSTEGKAIGIDLGLTDFAITSEGSKYNNPKHFDKHARNLKRKQQKHARKRKGSKNRNKSRVKVAXXXXXXXXXXXXXXXXXXXXXXXXXXXXXXXXXXQG

SEQ ID NO: 35476 - protein, 337 aa, Geitlerinema sp.
NCRKSVPGHKGYPKFKKNSRSVEYKTSGRKLLDPKHIVFTDKKNIGRLKLVGTWDLAFYSTEQIKRVRLVRRADGYYAQFCVSVEVRETLEPSGNTVGLDVGLKEFYTDSNGECEPNPRFYRNAEKKLKRAHRRVSKKQKGSANRKKAVNRLGRVHLKISRQREEHAKRLARCVIRSNDLVAYEDLRIRNLVRNHCLAKSIHDAGWYQFRKWLEQFGEKFGRITVAVEPAYTSQACSSCGTVVKKSLSTRTHVCQCGCELDRDHNAAVNILNAALSTVGHTGTSVRLRSPSAVEVNASGDLTATLAGANLSEQVGSLKEESPRRDSWGVSTIAFVSI

SEQ ID NO: 35477 - protein, 407 aa, Geitlerinema sp.
MALRAFRYRFYPTPKQESLLRRTLGCVRLVYNKALEARSQAWKERQEKVGYRETSKMLTQWKQEEELQFLGEVSCVPLQQGLRHLDKGYSNFFNGRAKYPRFKKKRNGGSAEFTKSAFRWRDGSLYLAKSQEPLEIRWSRQLPKGVEPSTITVRLEPSGRWHVSILADDDTIKPLPQSEKSVGVDVGIAHLAITSDGEKTENPRHLTKHYKRLRRAQKALSRKMKGSRNREKARRKVAKIHEKIKDSRSDYLHKLTTRLVRENQTVVVEDLSVKGMVRNPKLAKHICDCAWGELVNQLDYKCQWYGRTLVKVDKWFPSSKLCSSCGHKMGSMPLDVREWDCPKCGTVHDRDINAARNLLAVGHTVTACGASVRLEGHCSREQLRKTRKGKKQEPKSRGLGITVLPGR

SEQ ID NO: 35478 - protein, 219 aa, Geitlerinema sp.
  misc_feature (178)..(211): Xaa can be any naturally occurring amino acid
MTLRAFRYRFYPTPEQDSLLRRTVGCVRLVYNKALEARSRAWKERQEKVGYRETSKMLTQWKQEEELQFLGEVSCVPLQQGLRHLDKGYSNFFNGRAKYPRFKKKRNGGSAEFTKSAFRWRDGSLYLAKSQEPLEIRWSRQLPKGVEPSTVTVRLEPSGRWHISILVDDDTVKPLPQXXXXXXXXXXXXXXXXXXXXXXXXXXXXXXXXXXRKSSTGIT

SEQ ID NO: 35479 - protein, 374 aa, Geitlerinema sp.
MKTLKFKLYNHERNRHLKRMVNASGGIYNHCIALHRRYYRMWGKHLNCAKLQKHIAKLRKRNPFWKSVNAQAAQDICQRIEKAYQSFFKHKEKGVRPPGFKKVKNYKSFTLKQNGYKFLGGNRIKICGRVYQFWKSREIEGKVKTVTIKRTPLGEMFMFVTVDPPSEPIFKVETGKSAGFDFGLKQFLTTSEGFSIDAPLFFKQSLREIQKANRELSRKQKGSNNRERARKNLARRHEDIAHRREDWFWKLAHWLTDRFDVLYFETLNLKAMQRLWGRKVSDLGFRSFLQILEWVAQKKEKVVAYIDRWFPSSKTCSCCGHILDELDLSVRRWRCPSCRKENERDENAAINIKQVGASTCGLGEVSQAQPAFAV

SEQ ID NO: 35480 - protein, 922 aa, Geitlerinema sp.
LAGVLRSTTEGSNLQKICYSLDMLNMTWEFKLEPTAEQVSEIEHILDVCRNVWNFALRERKDWLNSRKSPVNACSIRQEFILPADAPFPNYHVQAKRLTAAKTEFSQLKTVNAQVLQQVLRKLETSWESWRLKRSGLPRFKKPNRMRSLVFPQMLKNCVSDEGIKLPQLGWVRVRWSRKIPDLFQVKQARIVRKASGYFVMLSLQADVDIPAVAPHGHPVGIDVGLEYFLSTSDGEQVKRPRFFNNLHRKLKLLQRRLKKKQKGSANWLKLQKKIARVHQRIADTRKDWHFKLAHHLCDGAGMIFVEDLDFRIMAKGMLGKHTLDAGLGQFVNQILPWVCWKRDVYYGKVDARGTSQECPDCGAEVRKDLSTRIHHCHNCGSTKPRDVASGQVICSRGQRQIENACGVEATGDRVTDSSWLAVKQEIFGATQGISQQPVPGMQGEDVNGLPCFDARPNTTMRKFNLFLASLLAVWFVNQTTIDVRERHPIPQFGVETAEAKRSSGGRSRGGSFSRPSRSSPSRSRSSSPSSSGSSSGSSTRSRTPQPRSTPTPQPRSTPTSQPRSTPTPSSSNSGRTGGRVRGGSFQRTPTPAPTSTPNAVPRSTPTSTPRPAPTGVPDRTSPTYQRNNYELEVEVEQPSRNYYTPVVPNAPSAGRAEPANANTESVTTPTVDRQTDSDAAIRSQTRRSSGNSWVKFLLLLLVLGGVIFLVWWLMSRQDRNASDRTAAGVARELENDIVTVTKLQVALLAEARTVQSELTDLSRDADLDSREGLAQYLQECAIALLRQPEYWTHARASSETFKSREAAEQAFGRESIAERSKFSAETFSNVGGRVRERAADLDEGVEPAEYIVVTMLVGTEDDKPLFEGVNSAEDLEQAMQKIAAVTPDYLLVFELLWTPQAETDSLTAEDLLTEYSDMVPL

SEQ ID NO: 35481 - protein, 416 aa, Geitlerinema sp.
MFVLEYKVKAKPHQVQAIDEAIRTTQFVRNKVLRYWMDNRGVGKTELFRYNTRLRKEFKFVEELNSHACQTAVERTLRAITRFYENCKSQVKGKKRCDPAPSHGARERAPREGYPQFKRNTRSVEYKVSGWKLSEDRKHIVFTDKKGIGHLRLIGSRDLNYYHPEQIKRVRILKRADGYYVQFCIKLDPRLTVSKPLTPSQKAVGIDVGLKYFLADSQGNIEPIPQFYRKAEKRLKRLNRQKSKKFRKGQPQSHNYRKARQRYARKHLRVSRQREEFAKKVALRLIQSNDLVSYEDLNVAGLVKNRHLAKSISDAGWTLFRRWLEYFADKYGKIAIAVPPYNTSQNCSSCGERVQKMLSTRTHVCPHCGFVADRDTNAAINILKLGLSRVGRTRIHASGEIPSWLVGEILSANGDS

SEQ ID NO: 35482 - protein, 450 aa, Geitlerinema sp.
MVIQKPGQIVRTDKWSLNPTKEQRRLFHETVKVYRRVCRHLVGILFTHWSSLAGLSSQKRVLAVEKLIHQTAQNPQPKYPQFDSTFYKFPSYYRRAAIVFAAGQVSSYMTRYREWQSGIRQHRKAKPPVLNANTGCYPTLYKGQCYKLHGYDRIEIKVFNGTDWIWTTVQITGLRERHTVDSNKLLSPSLIFNEEKKVCHLSVPFECHPPQREVDGNVVSVDLGINTTATVAVVNFDGTVIHREFVYPGRDIDCRDKRLKSVSKRASKTMGKGGSLQKGFCSHTYRKCRNINRQIGQIVSKRIVQIARQFKADAIVFENLKGWKAKGGRKRSNLRQRFHGWLKGMIRDFTEMKWQEIGGKVVDVVAAYTSKLAYDGSGVVRRDSKNYTLAKFSSGKRYNADLNGALNIAARGILKLTCRNDRKERSSKRSGRSPRSWACLCDLWTSTVPG

SEQ ID NO: 35483 - protein, 388 aa, Geitlerinema sp.
MTQAITVKCKLIVPAELTEKIDETLVGFAEACNQILQTAKEHNVWNTTKLHHLTYKPVREATELKANHVCQAIRRVVNQRKATQQIHKFRPTSVSLDVRTFKYIESKQQVGVTLKSGRVNFDLKIGGYQIALLRGQTPTSATLKKTRQGDYYINIVVEVPTQPKGRTPKVLGVDRGLRDIATTSTGKSWEGEKLRATREKYVRVRASIQAKRTKSAKRLLRRLSGRESRFQSWVNHNISKELVREAKATESVIAFEDLTGIRLNVKLRKKTRTEIHRWAFYQLQHPPFAPLPTGGWGDANIAGVEVVTVDPRYTSQTCSRCHHVHPERGKSYRNGKRFKCGFCGFEHDADVNGALNIAQLGAVVTQPEISTYACQLEGQLSWFPVGTG

SEQ ID NO: 35484 - protein, 389 aa, Geitlerinema sp.
MEQQVLTIVCKLNPTPEQSYKLDATLEAFAKACNFANQTVNPKITNKNRIQGEVYKAIREQFGLTANLAVRACARVAANRKTAKLKKRPVKQFKPTSADYDARVFSYQEKDQTVSLSTVEGRVRIPLVLGNYQIGKLKGKTPTSATLSKHRDGKLYIHIQVKDDVPPPQKPKDVIGVDLGRRDIAVTSEGQSWSGESVNKIRERFARVRASVQAKGTKGAKRLLKRLSGRERRYQSWVNHNISKQIVRRAKATQSIIALEDLTGIRERTNCQPRSKTERRRSNSWAFYQLRLFIDYKAIKEAVDVITVPPAYTSQTCHNCLHIHPQKGKSYRSGIPPLPPFLRGVGGICGWKGDADLNGATMIKRLGESVSLLETRNPLSCSLLDSVTG

SEQ ID NO: 35485 - protein, 159 aa, Geitlerinema sp.
MIFVEDLDFRIMAKGMLGKHTLDAGLGQFVNQILPWVCWKRDVFYGKVDARGTSQECPDCGVEVRKDLSTRIHHCHNCGSTKPRDVASGQVICSRGQRQIETACGGEAAGTEVTQSSWHLLKQEIFGATQGISLHTRNGLLGEDVNLGKTETHCPKSHR

SEQ ID NO: 35486 - protein, 286 aa, Geitlerinema sp.
LITFSANPTVDSNKLLSPSLIFNEEKNVCHLSVPFECHPPQREVDGNVVSVDLGINTTATVAVVNFDGTVIHREFIHPGRDIDEVAAAAGTCVLRNGDRRDKRLKSVSKRASKTMGKGGSLQKGFCSNTYRKCRNINRQIGQIVSKRIVQIARQFKADAIVFENLKGWKAKGGRKRSNLRQRFHGWLKGMIRDFTEMKWLEIGGKVVDVVAAYTSKLAYDGSGVVRRDSKNYARAKFSSGKRYSADLNGALNIAARGILKLTRRNDRKERSSKRSGRSPVKLGLSV

SEQ ID NO: 35487 - protein, 415 aa, Geitlerinema sp.
MTLRAFRYRFYPTHEQESLLRRTVGCVRLVYNKALEARSQAWKERQEKVGYRETSKMLTQWKKEEELQFLGEVSAVPLQQGLRHLDRGYSNFFAGRAKYPRFKKKRNGGSAEFTKAAFRWRNGSLYLAKSQEPLNIRWSRQLPKGAEPSTVTVRLEPSGRWHVSILADDDTVKPLPQSEKSVGVDVGIAHLAITSDGEKVENPRHLTKHYKRLRRAQKSLSRKIKGSRNREKARRQVAKIHEQIKDSRSDYLHKLTTRLVRENQTIAVEDLSVKNLLRNHKLAKHISDCAWGEFVNQLDYKCQWYGRTLVKVDKWFPSSKLCASCGHQMDSMPLSVREWTCPKCGTVHDRDINAAKNLLAELRDPCKAVGHTVSACGASVRLEGSRSGEQLQKTRKRKKQEPKSRGLGITVLPVR

SEQ ID NO: 35488 - protein, 230 aa, Geitlerinema sp.
VDDDTVKPLPQSEKSVGVDVGIAYLAITSDGEKAENPRHLTKHYKRLRRAQKALSRKMKGSRNREKARRKVAKIHEKIKDSRSDYLHKLTTRLVRENQTVVVEDLSVKGMVRNPKLAKHISDCAWGEFVNQLDYKCQWYGRTLVKVDKWFPSSKLCSSCGHKADSMALDVREWTCPKCGADHDRDINAARNLLAVGHTVTACGASVRLEGHCSREQLRKTRKGKKQEPKS

SEQ ID NO: 35489 - protein, 403 aa, Geitlerinema sp.
VLTLNYQYKLIPTAEQATAIDQWLLVCRSVYNYALRERKDWVNSRKCQIDRCSIEREYIIAPEVNKPTYANQCRSLTQAKKENPNLKIPQSQVLQQVLKQLEAAFVNMWERGFGFPRFKKQMRSFVFPQVKPDAIQDNIIHLPKIGEVEFRKSRDVPDGFVCKQIRVMRKASGYYVCVCIQCDVDVPDLIPHGHAIGVDLGLEKFLATSDNEFIKGHKFFKESEGKLKLLQRKLKNKKKGSRRWSIVKRQIGLLHEKIHDGRKDFFFKTAHHLCDQAGMIFAENLNLKALGRSALRKACLDASWGAFLTILGHVCWKRGVYFAKVDANGTSQICPNCYTNCGRKELSQRVHSCSSCGYTTDRDVAAAQVVKERGLSTVGQTGTMLMEGKEIGVGVRTSARLSL

SEQ ID NO: 35490 - protein, 434 aa, Geitlerinema sp.
VAGKVCYHGDMIVIEAKLKGKASQYAKLDEAIRTAQFVRNSCLRYWEDRQGVTRNDLQKLCSKLAKNPESPWVKKLNSQARQSSADRAWQSISRFYTNCKQKVSGNKGYPKYKKFSRSVEYKKTGWRLSPDRKEIEFTDGFKAGKFELWTSRDWVFYSEPKIQRVRVVKRADGYYCQFLIQWERKESHEFQGNVVGIDLGLKEFYTDSNGNTVENPRYLRLSEARLRRLQRRVSKRYVKGKKQSKRYHKARKALARQHLKVSRQRKDKAIKDALALVRSNDLIVFEDLKINNLVKNHRLAKSISDASWYQFVQWLQYFVKIYRTICIAVPPYHTTVNCSGCGHPVQKTLSTRTHQCPKCGLVLDRDWNAARNILAKGLQVLAGYLNSTGGHLGTEVKSLNARGENGLWLSDRDIGHLSRLVELRTDNFVGNPPL

SEQ ID NO: 35491 - protein, 218 aa, Geitlerinema sp.
  misc_feature (2)..(35): Xaa can be any naturally occurring amino acid
MXXXXXXXXXXXXXXXXXXXXXXXXXXXXXXXXXXKGSNSRQKARRLVARVHNKIANSRADFLHKLSRKIVNENQVIVVENLAVKNMVRNHSLAKAISDVGWGMFSTLLKYKAEAEGKVYLEVDRFFPSTHLCSETLLPLPKMGLDVRSFECPHCGQIHDRDINAAINLKNEGLRIWASGTGASASGRNVSPKGGRIRSTLSEAIPSEAGSHSSIASR

SEQ ID NO: 35492 - protein, 245 aa, Geitlerinema sp.
VYQFGKSRDIEGKVKTVTIKHTPLGEMFMFVTVETASESVIKVETGKTAGFDFGLKQFLSTSEGFNIDAPLFFKQSLNEIQKANRELSRKQKGSNNRERARKNLARRHEDISHKREDWFWKLAHRLTDQFDVLYFETLNLKGMQRLWGRKVSDLGFRTFLSILEWVAQKKGKSVFYIDRWFPSSKTCSCCGHVLDELDLSVRRWRCPSCGSENDRDENAAINIKQVGASTCGLGDVRRATPAVAA

SEQ ID NO: 35493 - protein, 430 aa, Geitlerinema sp.
MGYKPRPFDLAQGKPSRAAFLNKHTIIYSGCYNVGMLNITYEYKLEPTLEQEAVIEDWLEICRKVYNYALAERKDWARSRKSPIDACRLDREYIIPVDAKRPTFSGQCKSLAAAKKEIPELKRPHTHVLQQVLRILEAAFVAMWERGHGFPRFKKRMRSFVFPQLNKGVVQGSRVNLPKIGWVKMRLSRPVPEGFEAKQIRVVKRASGYYVMIVFQSDVEVPAVQPHGEPLGVDVGLESYLATSAGELVENPRFFANGQRKLKSLQRQLKRKKKGSNRWLKLQKKIARHHEYLANARKDFQFKLAHHLCDRAGMIFVEKLNLKGLAKGMLAKHCLDAAWGNYLSIQEWVCSKRGVYFGGVEASGTSQECPACAAVVKKDLSVRVHQCPECGYTTNRDVAAAQVVRNRGLAAVGHTVKKLKEGNADGHPTN

SEQ ID NO: 35494 - protein, 460 aa, Geitlerinema sp.
VSSQYRSKCCFSTSEILRLICFMGSNHIYICYNHGMKLAYQYKLLPTYEQRCRMDKWLDMLRCQYNYLLADRFDWWEMNRCPVNACPLVCSIAEPREQPEYYGQKRSLVSLKQEREWYADIQADVLQEMVKRVDLALARFIKGDKNGKRSGKPRFKGKNRYRTFAYQRVKPDCIQGNKVTLPKLGEVKFIQHRLVPDGFTIKRALVTKKADGWYVTLTLEDKSVPDLPVIEIQPTETNSIGVDAGLEYFVACSDGTTKQPPKFYRQAEDKLAKLQSKRDARAKGSKPRRQLNERIAKLHQRIARQRKQWHFETAQELIDKAEVIFVEALKVSNMFRRNKPKQGEDGAFLPNGQSAKSGLNKSFADAGIAGFLNEILPYKAAKANKQVVKVNPAGTSQHCAICLNRVPKELSDRWHECPHCGASMPRDVNSGLLIKKVGLGVRLTIKRESRNGRRSPRRTA

SEQ ID NO: 35495 - protein, 397 aa, unknown
  TnpB Polypeptide
MMVVKKMIKTIRVMLIPNNKQNTKLFRYANTARFAYNWALGREKENYKNGGKFLSDSDLRKEFTQLKKTEEYSWLNEVSNNVTKQAIKDACHAYKRFFKGCSKFPKFKSRKFSIPSFYQDNVKIQFSDTHVKIEGFAASKKKNKQKINWIRLAEKNRIPTDCNYSNPHIRYDGINWWITVGIEYEDSVTVPSNDGIGIDLGIKDLAICSDGNKYKNINKTKKVKKLEKQKRRLQRSISRSYENNKQGKEYCKTKNVIKKEKLLLILNHRLTNIRHDHLHHITSEIVKREPSFICIEDLNVKGMMKNRHLSKAVQQQGFYEFRRQMEYKSKWNNIQVIIADRFFPSSKLCSCCGKIKKDLKLSERIYKCECGNIIDRDLQAALNLKKYGEDVLKRSVA

SEQ ID NO: 35496 - protein, 406 aa, unknown
  TnpB Polypeptide
MLIKGVVFRLEGELPFEAKSLLEDFRVSANSAIRIGLLARVTSRNALCRLAYKGLREDHPRMYAQHLVSAFEVAGCILKNHRRRVRKGNGGRIPYIRRLFLRTENQAYKLDRANGVIDLPIRAGCHVKLKLVLSNYHRRYLDDAGYSLGSLTLFPDCAIIAFRKEAPKPYVPESALSFDTNERSLDGVFAKGRDIAIVKAEFPDVAIIQQRHHDRRRRLQKKKAHDRRTARDLCKKEGAREHHRIEYRLHQVANAVLVFAEGHGSAIVLEDLTGIRFKRGKDLNRRLSLWPRRKLHQIIEYKAQWKGIPIVKVDPRYSSRKCPICGRIQDSRMGTEFRCECGWHLDRHINASLNLLQTAVSKGLEVAGGLRFDPGAFQHDVMMILYEPAMAARSEPNGTSDAGATT

SEQ ID NO: 35497 - protein, 395 aa, unknown
  TnpB Polypeptide
MIRTYRCRVKLSRSGHEALSRVFQMCADLYNACLEERIDCYRKTGRSRTYYDQCKALTEVRADDPEYENISVQVFRGAVGRIDKAFQSFFRRLKNKEKAGLPRFRKGKRWRTIEINDQCWKMLKRQGDKLILKIKGFPRIEVKTSRELPPNTMLKAIRITRKPLRTEVALSYELADVQPSTEITNPVGIDAGISKRLTLSNRKTVEKREIDRCKIIRLQRSVSRKKKDSNNRRKAVSLLAKEWQRVADGERGYLHRLTAELVKMHDFIAVEKLKTKNMLRNRNLARSISEQAWGRLMTLLNEKAESAGVKMVYVDPRDTSQECSSCGAIVKKSLSVRTHKCDCGIEIDRDVNAALNILHRGISIAGGNITHMAGRMKEKQSDVGTVRPRTVEATV

SEQ ID NO: 35498 - protein, 377 aa, Oscillatoriales sp.
MFFKKRAFVNRGAICSEMSKSANRHFKAMYVSSAQQSCNSVAEAMSSYKELLKLWNTGKLEEKPCPPKYRKQGLFTVSYPVRWLKLTSKGIRIPLGKQIKAWFGIEEIHLHKPSNLEWQNIKEVRILPRNRCFYAEFVYVIEPEKIPVNPNYVLGIDHGINNWLTCISNIGTGFIVDGKHLKSLNQWYNKQVARHKNGKPQGFWSNSLSTLTEKRNRQVRDAINKAARLVINHCLAWGIGRIVFGWNKGQKDGASLGKKGNQNFIQIPTARLKTRIQELCSRYGIEFIETEESYTSQASFLDSDSLPIYGEKPDGWKASGKRVKRGLYRTAHNLYINADCNGSANIIRKVSITLGINLGGVSRGALTTPLRVRLWTV

SEQ ID NO: 35499 - protein, 339 aa, Thermoanaerobacter sp.
MLKEHETYKNLPAQTAQQTLRLLDRNWKSFFRAMKEWGKDKSKFNGKPKLPKYKKKNGRTVTVFTNQQCKIKDGYITFPKTDLKLKTRITGNLREVRIIPKGSIYVVEIVYEKEIAEIQRPPKRVVGIDLGLNNFATLINNIGIKPIVINGKVIKSINQYYNKKKAELMSYVGNRGTSNRIKKLSIKRDNKIKDLMHKISRFIVNWCKQYGIDTLVVGYNSGWKQEIELGKKNNQNFVSIPFYNFTNMLKYKCEEEGINFILIEESYTSGCSFLDGEEINKTNYNPKRRIKRGLFRSNKGILINADANSAYNIIRKVFPKAFAEGIEGVGLHPVRLNIA

SEQ ID NO: 35500 - protein, 345 aa, unknown
  TnpB Polypeptide
MALIGNARNGNQDLALSLSTKAKKMLRNTPAMYKKEYPFLKEVDALALANVQMHLEKAYKNFFRNPKIGFPKFKSKHRSRKSYTTNVVNGNIQVEDHRIKLPKLKWIRMKKHREIAEKYCLKSVTISMEPSGKYYASLLYEKSDCENQAEEFDYEDAKILGIDYAMHGMAVFSEDIQKENEGYFRKSEERLAREQRKLSHCVKGSNNYYRQKKHVALCHEKIRNQRKDFLHKLSYEMAEAYDVVAVEDIDMKAMSQCMHFGKSVMDNSYGKFRELLEYKLTWRGKKLVRVDRFFPSSKKCCKCGRIKKELKLSERVYHCACGNEMDRDCNAAINIREEARRMLTT

SEQ ID NO: 35501 - protein, 391 aa, unknown
  TnpB Polypeptide
MYPTPQQEQQMLLHCAHARYVWNLAVEQQSFWRPGRRSAPGFAEQCRQLTEARAVFDWLRAGSVNIQQQALRDFAQAMANYFAGTHRRPTWRKAGRHEGFRVVGKDYRVRKVSRKVGEVWVPKAGWVRFRLSRPLPPEAKSYRITRDRAGRWHVAFAVAPHPIPAPGTGEIVGVDRGVAVSVALSTGELLTAPGLRETEKARLRRLQRKLARAKRGSNRRARVKLAIARLRARESDRRKDWVEKTSTDLARRFDMIVVEDLKISNMIRSAKGTLDAPGRNVRQKSGLNRSILAAGWGQLVTRLEHKAPGRVVKVNPAYTSQRCSACGIVDREARESQARYRCRSCGYAANADVNAARNIRDTAAGHAVAAREGLRVARPMHREPQPVLLSV

SEQ ID NO: 35502 - protein, 537 aa, unknown
  TnpB Polypeptide
MIRRAGVRIELDPTEVQRDQLLSFAGTSRFVWNWALAEKNRHYREEVLPSKEPGQTPVSPLSSIDLTKLWTQAKVETAPWSRQIASIISTTSIQDLCSAFGRYFAGKSGSGPRVGLPRFKAKGRCRDSFRIAGDATEAILDAEGEQIGSRLRSRYQAQAAHIAIPRMDWIRVKEDPTPRIGDSRITSVTISRQADRWYASIAVKHEVPEVIPTVPAMGQVLGIDLGIKTFAVCSDGSTIISPRPLQAGLDQIRRQNRDISRKRNVRDRVPTARMKKRAAHEAHQQGERYWPDKKEAKTEKKTRRAERAAASTQAKADLATLQSVARDRHEAIPTKLPRSPEIKSNRLKAADLTLARDHRRVANRRENFLHNVTTRLVRRAAKAGLILSIEDLRIKNLMALGTLARSFADLGLGEFRRQLTYKAEWAGVPLFVVPTFYPSSKTCSRCGEIKADLTLSDRIYVCARCGLVIDRDLNAARNIRAQAVMAIARGESIRPGKSGQDSVSRKLTPQRKPTKATAAGQAQRLSEASQALPVVEC

SEQ ID NO: 35503 - protein, 537 aa, unknown; identical to SEQ ID NO: 35502
  TnpB Polypeptide

SEQ ID NO: 35504 - protein, 336 aa, unknown
  TnpB Polypeptide
VAGRRLPDGPAAGAARLRPGDGGVRRPGNPAGRPSWRKAGRDEGFRITGRRGRQWDVRRLSRHVGQVWVPKAGWVRFRWSRAVPAGVKSYRVTMDRAGRWHVAFAAVPDPVPAPGTGETVGIDRGVVVSAALSTGELLHAPALTGRERIRLRRLQRRLARAKRGSNRRGRVRQAIARLRARETDRRKDWAEKTSTDLARRFDVICVEDLKIGNMTRSARGTRESPGRNVRQKAGLNRGILRSGWGLLVRRLEDKAPGRVEKVRPAFTSQRCSACGQVDRDSRESQAVFRCTACGFAGHADVNAAINIAAGHAVTARGGDGSTRPVNREPQLLLQPA

SEQ ID NO: 35505 - protein, 238 aa, Anabaena sp.
  misc_feature (238)..(238): Xaa can be any naturally occurring amino acid
MIVLEYKVKGKQHQYNAIDDAIRTTQFVRNKAIRYWMDAPRELKIDKFALNKYSTEQRIEFPFTAELNSMAVQSAAERAWSAISRFYDNCKSGKHGKEGFPQFQKDCRSVEYKTSGWKLHKTKRRITFTDKKGIGELKLLGKWDIQSYELKDIKRVRLIRRADGYYAQFCIGIDVVDIQPKTGVDIGLDVGIESFYTDSNGHHEPNPKFLRKAEKSIKHSQKRIYKKVKGSSGRKKAX

SEQ ID NO: 35506 - protein, 352 aa, Anabaena sp.
  misc_feature (238)..(267): Xaa can be any naturally occurring amino acid
MIVLEYKVKGKQHQYNAIDDAIRTTQFVRNKAIRYWMDAPRELKIDKFALNKYSTEQRIEFPFTAELNSMAVQSAAERAWSAISRFYDNCKSGKHGKEGFPQFQKDCRSVEYKTSGWKLHKTKRRITFTDKKGIGELKLLGKWDIQSYELKDIKRVRLIRRADGYYAQFCIGIDVVDIQPKTGVDIGLDVGIESFYTDSNGHHEPNPKFLRKAEKSIKHSQKRIYKKVKGSSGRKKAXXXXXXXXXXXXXXXXXXXXXXXXXXXXXXAPHYTSQKCSSCGVIVKKSLSTRTHNCSCGCELHRDTNAAINILNLAKARGGHPQSNATGVGISTPVGENLLEQIVTMNVESPRL

SEQ ID NO: 35507 - protein, 242 aa, Bacillus sp.
MRIYAFSKKQNSAPRFKSKKNNVQSYTTKQTNENIAVVGNKIKLPKLGLVRFAKSREVEGRIVNATVRRNPSGRYFVSLLVKTEVQELPKTHSYIGIDVGLKDFAILSDGTHYENPKFFRSLEDKLTKAQRVLSRRMKGSSRWNKQRVKVARIHEYISNTRKDYLDKISTEIIKNHDVIGIEDLQVSNMLKNHKLAKAISEVSWSQFRAMLEYKAKWYGKRKHLLPANYVLVVDIKIKTLKI

SEQ ID NO: 35508 - protein, 233 aa, unknown
  TnpB Polypeptide
VPLQQSLADLNAAYRNFFESRSGARKGPKIGRPRPKSRKDRRQSARFTTNAQFAVLPSGKLRLPKVGDVEVRWSRSLPSAPSSVAIIKDAAGRYFASFVVQADPAADAERFPAAGSEVGIDRGLTAFAVLSDGAVVRSPKFLRRAERKLKRAQRSHSRKQSGSKNKEESRVRLARMHARVASKRADFPAQGLDMDHPRKPSGVCRGLVRDGARADPTGQEHPRCRLVRLYSDA

SEQ ID NO: 35509 - protein, 391 aa, Moorea sp.
MIVFEFKLKGKKEQYLILDEMIRTANFIRNKALRYWLDNKDTSSNDLQKLCAVLASEYEWAGKLNSQARQASADRAWFAISRFYANCKAKKTGKKGFPKFKKKGHSVEYKNTGWKLSSSKKYLNLTDKFKAGKFKLIGTRDLYCYEKSQIKRVRIVKHADGYYAQFCLNIDRKEEHNSTGLVLGIDVGLEFFYTDSEGNTVENPRYLRNSEKRLKRLQKRVSKKKKGSKNRRKARAKLARKHLKVSRQRKDFAIKTAKALVQSSDLVVYEDLKVCNLVKNRRLAKSISDVSWSLFLEWVEVFGKIYGVECRAVAPHYTSQDCSNCNTRVPKTLSNRTHQCPKCGLKLHRDHNAARKILAKGLSTEGHSETNAWEENNLYLSQAIASNKLAR

SEQ ID NO: 35510 - protein, 372 aa, unknown
  TnpB Polypeptide
MKNRAYKYRFYPTDEQVTLLAQTFGCVRKAYNTILRWRTDAYYQAQEKIGYIQASAKLTEIKKLSEFSYLNDVSCVPLQQCLRHQQTAFKNFFEGRAKYPVFKKKDRKQSAEFTKSAFKYTDGKIYLAKSKEPLDIRWSRDLPCKPSTINISKDCAGRYFVSCLCEFENQILPKTDKTVGIDVGIKHLFVTDNGIKIDNPCHTVNYAIRLTKAQRRLSKKKLGSANRAKAKLKVAKLHTKISDCRLDNLHKLTRELINDNQVVCVESLRVKNMIKNPKLSKHIADASWGKFVTQLEYKADWAGRKLVKIDQFFPSSKRCSCCGYTLSRLDLSVREWVCPECNTAHDRDINAAKNIRTAGLAGLAFGESVNLV

SEQ ID NO: 35511 - protein, 570 aa, Streptomyces sp.
MVVGKDERIFGVQGARVSGLRKVAATFVVPGPAAVAIRARLRVSSVDEPVLTEVGRFLGALASRDLAVRSRQGTTHDAGSWARRKRALTESSSARWAGSITKATHDQWALARRGQSAELAWLRRQIAQIDERLARPLRARADRRAGLVRGYGSRSEWHAKARRLDSLRERLAGLEADLAAGRVHIVRGGKKLAHLRHHVDEAGLSREAWRRRWQAARMFLAADGEAGKRCGNETIRVTDGGELSIRLPADLAHLANAPHGRYALAATVTFTHRAEEWRDRIAANRAVAYRIHFDAVRDRWYVTASWQRTAVPLLSLPVALARGVVAVDMNDDHLAAWHLDTHGNPVGEPRRFGFELSGNTRHRDAQIRHALTRLLHHTRRTGARAIAVEDLDFGDGASRERYGRNKAFRRLVSRFPTARLKTRLVSMAAEQNIAIVAVDPAYTSRWGARHWQRPLSTPTRRTTRHDAAAVAIGRRALGHPIRRRTAPPPHDRSDRAGHRTVQAGPETRRREGPRPRAPGPRTRSVPPGRGAKADDQRALHRTGHAAEHATWQQDVLPLGLERGLRVPPGP

SEQ ID NO: 35512 - protein, 427 aa, unknown
  TnpB Polypeptide
MQDKDTTPASADVLYSAIKRKYVLSMQLRYNYRLYPSPGQQQALARAFGCARAVFNDGLRARKEAHEAGLPYVTDAEMSARLTAAKATPERAWLNEVSAVVLQQSLADLNTAYKNFFGSLKGDRKGPKIGLPRLKTRKDRRQAARFTANARFKVLPDGKLRLPKIGDVEVRWSRDLPSEPSSVTVIKDAAGRYFASFVIETGPAADAARFPAASADVGIDLGLTAFAVLSDGTVIKAPKFLRRAERKLKRAQRAHSRKQKGSKNKEKSRGRLARAHATVANRRADFHHQVSTAIIRDSQAVYVEDLCVAGLARTRLAKSIHDAGWSGFVRMLEYKAARYGRRFGRVGRFEPTSQVCSACGVKDGPKPLGVREWTCTACGAAHDRDMNAARNVLALGRRESLNACGGDVRRGMALAVAGEAGTLRGAA

SEQ ID NO: 35513 - protein, 589 aa, Ktedonobacter sp.
VRTARSQQSLSYPLRLPDEAQADALRLLDVSREVINTVIASLWDRLDEFVTRTNAYAYKQVEEMIAPPVVHGHRQWRCEAEQAGRILRGQAERKKQFLLILPLLEQGMIIPKSENKRGGKNRKAIREALTHLRDAQTDAGNAVELQSLIEQSCNFYLANGCFPDTYEEMQPVPVLKAGILPYAGDDGPTMGQTYRLALDLDQKQLTLALRTPDESGTWGRNWREKTVQMALPEVVVARIQAGKWLSPSLREIIEPDATRYAVLDFIVEVPVEQQALWSEMQTVLGFDWGVRQFLTASIVDLDGHQVGRPFFLDAGPFDGTQARTRRQIDQLKAKVARLEKQRDRFPVDDPRRKPSVQQLVVLRREIARCWGKYEARNQDLAHLAANVLLVLATAFGCDLMAGESLKSMKSTWRGRDAKGRWRNWRNNAQVRGELWRVLRYKCHLAGIRLEWQQPRKTSHTCPRCGSPANTYRSPAHVDKVENWGAWLVCSNPDCRWNGSRDYAASINIARLGATFIRHAQVTGRRYHPSIAETAVKAVSYIGAVAVLRLPPPVPRDRLLYAGRIYCNGWRNAVKLRSSYATATMLRLCG

SEQ ID NO: 35514 - protein, 399 aa, Ruminococcus sp.
MCSRGDKMLKAYKTEIFPTPEQKQIIHKTIGVCRFIYNFYLAYSKKIYEKEKKYVSGYDFSKWLNNEYLPKNPEFSWIKEVSSKSVKQSIVNAQRAFKNFFEHRARFPRWKKKRNSDVKMYFVRNGETQPISCERHRIKIPTLNWVRVKEKGYIPINSETHIIKSGTVSMKAGRYYVSVLVEEPEPEKPVLNDFGIGIDLGVKEFAVCSDDRFFTNINKSARIRKLERSLKRQQRKLSRKYESLKKLPNNLKGEATRQNIRKQTLKVQRLHHRLDCIRTDYLNKVVSELVKTKPMWITLENLNIKGMMKNRHLSKVIAQQKFFQFRTKLTAKCQAYGIELRLVDRFYPSSRLCHQCGCIKSDLKLSDRIYTCSECGYTADRDFNASLNLRDCQVYQIAS

SEQ ID NO: 35515 - protein, 535 aa, Mycobacterium sp.
  misc_feature (361)..(410): Xaa can be any naturally occurring amino acid
MARFEVPEGWCVQAFRFTLDPTEDQARALARHFGARRKAYNWAVATLKADIEAWRVTGIGTVKPSLRVLRKRWNTVKDEVCVNAETGAVWWPECSKEAYADGIGGAVDAYWNWQNSRSGKREGKTMGFPRFKKKGRDQDRVTFTTGAMRVEPDRRHLTLPVVGTVRTHENTRRIERLIATGRARVLAISVRRNGTRLDASVRVLVQRPQQPNVAQPGSRVGVDVGVRRLATVANEAGAVLEEVPNPRPLDAALKELRYASRARSRCTKGSRRYRERTTEISRLHRRVNDVRTHHLHVLTTRLAQTHGHIVVEGLDAAGMLRQKGLPGARARRRGLSDSALGTPRRHLSYKTGWYGSALVVXXXXXXXXXXXXXXXXXXXXXXXXXXXXXXXXXXXXXXXXXXXXXXXXXXARLQRLSVQPGELVVSIQLHTLGTSDLAARGDRNRAGRHQNQIRHAQSMRGGYRRGDFTRDEAQPLCVQVAAVVEFDDGNELLHAIARNRYRRTAAPSDLLGSLPRCRRENDCGRKQSTDPLFCR

SEQ ID NO: 35516 - protein, 372 aa, unknown
  TnpB Polypeptide
MRKAFRFRLYPTSSQRTKMQESLDACRWVYNKTLEVRRDAWKERQESLSRYNTSNMLPGWKAENSLLAAAHSQCLQDVCTRVDLAFRAFFRRVKAGDTPGYPRFRSRDRYDSFTFPQSGFGLLDNGRLRISKIGNVKIRLHRPLEGIVKTLTIRRDSLGNWYAGFSCIVEPKPLPPTDKVVGVDMGLTYFATLSTGERVENPRFFRKSEKSLAKAQRRLSACGKGSPERRKHKRVVQHIHHRIATRRKDFAHKLSRRLVNEFQIIALEKLDIQGMQDGNWRSMNKSISDAAWRQFIQCCSSKAEEAGRTVVQVDPRNTSQMCSGCGQIVTKDLSVRVHDCPHCGLVLDRDHNAALNILARGLVCMGSIPRSS

SEQ ID NO: 35517 - protein, 420 aa, unknown
  TnpB Polypeptide
MKRFSGFSHGFSRQTSYIHNMSYRTIKIEWLPTSSAQWKMFTAVRLEAGRLWSWLVERHATASQEGGVWPTKAELQSEIKRQFLNLHSQSAQQIVADFCEAIASAESLRKHGEPYAYPHKKLRYRQVIFTNQGARCRNGILVLPCGNAGRLSVRIPKGIVLPGRLMEVRLDYGCLEMVCQIVDAPRAGSTIIGVDLGVNTVIAATDGEKAILLSGGEIKATIQLRNKRLAEITTKQAHKTKGSRRHKRLQRRKYRMLTTAKNKVRDLCHKATRKVADAFPNAKAYVGEPFNDASRKLGRKQAQTVSSACNRKLISLLHYKRAACIEVEEKYSSQTCPVCGERSKHRRTYRCRCGFVAPRDVVGSTNIRTIGIDGAMRPGCSVPNALQWQHPSKYPATSVAGSPSDTGEIARDSSREAAGL

SEQ ID NO: 35518 - protein, 426 aa, Geitlerinema sp.
MIPSYQYRLKPTYDQRCRMTRWLDMLRYQYNYLLTDRFDWWEMNHCSINACPLVSSIAKPREKPTYYGQKRSLVQLKEERPWYKEVHTHVLQDVVKRVNLAFQRWLKGDGNGKRSGKPRFKGKNRYRTMAFSSMPSDPVNGNRVKFPKLGEIKFIRHRPLPEGVKVKRALITKKADGWYVTLTLEDKSIPDSATLDIKTTQDNNLGIDSGWECFVAGSDGSTKEPRRFYRQAEDKLAKLQVNRDKKAEGFKPRRKLNQRIAKLHQKIARQRKQWHYELAGELLDRADVLFVEDLQGSNMTGRGQPKQDENGNYLPNRLSARSGLNKSFADAGIAEFLNEILFYQAEKAGKPVIKVNPKGTSRHCSNCLNRVPKELSDRWHNSCPHCGIELQRDVNSGILIKKVGWGIASLKNANPSKGRRSQQRTA

SEQ ID NO: 35519 - protein, 418 aa, unknown
  TnpB Polypeptide
VEERDIIVSMTAAGNNNQTVRYNYRLYPTKTQEAVLNRLFGCCRVVYNDTIDFFNNNFNPNNQSKLPTAANASKQILTNAKKTTKRAFLKEVSSVALQQELRNAWLACLHGVSHSSNQKPAKRKTKKHNPVNSANFTSNGFSINQHGVYISKIGVIKTKWSRPMPSEPTSCTISHARNGRWYASFVVKRPKTPFAQCDNNAGIDMGLTDMATIVNTKGKRWKIENPRNYAKIQDKIGRLQRHLSKQTKGSKRYERTRHQIALLYSKAHDALADYQWKNVLNIIRETQAIGVETLDIKSMAVKHGKSVRDASMRSFLNKLGSKADEHCRVIIQLNQWLVTTKVCALCKHKLKVGLPEYARHWVCPKCGAHLDRDYNAALNILDAAGLAGSLNARGGSVRSFLVSAENGCSRGTAYHPNF

SEQ ID NO: 35520 - protein, 290 aa, Streptomyces sp.
VDFPKDGDGCRWDSTPHDPVNRVRFQGVGHVKMNQHRAVAGKVKTVSVKREGRKWFVVLTAEQHQPEPLPATGSVAGIDLGIASFLADSNGGFVESPRHGRRAAKRLEAAQQELSRFPRRKAKDRTRNHQRAVAKVAGLHGKVRRQRLDHAHKTALDLVREHDFIAHQDLKIRNMTKAPSPKPDPDQPGTFLPNGAASKTGLNRSIADAGWGVFLAILNAKAESAGREVMAVDPRNTSRRCPECGHTAKENRPTQEKFHCQQCGHQAHVDTVGALNVLRAGLVRREAQQA

SEQ ID NO: 35521 - protein, 158 aa, unknown
  TnpB Polypeptide
MRQTPSSRRRLKAIGQRENRWMQDVNHCVSKALVENNPKHTLFVLEDLSGIRNVIERVRIKDRYVSVSWSFYDLEQKLIYKAKQNQSSVIKVAPHYTSQCCPVCGHTEKSNRNKKIHLFTCKNCGYKSNDDRIGAMNLYRMGINYLVDSQVPNTVVTE

SEQ ID NO: 35522 - protein, 292 aa, unknown
  TnpB Polypeptide
MAQYKVSGSMRYTITAGGFLKLTCSFEKKTQTSAEHSKIIGVDVGITDAFHTSEGQAIGSFQSAIDFYQTEVEASFGKLSVLRNRKQQLRWFLKKHKDVLPEDVIRNLRKRMDHLEKDIQQSKAPYRKKRHYHQLIEQTIRSAVDTYIKSLHGDKTILTAMELLDIKEFNKSCKVNGMLSVFSRGKLTEKLMEELSWHGFPFVQVEPAYTSQTCLVCGCLDKANRNGKVFHCTCCGHTDDADHVGSINIKARAEDKEIHAICKKYPYSKKKRQAAIQTLQAERNTEWKKVTA

SEQ ID NO: 35523 - protein, 228 aa, Moorea sp.
VAIGQGRAKYPRFKSYNHRQSIQYPQNVKQVGNYLKFPGKLGIVKAVIHRPLDGEIKTVTVSKDPSGKYYASVLVEYEGDHVKSSTDGKVIGIDLGIKDFAITYDGEKTSKFSNPKHLAKYEKKLAKKQRIAARKKKGSNGRKKAVKIVAKVYEQIRNVRQDYLHKLSRKIVDQNQVVVVENLNVKGMVCATRTLRERNHKLAKAISDRVAWPLGQSGLGNLCKLPFL

SEQ ID NO: 35524 - protein, 450 aa, Okeania sp.
MRTAYQYKLRPNKKQLATIELWLELLRRQYNYRLGERFSWWEENPSPVNACPLVMPIPQLLDDPNYYSQKRDLVNTKDKFPSYKLIHSQVYRDCIKRVKLAFDRWFKVDKNGHKLGKPRFKGKGRYRSFTYPQIKLDCIEENYINLPKIGKVKLIQHRPIPEGFIIKTVTITRKADGYYVTLSLEDKSVPALSCQVEPTLKNTLGIDMGLKEFLVTSEGESVPIPQYYRKSQKRLKTLQKRLYRKKKGSKRRLKAVKAVAKQHKKVADQRKDFHFKTANELLSKAEVIAHENLNIKGLAKTHLSKSINDAGWGQFLTILTVKAENAGQKTIAVNPKNTSQDCSNCGEKVDKELNIRTHSCPHCGVVIDRDLNAAINIKNRAVGHSVLKARACPTGYRGYETRSPHYSASKRVGVCHQLWLKFPTTTSDSLGGRSSISPSRTLKKMNKVEC

SEQ ID NO: 35525 - protein, 288 aa, unknown
  TnpB Polypeptide
MVCCAAETYGYGIFKKTLVGQKSFGANIGEKARQIFSAFYVCGRGIFKPDTCQRTNDLQCGSRHQYGCSLYHHASRRNYPGKKVYNFSSDKDRMYRVLGRIRRFQREHGSRQAQGRWAYAKRLNTELGRKIAKEIVLYASENKADVIVFEYLEMKGKLSGKKKQKLQMWRKRDIQKRCGQQAHRKGIRISRICAWNTSRLAFDGSGEIARDTRDHRLCTFQTGKRYNCDLSASYNIGARYFIREILKPLPETERSLLEAKVPAVKRRTSCVYADLRELISEMELRKAA

SEQ ID NO: 35526 - protein, 432 aa, Natronococcus sp.
LWNQINYRRRQQYFAEGGDVWDAEYTDLYDEYAPILGKAACQQVARKNSEAWRSHFDLLDKYHSDDPSVTENPSPPGYWGNRDDGYVLHGLVRNDLYAFDWGEKWSTLEFGVGDVLEDKYDFEYQERVTLEVRGNPQWDGDDSRLELVYDEAVDTLRVKHPVRIRPDKLREQRLDAFTHTLDTENTTHKAAIDVGANNTLAIVTSTGETAVYHARPEFDQFQVVSELIVELQSALPGDQYSSQRIQRVYDERSRKRDHSRDAAVKHAAEWLLARTVHTVYVGDLTDVLDTHWSAAVNEKTHAFWSHRQLVNRLELTLGDVGITVEQVSEFDSSSECPACGGGDVARNGDSFRCHDCELDAHSDVVGAWNLLQDKVGPMARPAALSAERDRDTPREGAYWKWNGHEWTPASFGEQSCPFDQTSVSKPASSRPG

SEQ ID NO: 35527 - protein, 470 aa, Natronococcus sp.
VSDRPRRTNEYTATPTSERYKQCLFEWLVAHAPLWNQINYRRLDQYFDPDGNVWDAEYTDLYDKYAPVLGKATCQQVARKNADAWRSHFDLLETYHSDAPSITEKPSPTGFKGNRDDGYELYGLVRNDLYEFDWDEHQSTLEFGVGEVLEEKYDFDHNERITLEVRGNPQWDGDDAQLELVYDEAADTLRVKHPVRIRSDRLREQRLDAFTHTLDPENTMHAAAIDVGANNTLAIVTTTGETAVYHARPEFERFQALSELIAELQSQLPADQYTSPRIQRVYERRGERRDHSRDAGVKHAADWLLERNVCTVYVGDLTGVLETHWSAVVNEKTHAFWSHRQLVDRLELMLGDVRITVEQVSEAESSSACPECGSENVSREGDLFRCRDCALDAHSDVVGAWNLLQAREGPMARPAALSAGRGRDGSDNSSECDGTYWEWDGHDWRPAVFGKQSSPVDQPSVGKPASSQPG

SEQ ID NO: 35528 - protein, 613 aa, Actinoplanes sp.
VIPLELDLSDPAIRSRVFAMFGAIWHLRRALQRRAVNRVDAYWRSKRLRASDPRAARVAFGLSRRAFEQAAAEHVDRSGWLRRHLTKAVAMHLADEIWAAVDRHLFSDESGNRHGRPRVGSWWTSNRIPGRARSHTKPKTWETFHLVGSLGAHREAGGHHGRTPIKPVERATWWDYGGPLAVVFTGAGDDLVLPIRLQSRPGSQARFDHFLGRPQLWHKVDLVRVEDPKAPGGWRVYAHLMILGPGWTSPAVAGQRAAAPSDRLGGVDGNVSSLAVVSMPADPAELGGLRTSLVTITAEQRESAARAAKKARDQQRSLDRSRRNSNPGQYQQSKRERGRADRRAGAGLVPRQVPTPTGARVANRNGVPRQAYRKDQLSPAYRRTRAEHAAAARSRSQAKHARAQQISRAIVAEHGPRLVVEHTNIHAWARLWGRGIALFSPGMLIAALKVECVAAGGRMLRAGTRQTALSQQCPCGRREKKPLSQRVHACPVCGLRGHRDLVAAAMGACVTFGDPDQPSTAYIDQFLREALAYRIEIQGQQDALTWSTATANARSPGVSVGTAAAESQRPLPDKPDTTETDHPPMTHTGFSGRREHAEPSVRHGPESSHRLKS

SEQ ID NO: 35529 - protein, 249 aa, Thermoplasmatales sp.
MIFENINQIELDSEFAYISVTVPECAVIQPKGYLGVGRNTTGHIAVVANPQNGKVLKLGKKAYHTHKKYKNMRKNLQKNGKNRKVKETKNRENRIVKDINHKVSKKIVHEAKKNGMGIKLEYLHGIRNAKSSRNFRYSLNSWSFYQLEQMIEYKARLLGIPVVYVDPYHTSKECSICGQIGNRSGKSFKCQCGHVDHADANASFNIALRPEFEEGIDQLRVDRDARKGNTDIHREAPPGTTETLEPPKL

SEQ ID NO: 35530 - protein, 404 aa, Natrarchaeobius sp.
MDWQRDTVWQLYNHALREFNQIPEDAGTLRQRVWMVRDTLPALKDWWTDLTKVYSTVLQKAVERIRDNINSLGELKAKGYDVGSLNWKSPRESRSFTYRQSGFELDKKSGPDGHALLRLKKLEGETRTIPVRMHRDLPDHDTIKEVTLKKDPTGVWYASFTIETDTPAKPEPGDIDAEDTVGLDLGVLNFIHDSDGRLVKRLALSGDRERLEREQRSLSRKQEGSNNWEKQRRRVAEIHARMSNKKRDFKHKLAHFYTTEYDAVFVENLNVKRMLESPQNARNKHEVGWHDFLTILEHHGEKNGCHVVEVESRGTTKECAECGAETAKPLWAREHSCPSCGFELDRDWNAALNIQQRGWNRLGVVHSEDTPAETATAVDTLSVSASRVVEIGSSCLKETAQVAE

SEQ ID NO: 35531 - protein, 571 aa, unknown
  TnpB Polypeptide
LGTRGPSLTRSCQRGRHALLRSNPPAGSSRARNRSDGSLCPSLEPRAERRPEASGGDPGAVLREERMALRADPRSWLGNELPEEGPEASSGNDPESSGQEGGFDPQRSSPTFWSGTGVRFVRGSPGRGGDLESGRGIFVRGGAGTGRAGDDHGVFGSPVRLALAQEPEAGGSGQGPERVTEMAMLAHQIRLTPHGVQAEYFRKACGTSRFAWNWGLAEWKRRYEAGERVDALKLKKDFNALKPVDFPWTYEVTKYASQQPFLHLQAAFRRFFDKKARYPRFKRKGVNDSFYIGGDQIQVSGKRIRIPRLGWVRMREELRFRGKVVSATVRRIAERWFVSVQVELDEAPVPCESQAGIGVDLGVNRLATLSNGEMFEGPKPLRQELRKLRRLSRRLSGKHQGSNNRHKACTRLARLHYRIRCIRQDALHKLTSYLTENFAGIAIEDLNVKGMLRNRRLARAISDMGFHEFRRQLDYKTRMRGNHLEIVDRWFASSKGCSKCGLVKDNLALGERAFVCEGCGFESDRDLNAAMNLLRTVSSTGTQACGEGGSGSSTRWSETILCEAGTWRDQI

SEQ ID NO: 35532 - protein, 435 aa, Cyanobacteria sp.
VIPLYGTQQIMLHPDSLEKEVLIFICQQATSLANCGTYLLRQAYFTFKTIEDNAFALHSALKDNPHFKILRSAAAQQVLTGVAESFTSYKGLLDAYFKGKLHTEPRLPGYRTKGGLATVPYPARWVDFDLESGWAKLSLGNEFKARFGIDAIQIPPPHGLKVEWLKEIRILPRNGCFYAEYVFEKPTPIVELDANRVLGIDPGLNNWLTCVSNVGASFIINGREVKSFNRFYNKQVAQIKQGKSQDYWDDQLAALTEKRNRRNRDAINKAARMVIDKCIKLKIGMIVFGWNQGNKDGIELGKKNNQEFVQVPTARLKERIKQLCEQYGIQFIETEESYTSSSSALDGDILPTFGAKPEGWKPSGRRIDRGRYRTASGLVINADCNGALNILRKVEAQLGLTNLVEACRAVLTLPTRFNIWYSKRKRGEARFQPAS

SEQ ID NO: 35533 - protein, 298 aa, Bacillus sp.
MTKQNKAYKFRLYPTEDQAHLMRKTFGCVRFVYNRMLAERKEAFEKHKDDKDQLKKQKLPTPAKYKAEFEWLKEVDSLALANAQLNLQTAYKNFFRGQNDFPTFKSKKDRKSYTTNVVNGNIMLLNGHIKLPKLKMVRIKLHREIPQDHVIKSCTISMTPTGKYYVSILTEYEKEIVQKEVETVVGLDFAMDQLYVSSEDERANYPKFYREMLDRLAKAQRVLSRRTKGSGRWNKQRIRVAKLHEKVANQRKNFLHHKSKELATHFDVVAIEDLNMKGISQALHFGKSVADNAWGMFT

SEQ ID NO: 35534 - protein, 398 aa, Microtetraspora sp.
VQLRYNVRLYPTPGQRQALARAFGCARVVFNDGLCARQEAREQGVPYIADGDLSKRVITQAKKRPERAWLGEVSAVVLQQALVDLNAAYRNFFTSISGKRKGPKVAPPRFRSKRDNRQAIRFTKNARFSITAGGKLRLPKIGDVPVRWSRDLPAEPSSVTVVKDSAGRYFASFVVETSDVPLPESAAEVGIDLGLSHFAVTSDGRKVGNPRFLRRAERRLRKAQRSLSRKAKGSANRAKARTKVAKAHARVADTRRDWAHKLSTALIRDNQAVYVENLAVSGLGRTRLAKSVHDAGWSQFVGMLEYKAARYGRCFAKIDRWFPSSKLCSDCGTVAESMPLNVRSWECPCGVVHDRDVNAAKNILAAGRADRLNACGAQVRPGPVPAQRDEAGSLRGAA

SEQ ID NO: 35535 - protein, 370 aa, unknown
  TnpB Polypeptide
LQYLTYKFRLKDGGNKRKQLLRWASAVNTVWNYCNEASYQTLRKHSKWLSFKELTNLTAGSNKELELQSQVVQQVCKEYVRKRVQTKRQKLSWRKSHGSKRSLGWIPCTNQNIVVYDGQEVVFNKKTFKFWKSREIPDTIKSVSFNEDARGRWYVNFVCEVEEAPQYGMLDLGVDLGIKTQATISDGRKFERENLTKKYEDRLAMAQRARKKKLVRTIQTKIANIRKDWNHKTANAILKDARLVVIGDVSCTKLAKTKMAKSVLDSAWGQLRLFLRYKAIRLGTIYMDQNESWTTIPCSDCFERTGPSGLRGLSIREWVCSNCGSIHDRDVNAARNILRLGLQTPIKGISTVKKRKSHKENEEQENVVPA

SEQ ID NO: 35536 - protein, 419 aa, Nostoc sp.
MLTMNYRYRIYPNITQEQSLFEWIDVCRVAYNYGLREIKDWCNSRKCLVDRCSISHEYIMAADSPFPSEVKQLNALPNAKKVFPRLGEVPSQVLQQAIKQLHRGWEGFQKIGHGFPRFKKYGQFKSLLFPQFKESPVIGLNIKLPKLGLIPINLHRPIPSGFVVKQIRIINKADIWYASINIQCDVNVPDPIPHGHPIGVDVGLEKFLATSDGVLVKSPKFLKVMQSKLKLLQSRLSRKKKRSKNYQKQRIKVARLHHTIDNTRKDFHFKQAHALCDAGDMVFMEDLDYRTLAKGMLGKQMLDAGFGQFRTISKYVSWKRGKFFGEVSARGTSIECPECGAEVRKDLSVRVHHCHSCNYTTDRDVASGQVIRNRGIELISTAGHVGIQNAYADGLPGTGETQSRSKSKPRKGVTRKTKK

SEQ ID NO: 35537 - protein, 386 aa, Crocosphaera sp.
MLVLEFKVRAKQYQYTATDEAIRTAQFVQNKCLRFWMDNQKVDKYDLNKYCRVLAHDFHFANKLNSQARQSSAERAWSAISRFYDNCKRKIPGKKGYPKFKKNCRSVEYKTTGWKLDLNTRKAITFIDKNNIGRVKLVGTYDLHFYPIESIKRVRLIRRADGYYCQFILSIDVKIDSSPANSVIGLDVGLESFYTDQNGQKIDNPRFLRKGEKKLKKLQRRLSRKQKGSSNRRKARAKLAKAHLKISRQRKDFAVKLARCVIYSNDVIAYEDLRIKNLLKNHCLAKSINDAAWYQFREWIEYLGKKHGKITVAVPPHYTSQKCSNCGEIVKKSLSTRTHICACGCHLYRDENAARNILKIGLSTAGHSGTWLQDSLNAWGEDTATF

SEQ ID NO: 35538 - protein, 543 aa, Streptomyces sp.
VGELRSIAPPFVASGPSGVAIRTRLKQLTPGDEKVLRLVGAHLGSLASKDLKARCRDGMAHSTEAWAMRKRELTPASSSRWAGSITKATHDQWALARRCQLAHLENLEAGIRTIAARLALPVGQKGTKTAPGGYRSRREWHAKSRRLRVLEDRLAAARADRETGVVHVVRGGRQLARTRHHLEAAGLTESEWRGRWEAERWFCQADGEAGKRYGNETIRISPDGEVSIKLPAPLGYLANFPHGRYVLACRVTFAHRGQEWADRVAANRAIAYRIHLDTGRERWYLTASWQIPPTPTLAIEAALAHGVIGVDMNADHLAAWRLDTHGNPTGPPRRFSYDLTGTAEHRDAQVRHTLTRLLHWAQACGVKAIAVEDLDFAAEKTREKHGRRTRFRQLISGMPTSKLRARLASMADQTGIAIIAVDPAYTSRWGAQHWQNPLTTRTRKTTRHDAAAMAIGRRAQAHPIRRRTAPPPAHRSDEQGHRTVQARPGAPGREGTRRRIPGPRTRSVPPGRGANAGNQNAQHRPGRSAEHETWQQDSLPLSL

SEQ ID NO: 35539 - protein, 413 aa, unknown
  TnpB Polypeptide
MLLTKKIKLDISDQDAATLEFMQGKCRGLYNWWIMRLRSGEKWPGVYEAKKTLQASKQYDLELAWVYGKLLAEVYFRLDGAMKAFFRRVKNGEKPGFARVRPRHCFFTLIYPAMYLQIEGKSIRLPTGGKGKNKHFPDIIATLTEEAPIDYKEVAISRDGRGHYYASFVYEEQEKTHEHDGVLAIDLGVKTLATGVNEQGRFYHIGGFKGGQWYNKQLDRIRSKRDHCKKGSSRYKYLSQVYKRVSQQKRNKQHDSLHKASHLIAHKLVERTVVVGNLSQRQMVMKEHRARNKHLNRAVFNDWGLYTFNQMLMYKCQLYGKYLQFLDERNTSKACSGCGNLKAMPLWKRTYCCTECGLIMDRDENSAVNILKRFLARLGPHTGNPVRCAEVFTAIEHQCAEAFTATDQCVQYT

SEQ ID NO: 35540 - protein, 352 aa, unknown
  TnpB Polypeptide
MICTLETCCWLYNYFLEERKTMWNQHKKSTTFYDQCNSLINLKKLKPELSKIYSQTLQDVAKKIDNSFYKFFNKIKKKEKAGYPRIKSLPRYKSFAYPQFEILGKIKDNKIYLPKIGWVKIKLHRKIKGFVKKVLIKKTSTNKWYAIIVCEDYPIEKLPLTNLQIGVDVGLNKFATLSSGEVIENPKFFEKKERILIKLQKQQKRKASCHVREKIKNKKLNFHHQEARKLLNKYDTIYIEKLDINSMKKCGKFKFGKAVSDVAWGNFIRLLKYKAEDAGKKIIEVPPFFTSQTCSKCSHLNKTKAFNFLMQCDKCGHTESRDLNAAKNILRLGTQSLKVKCPLKDAKLLAVA

SEQ ID NO: 35541 - protein, 465 aa, Ferrimicrobium sp.
VATTSAGSRISHSGQVLSRAVTFQFALDPSVEQKNLLAKCAGARRFTVNHHLARVRANLDARLAERDALSASGDPCEPSTPALSWSAFSFINEFNAWKNGQSADSPVSGDGIRGLAWRHELPNDVFECASVDAARALENFAASRRGERAGAPVGFPCFQAKGKVTSSFRLRNRAAASQAPSSQPIRFSDPAHLRLPRFGPVKVFGPTRKVRRMIDAGRFHIYSATLTQRAGRWTVSVTGVAAKLHRAERSRTNRHAVPVGVDRGIISLAVAADANGVPFESFEGVTTLKQAQASLKAANQALARTTPGSKGRQRARARLAKTHRKVANTRRHLVHQASRALVDRAQVLVIEDLNVAGMVKNRHLARSISEAAMGELSRQLLYKARWHGVEVRVTDKFFPSSKTCSGCGVIKDVLDLSTRTYSCGTCGLVIDRDLNAAVNLARWRPKEPSAKKLPAPTRAPLLSTV

SEQ ID NO: 35542 - protein, 463 aa, unknown
  TnpB Polypeptide
MGLRTVTVAVAHKDPLYPVLDKMSLRANNLYNASLFRLRQIMTALRKEPDQLTDNEVEVQQEVEKLLLFKPELRRPTKENPSVGYPFLYHLLYINDNPDYLCKELPKQTGQQIIKNAVRDMKGFHRAKADYWKHPDKYFSEPKLPKYRKSGGRCTYYFTNQQVWFDEDGKIHFPGTKLTGKKLKNVGTDWELKQVNVVPDHGVITLHFIFDDHEQVKETKEPCRIVSIDLGVTNFAAMTNNVGNPAILFKGGWLKHINWQYNRKMANEKSRQTKGSKKPKFKSNVKTDRWGEKRDRRLNDYMHKTAKIIVNYCLKNDIDTIVIGSNQNWKQKTDMGRKNNREFVSIPHDRLKWILKYLCEWNGLNYVEQEESYTSQASYPDLDEIPVYREESNAEYTFSGKRNARGTSRLYRCGNGKILNADLNGSANIGRKAFPELYRCDVKKTLEKIRVYRTVNELNAAGK

SEQ ID NO: 35543 - protein, 330 aa, unknown
  TnpB Polypeptide
MKTYKYPLYDQSNTIRIGNLLDDMWQVHEYFHKWQRQRYKDGLPYANYNAMDSHFKDLKKTTHPHWKILPSQAVQQELLRIDKGYDRFFKKLGGRPHIKPRHKFKSITYPGSAGWSLFNNHITLTFRKWNPKTRKWQFDRIPYTFHKHRQWHGTITQVTIKRDTCGQYWVCITTTYTDFRPLPTTGKSVGADFGMKDAYLTLSTGEKKQHPQPLKHSLKKLRSLNKELSRKQKGSNGWWRCVRQLARLYRKITNQRKDFHWQLASELCKKFDTIVLETLNLDGMKRLWGRKVSDLAFYHFVEILKYKCGKHKRLFKQINQWTATRKPHRL

SEQ ID NO: 35544 - protein, 262 aa, unknown
  TnpB Polypeptide
MKGGDFMEYSYRFRIYPTREQTVQMQRTFGCCRFVYNYYLSKRIDAYKTDKTTLGYKACSADMTALKKQLPWLCEVDATALQSSLRALDAAYQNFFRRVKHGEKPGFPCFKSKHRNRRSYQSKCVGTNIKVLDGAVRLPKLGEVKCRCSRKVEGRVLSATVSQKASGKYYVSLCCTDVDIKPLPKTGAAVGIDLGIKDLAITSDGVKYDNLHSYRRNLKKLVRLQRQLSRKSKGSRNREKARIKIAQLYEHIANQRNDAIHK

SEQ ID NO: 35545 - protein, 447 aa, unknown
  TnpB Polypeptide
MVWLCDGWRTRFNQRREQRTHNVPVKDEAGGIVDWVKEPLGGPDVAELLSDKEVRLQCSWMAGIPNPILSSTDRIENTEWSVGLKRKKTIGGRVPGFKSRHRGLGFVCWRNASKTGNAIFRKTGRKSGVVVIAGMNLTRWRKPGEKLHWRIVIHVRVNQPIRPYTSVHVDWTHRTLVFVNMSLPLPRTGYGEVGIDRGCVHTLTSSDGAFMDAPKPTKAELKRLKYLQRRMARQDRVNEARGGRADKFASKRRGKTLSEFNALQGRIVRRRNDWIEKTTTSLAQENILVAMEDLDVQAMTRRPKPRIDENGHYLHNGAQAKAGLDRSILSNNWSRLCKRLNDKMDANGGKLVIVPAAYTSQTCHKCGHVASENRESQAVFHCVECGYEANADVNAAINILGRAISKTGGDTALDVEGPRWRPDEASTPSTPIGSPLGVRPVKGIPRL

SEQ ID NO: 35546 - protein, 406 aa, Streptomyces sp.
VIRAYKFLLRPTVGQEAALQAMLADHCFLYNGALQERRDAYRHVSRTSITYGGQSAQLKEIRAFDPECQGRWSFSSQQATLRRLDKAFQAFFGRVKAGEKPGYPRFKGVGHFDTVTFPKDGDGCRWDSTPHDTQTRLRLQGVGHVRVHQHRPVRGRVKTISIKREGRRWYVVLSCDEVPAEPLPATGCIVGIDMGTVHFFTDSHGNHVENPRFLESMADELTTAQQHLATFPRRTKQRTKKHRAAARKVAKLHAKIRRQRADYHHKTALALVQEHDVIGHETLNTAGMTKAPVPKPDPDNGGAFLPNGAAAKAGLNRSILDAGWGRFLSILAQKAESAARRVIPVDARNTSRTCPPEIGGCGHVAKENRVTQAKFECVKCGLVENADRVGALNVLHRAGLVLCAEA

SEQ ID NO: 35547 - protein, 416 aa, Nocardiopsis sp.
MKVVVRIKLLPSPEQAQALQATLDACNRAASAASQVAFDTGTTHKYALQKRVYTTLKAEFGLSAQPAVRVVGKVADAYTTRTTHLRNGLLGRQGSKRRARTESTPIRFRPDAAQPFDARCLSWQLDARTVSIWTTRGRMKDLAFTGSPDQLTMLAEHRQGESDLLCLDGVWFLSATCEVPEKPLNTDPAGFVGVDLGIVEIATTSTGDRFAGRGLNRYRRRQNRLRAKLQRKNTKSAKRVLKRLRRREARRARDVNHRISKSIVERAERTGHGIALEDLKGIRGRVRQAKHQRSTLHSWGFAQLRDFITYKARRAGVPVVVVDPAYSSQSCSECDHTSRRNRPSRAVFSCTACGVVLHADTNASRNLARRGEVVWNAGRLSAAPTPPLERGWTREASYHPGGTLPASLWLQPQVVD

SEQ ID NO: 35548 - protein, 341 aa, Nocardiopsis sp.
LAAFLGGSRGCPQRRKKYRNEGFRVIGTGRVPVFDTSGEPVLNAKGRQVHARQVLVQKLNKKWAQVKVPGCGWVKFRNTRPGLPDAKSFRVTYRAGKWHVAFAVIPDPVDAPGNGETVGIDRGVAITAALSDGRVLNCPHLSVKERAKLRKPQRRASRTGKGSLLCKAEHTEAARLKAKEANRCKDWCEKTSTMLARSFDTIRFEKLHIKHMTRSARGTVDEPGKQVSQKTGLNRAILAQGWGLLRQRTEDKAPGRVEDVPTAYTSLRCSDCHWIDKNSRKSQARFVCSNCGFTCNADLNASNNVAAGQGGNSRPRHSAGAGGMTRRSLRVSVNPSNAISP

SEQ ID NO: 35549 - protein, 388 aa, Nocardiopsis sp.
MKLTVQVRLVPDAVQASALERTLPAVNDAATWVSTVSFDRFGLKGSVRELRKLCYGELKAQGFGAQAAQHILKRVADAYTTLRANIRGGNLGPPTSQRRRRAESKPIAFRPHAAHTFDDRCLSWNHDAQTVSIWTLDGRIKNLRFACSPGALKQLAEHRKGESDLVFRNGKWFLIATIEVPEPEVFEPRDWVGVDRGIVNLATTSDGHNHQGRRLGRYRRWQARKRAELQAKRTRSAAQLLKKRAKREARHAAHVNHKVSKTVVAVAQRTGRGIALEELQGIRDRVTVSRDQRARLSSWPFHQLGAFIAYKAKRAGVPYLEVNPAYTSQMCPVPWCGHTARNNRPTRDTFRCRRCGFAGPADVVAGINVRDRARSAWVFVNRPDPAPV

SEQ ID NO: 35550 - protein, 387 aa, Nocardiopsis sp.
MKVVVRVKLLPSPEQARALQATLGACNRAANAASRVAFDTGATHKYALQQRVYTALKAEFGLSAQPAVRVIGKVADAYTTRTTHLRNGLLGREGAKRRERAESTPIRFRPDAAQPFDARCLSWQVDTRTVSIWTTQGRMKDLAFTGSPDQLKTLAEHRQGESDLIVQDGVWFLAATCEVPEKALNTDPVGFVGVDLGIVEIATTSTGQRHAGRALNRYRRRQNRLRAKLQKKNTKSAKRVLKRLRRRETRRAKDVNHRISKSIVERAERTGHGIALEDLKGIRGRVRQAKRQRAALHSWSFAQLRDFITYKARRAGVPVVVVDPAYSSQSCSECDHTSRRNRPSRAVFACTECGVVLHADTNASRNLARRGVVVWNAGRYVSRPRPS

SEQ ID NO: 35551 - protein, 236 aa, Nocardiopsis sp.
VPDAAECETDGFVGVDLGIVNIATTSDGHIMAGRKLNRYRERQRRLRAKLHKKGTKSAKRLLKRQRRKESRRSRDANHVISKRIVAEAERTSRGIALEDLTGIRRRVRQRKPQRAALHSWSFRRLGDFIAYKAKRAGVPVVFVNPAYSSRECAECAYTHRHNRISQAAFTCRSCGVVAHADRNASRVLARRGQDTWDAGRQSSVPDGVARHRPDAEATRASRPGPDRKLGRSRPRS

SEQ ID NO: 35552 - protein, 404 aa, Chloroflexus sp.
VLIAHKIALDPNNKQATSFKKACGVARFAYNWALAEWKRQYEAHKADPSLPKPSEAALRRQLNAIKREQFPWMLAVTKNAPQMAIIQLGEAFKNFFAGRARYPQFRKKGKDDRFTLTNDQVRIDGCRIRIPNLGWVRMRESLRFAGKIMSATISRVANRWFVSITVDTDNPPKRPAENQGVVGVDLGVSAMATLSTGEKIAGPKPHTALLKRLRRLSRSLSRKQKGSANWRKAKAKLARLHARIANIRQDALHKLTSDLTRRFHTIVIENLNVRGMLKNRHLARAIADMSFFEFRRQLDYKAAMRGGQVVVADRFFASSKTCSACGHKLEDLPLSVRQWTCPKCGTIHDRDINAAINLKNLAAQRGPTASSAGSDACGEEGSGGHRKMAVKPASMKQEVSFEPA

SEQ ID NO: 35553 - protein, 395 aa, Moraxella sp.
MTTIRGHIIALDPNNTQATHLKKACGVARFAYNWALAAWKKQYEQDKNYRDDCLKHHITIDENKLNKPTQGKLRKQLNAIKREQFPFMLEVTKCSPQLAIMQLGDAFKRFFKGESKYPQFRKKGVNDRFSLSNDQFKLKLKKDKPHIQIPNLGLVRMREHLRHNGKILSAKIFSKGGKWFVSIAVELNSDDIVNTLKTNQTTKTNKSVGIDLGITDLATLSTGEKIQAPKPLKNKLKKLRRLNKSLSRKQKDSRNRAKAKTKLSRLHLKIFNIRKDFLHKLTTDLVKRFDVICIENLNIKGMVKNRKLSRAISDLGFYEFKRQLIYKANTFGKTIKELDKFYPSSKTCHCCNRKVDDLPLNIRNWTCPNCQTNHDRDINASLNILHKADKVLTLS

SEQ ID NO: 35554 - protein, 609 aa, Rhodococcus sp.
MGDDHGVEVGQLMADAGLPALRQFSFTTRPYLAVDDITGEPIGLDDVDTRVGWLLDLISGAEARLLARLWRPATFDVLAAGVDRQGRKLPIQGHVAAARLGWTPHYPDDVYIPSRVTRVVTAQAMATLRTLTYRDTAITALSARFDPATGTLAPPTEPGDWVPLGFARGVVRQLTARACRTDGAVQARLRITDMQAPPKTSAMARLSAADRQLAHLTVTDAVMTLTVKLPTTVAPTGHAQWRRVRLTAAIPPHLHDRPITDWHLPTLVLDRKGLLWRCAATETVPAADLTSGTSAVGVDWCPSTLGAAATAAEGPEGLVSDYRGVTYDDRGLGTKLARLQAEGQMLHRKAARLTRLAATAPPEVRARLEAKIAVLDAHREAVGIKRGKINRELAFHFARQVTDYATSAGARVIAVEDLTTLETRGHGRVNNNRAAQSARRKATAALAHTAAGVGIVVVSVPARGSSAQCPGCDAPLARPGGYHTAWCPGCRVGGNRDHVAGVNLAKRALLGKNKATRRRGQMPAIRVAEHAPVRRSRDKTSPTPRRPRHRRVRRSLPTVTPRAGVTPNRYVPAPQASVWDTVKPAPPHGDAGSRDTRPSPTPPRKWQTV

SEQ ID NO: 35555 - protein, 356 aa, unknown
  TnpB Polypeptide
MAVPSVEELVGQQEGQARGPQVGWPKYKSKRSSVPRFAYTTGSFGLIEDDPKALKLPRIGRVHCMENATERVHGRRIVRMTVSRHAGFWYAALTVERPTESVPAKNRKQKNRNRQVGVDLGVKTLATLSDGTTFPNPRNYVRTQRKLRHAQQSLSRRDRGMNHGCGSKRYNRALERVRRIHARIAAQRADNISKLTTWLADNYSDISIEDLNVQGMSHNRRLAKHILDADFHEFRRQLEYKTARTGTRLHVIDRWYPSSKTCSNCGTVKAKLSLSERVYHCKECGLVIDRDLNAAINIQVAGSAPETLNARGGSVRQAHPKGGTMRHPAKREPSGGESRVRLGAGLGNEAMQMTSL

SEQ ID NO: 35556 - protein, 434 aa, unknown
  TnpB Polypeptide
MAPTQAMRTIRQHITHRPVVSEWFTTTQHLYNAVVRHFFEVLQAHPGVLDLSEKDALKALERLTHQTKANPNPVMPLSEIAPQVPAMLRRAAIHAALGSARSFQSHLARWRAAKAKAEARGKLFHLRPPIPPRHWNRSVTLYQGMWKCKTKTRIVLKLYDGTSWRWVRFELSAQDIPERWERGSPQIVRKGKRWWLHTPLTHAMERPKKVETQVRLNPEVRLCSVDLNITHALAVATILDANGTALATTFIHGGKVLHDRRKRQLGRIARNRRRTGIIEAGIQDNQARWEKIRHLDEDTAHRVSRRLVDFAVAHGASLLVFEQLGHFRPQKGSYSKRGNEKRAYWLRGKIFTDARYKAWNQGIVTCRVNPRDTSRRCAQCGALVARYDEAHPAEGYTPGAPLFLCTNPACRKQGNADRNAAENIGKRLLARYAT

SEQ ID NO: 35557 - protein, 365 aa, Blautia sp.
MQKGIKFRIYPNREQQNIINQTLGCCRLIYNKGLAMRNEAYQHGSKVRYLQTSAMLTELKKNDEFAFLKAVDSIALQQSLRDLDRGFVNFFQKRARHPQFKSKHNLRQSYRTINQGDNIRIVGKYLKLPKLGFVKIRQSMEVGKIHNVTIEHTSTGKYFAVLNVDFEPKLIENKGASIGIDVGIREFYSDSNGNEVPNPKYLEKSMKKLIREQRKLSRKQKGSANRDRQRVKVALVHEKITNQRNDFLQKQSTMLIRENQTICVEALKVKNMLRNHKLAQSISSVSWSKFFDMLAYKSAWYGNNIVKVPTMYPSSQMCSCCGYKNPLVKNLAVREWECPECHTRHDRDTNASVNILNKGLQMQSA

SEQ ID NO: 35558 - protein, 465 aa, unknown
  TnpB Polypeptide
MGLFSIDKNIEVDEATGRALDGQSKICNWLYNHLLERANGLRAQYRETRDSATALTLYSKRGLRDLVPDLKADHTFLKSVYSSPLKNAGLRLSKAIRDYQASQHGKRPGPKVKWPKFRSWKTRWFSLEYDEPWKGYTLDGQTLQLKLGVDADGQRVSTLGRLAEPLPTRYAENVKTLRIVKEAGQFYAVFTVDMDARQPGKVKHPRVIALDPNHKNLAYGVGTDGRAIEIENMPGLKALDARIDLLKSRRDQCQRNSVKVVRPDGSVFYRPSRRWTFFNNRLQDAYRKRREQTKTFLNTVCHRLCRDYDVIGVGNYTPHGGGITRGMRRAMNNSSLIGRLKTTLDWTAAKSGKRYSEYDEAKTTRTCCDCGCKVEGGIALDIREWTCIECGAFHIRDENAAQNGLPRVLKQNHLPRSGHTPEVKVLARWAWRVTPSGVVATLRGRDGSALDTTDSEHRQEIKPEA

SEQ ID NO: 35559 - protein, 411 aa, Holophagaceae sp.
MQLLKGHRFRLDLAESQTEFCSRTAGICRFVWNLALEQRSMAWKHGRHHAGYNAQAGELAELKGLAPWIAEAPHHCLQQTLRDLDTAFQNFFAGRAAYPTFRKRFQKDSFRFPDPKQFKVDEVRQQIKLPKLGWVPYRNGKGRHALKLHGTIKSVTVAREGQHWFASILCEAEVAEPVPVLGPAVGIDLGVAQAITLSSGQEPIQIPGMTKAESRRLARIQRAFARKQRGSINRAKARTRLAEFQARIARRRRDAVHKATTMLAKSHSLVVIEDLRIKGMTKAPAARPDPEQEGHFLPNGAAAKAGLNKAILDKGWGEIRRQLEYKCRWYGSRLVAVPPAYTSQECSACHHTEAGNRTTQAEFLCLRCGHAENADTNAAKNILSKGTADGPSVSACGARASVGRRSRKVAA

SEQ ID NO: 35560 - protein, 446 aa, unknown
  TnpB Polypeptide
MTREEKTEVWKNSLSKTKEKRKSQDCKVFTFKLDRDKLTKVKLSYFSLLFAEAKWVYNHYLSQSDIFHVDTKIDKVNALDKDRNPVVHELKVIGSQMKQAINRGQISNIKTLSSLKKQGETVGRLKFRSRVDSITLDQFGITYKLDGNFLRLQGNRSMKFKLLGKHQIPKDAEFANAVLTRKNGDFYLKVTCFVPKINQEIFPSEAVGIDVGCSTALTLSDGTKYNVKFPVSKRTRHLQRKLKNKPSHKIKGRKSSNCWKLYGKINRSIEKTSNCKKDRINKIVSEIAKKYKNICMQDENVKGWHSGRYGKSVQFSSVGGIMRALQSKAHTFTEVDRFFPSTQRCCRCHERQKVGLEERIFVCVHCNLVIDRDWNAALNILQEGLRIRLEKQLPTERRNVKPVELGIPANVCKSFTKKQEASVFSEPMETLEFTRQRPEASAFRQR

SEQ ID NO: 35561 - protein, 427 aa, unknown
  TnpB Polypeptide
MHQENTMLPRRISVSLFIDQSIIWPVKRLQAFKFQLRPGDQQECEMRRFAGACRFVFNRALALQNENHEAGNKYIPYGKMASWLVEWKNATETQWLKDSPSQPLQQSLKDLERAYKNFFRKRAAFPRFKKRGQNDAFRYPQGVKLDQENSRIFLPKLGWMRYRNSRQVTGVVKNVTVSQSCGKWYISIQTESEVSTPVHPSASMVGLDAGVAKLATLSDGTVFEPVNSFQKNQKTLARLQRQLSRKVKFSNNWQKQKRKIQRLHSRIAYIRRDYLHKVTTTVSKNHAMIVIEDLKVSNMSKSAAGTVSQPGRNVRAKSGLNRSILDQGWYEMRRQLAYKQLWRGGQVLAVPPAYTSQRCACCGHTAKENRLSQSQFRCQVCGYTANADVNGARNILAAGHAVLACGEMVQSGRPLKQEPTEMIQATA

SEQ ID NO: 35562 - protein, 188 aa, Scytonema sp.
RASLQRKASTRTRSSRRRCRQVLARLSGRERRFQAWVNHNISKTIIQQAKSEQALVAIEDLTGIRERTNQKPRNKTERRRSNSWAFYQLRVFLEYKGLTDGVEVVVVPPAYTSQTCYQCLYIGLRSDKRFKCGNCGLSCDADLNGAKMIALLGQSVNLPGGSNGLCCNLSTDSSGLLKAHTVPQGQCG

SEQ ID NO: 35563 - protein, 491 aa, unknown
  TnpB Polypeptide
MQKMLMTQQIKVKKGHKMYDYFDEMCFKSKNLYNAGNFYIRQCLTGLKKDAKNLTLNEKEAIDLFNNTIPKLNQLKIENYNKRIAKEALKPKDKQKEIQNPTEYKLLSKDNSFLGYNLLEGVLKLIKHPDYIALPGQVNQQVLKMLIYDWNSFFGKNKSYKANPSRHNGRPKPPNYAKKNGRKVATFTNQICKIKDNKYLRFPKTKLKLNIGKIGLVNGNLRQVRVIPYSNYYVVEVIYKLNEDKEAKRIRENKLNSKPERVIGIDLGIDNFATIANNIGLQPIIIKGKVLKSINQYYNKQKAHYYSILRQGKSQYEGQFKSKRLMRLDEKRNAKTKDFMHKASKALIDYCITNDIDTIVIGKNKNWKKKINIGKINNQKFTIIPFNQFIKMVEYKAYEKGIKVIITEESYTSKASFFDYDTPPAYNKSNKEKHSFSGKRIERGLYKTKEGKLVNADVNGALNIIIKVIPDAFSKPRDIGLVANPLVLSIA

SEQ ID NO: 35564 - protein, 336 aa, unknown
  TnpB Polypeptide
MSIRAIALTLKPTDVEKRALTRLQTTFNEACNYISGVAWEAREFNSVRLHRIVYYDVRARYGLLAQHVVRAIGVVADSYKLDRKVRREFRKDAAVVLDTPRLYRLDHNRASISTLDGRLRVALNIGGIQRARLADALKLAEADLMCDRKGRWRLLVSAHYADPPAGDTTGVLGVDMGRTDIAVSSDGDSFSGAQVAAVRDRYTRNRQSRQASVSKGTRSTCRRVRQALQRLSGRERRFQRQVNHTISYRLVEAAADTERAIALEDLTGIRERTNTQPRSKTERRRSNSWAFHQLRAYIAYNLSFAQIGSQFESAATTTCSIRSGYATIYRKCRWLS

SEQ ID NO: 35565 - protein, 388 aa, Leptolyngbyaceae sp.
VEQVLTLVCKLQPTPEQVVKIDALLQAFADGCNYANQTVKPSINSKTTIQAQTYQDLRSQFKLSANQAVRVCARVGANRKTAKLKGKPVKSFAPTSADYDLRIFSFREKDWAVSLTLLECREHIKMDVGNYQRGKLKGKVPTSAQLCKHRDGRYYIHIQLKAEPPNPIQSDKVIGVDFGRREIAKTSTGKGWDGKQLNQVRDRFSRVRASLQAKASKGTRSTRRRARQILQRLSGRERRFQQWLNHSISAAIIQEAKELNAIIAIEDLSGIRDKTNQQPRNKTERRRSNSWAFYQLRQFLTYKGIKEGVEVVTVPPAYTSQTCHACNHIGLRSDKRFKCGNCGWHGDADLNGSFNIANLGAVVSRLRGSDTLSCDVQGYQKPPASAVG

SEQ ID NO: 35566 - protein, 430 aa, Lactobacillus sp.
LICYTAPVLKKGLGQMNIAMSELPFHYGLKMKCYPSFKQKQTIEHNINASRFAYNEMVAIDKELYMLSKCKLSIKEVLDRIAYLKKRKSTKYIFGLHSWLDSYKIGTDVVSMSKRTYQAAWNLFRKVHTHGTPNFHKKTGYGNFQLPNRYSSKVSPNLFNGNIKFLDNSHVKAAPLGTIRVSGSQKRLLQRNQDIRIGTVTVLKDSIGDYYISMQLGSDTPFIDNQPKTGKQLGIDLNIDNFLTDSENNIIGNPRYYRRIKGKLAKAQRKLSRRQLRAKKEHRSLRNSSNYQKQRLLVAKIHKSVMNQRSNFLSILSTALIKNHDLVVAEDLASKNMLKNHALAMSISDVGWRTFLQQLEYKAEMYDRTFIKVNPRNTTQMCSDCGYLMKGEEHLTLSDREWTCPNCNKYHIRDHNAAKNILAKGLKKIV

SEQ ID NO: 35567 - protein, 404 aa, Nocardiopsis sp.
MARSTVKRAFKYRFYPTDAQAAELSRTFGCVRLVYNKALDERTRAWYAEQRRLSYTDTSAALTAWKRTEELAFLNEVSSVPLQQGLRHLQTAFRNFFDKRAKYPRFKSRKKSRASAEYTASAFRYREGQLTLAKMARPLDIVWSRPLPEEAVPSTVTVSRDATGRWFVSLLCEDVIDAYPATGQAVGVDAGITSLVTLSTGEKITNPRHERRDRAKLARAQRELSRKQKGSANRERARRRVARVHARITDRRRDFLHKLTTRLVHENQVVVIEDLTVHTMVKNHSLARSISDAAWRELRTMLEYKCAWYGRELVVVDRFFPSSKLCSRCHTLAGTLPLNVREWTCSVCGVTHDRDVNSANNLEAAGLAVLACGAGVRPQRESSRTGRPAKKQETQRATAGIPSP

SEQ ID NO: 35568 - protein, 415 aa, Nocardiopsis sp.
VKRERGHKVRLYPAKDQLPGLEGQGHAARALWNLLHAWWSMASENRRVSLTAADVAIRVARKDLPWLAALPAQAAQQVLKQYHRAWLNCWAGRAGPPAFKARWRTRMSIDIPQGRDLAIQRITRTWGTVKVPKVGVVRFRWTRDLPVGKHADAANRVTGARLVKEANGWHVVLRLHTEVKEPAPHAGPGVGVDRGIAQPLALSDGTFREHGPWLKPGEEKRLRRLERKAARQRGAHHRGTPTSNRLRRTYDQIAGVRAKAKRRALDWQHKVTHCLAEEFGVVGVEDLNITGMVRSARGSVDIPGKNVKQKSGLNRAIAGQAWGRTVTLLEYKLADRGGHLVRVPAPNTSRRCSRCRVIAEGSRESQDRFVCKAPGCGYIANADTNAARNVEYLTKQEAPQDIVGARTWSPRRRAG

SEQ ID NO: 35569 - protein, 239 aa, unknown
  TnpB Polypeptide
MRKADGWYVSILTEREIEAPVHPKAGREIGLDAGVKKTAALSNGKIYLPVDAFRSSKDKLAKMQRRLKRMVPHSENWKKQQQKIAVLHKEIADTRRDHLQKLANDICKNHAVVYREDLKIKNMTASAKGTLEEPGTNVRQKSGLNAAILDQGWGILFSLLDQKMKELGGEVFAVPPANTSRTCPKCEDVSPLNRLTQARFCCRKCGFEATPTSWPQTTYSGAGSALEPVGNCSPLLQFK

SEQ ID NO: 35570 - protein, 418 aa, unknown
  TnpB Polypeptide
MGSQTLRYRFRVYPDPAQKDALARIFGCVRVVFNDHLALNAHKVFGPRKKYVGLSQAQHMVITQAKKTVEREWLREVSTVALQQSVANAHGAFQKMFRSASGERAGRRVGAPRLKRKDDHNDSFTLTRRAFSLRRTGKRETMLRLPKKVGELRMVQSRNFPAAPSSVTIIKEPDGRYYASFVVKRGTRNLPVIDRIAAIDLGLNDLVTIVYSDGTREKIPAPKHYRRAQLKLAGAQEELARRQKGSANREKSRIKVAQIHRKVREIRAYQHHKLALRLVRENQTVVFETLGITGLARTKLAKSVYDAAWGTLIRLTKEKASRFGRTVVQIGRFEPTTQKCALCGVRGGKLPLNIRDWTCTNCGAHLDRDYNAAVNIMVASGTVETLNARGADNPILLAALAEPVTPDETGNDRDQFAA

SEQ ID NO: 35571 - protein, 472 aa, Acidimicrobiaceae sp.
MLVHQAFRFELDPSNATRSALSSHCGASRYAFNWGLRLVNDQLEATRKLTVLAIRQGAGVEEATTWARKVTGPVPCSLPALRRAWNATKHEVAPWWAENSKEAYSSGLDGLARALENWSKGRRGERAGHTGFPTRKKKEHRRSCRLTTGSIGVVDDRHVKLPRIGRVRTKEQATKLRELLDDGRARICSATISEEAGRWFVSFTCEVERHDVHGRLPDAVVGVDVGVKHLAVLSTGEVVENPKALGSYARRMARLSRELARRELGSKRCRRTKAKLARCHAKVANTRRDAIHELTSDLVSSYGTVVIEDLNVAGMTAAPRSKPDHAGGHGPNGRRRKAGLNRAILDASPGEVRRQLVYKLAWHGGTLVVADRFFASSKLCSSCGAVKAKLRLDERTYCCEHCGLVIDRDLNAALNLAAYGRRALSVAGSGPETRNARGGAHRRLRSDAPVKREDGTVEPDKTVTAPSQGEAA

SEQ ID NO: 35572 - protein, 405 aa, Fervidobacterium sp.
MSECHVRTYKLAVPSELNAICERLNKEAARIYNKTMSLIRKVKNKKGFWLSEGTVQKYILRWYEGIDMHTHSKQAIMQRYFQALRSYFANIKSNPNAKPPYKRRRYVPFVWKSTAIKLLEDGTLRLSMGGKAEPLEIKTNLLPSTIIKQATLVYDSCRYYLHLAIEVEKQEQAGSKVMAVDLGVLRPITTFDGEQVVIYSGGALNSVLRYRNKEYAKFQQMLSKCKEGSKRYKKLNRAKRNMLRKTSNQIKDIMHKITSHFIGMCLKKNVGTIVLGELTNIRENVEGNDNARQKIHQWQFRKLTQMIEHKAELFGISVIKISEAYTSKTCPVCGTQNKPNGRNYRCQSCGFEYHRDGVGAINIYKRYLGDIPVVERLASSVGVRYNPHLRGHEFNTSPWRVAMSY

SEQ ID NO: 35573 - protein, 383 aa, Nocardia sp.
VQLRYQYRLYPTAGQRESLARAFGCARVVFNDALAARKTAFAAELPFVPDSELSKQLTAAKATPERAWLSEVSAVVLQQALADLNSAYRNFFRSVTGNRKGPRMAPPRFRSRKDHRQSIRFTRNARFAVTAGKKLRLPKIGDVKVAWSRELPSEPSSVTVIKDAAGRYYASFVVEVDNQPLPEVDAEVGIDLGLTTFAVLSNGKRIESPKFLRRAERKLAKMQRKLSHKQKGSNNRAKARIKVAKAYAKVADTRRDWAHKHATAIVRETQAIYVEDLCVKGLARTRMAKSIHDAGWATFTRLLEEKAARSSRHFAKVDRFYPSSQICAPCGHRDGPKPLSMRLWTCPACGAVLDRDLNAANNILAAGRAERLNACGGTRSPAP

SEQ ID NO: 35574 - protein, 403 aa, Nocardia sp.
LVQLRYRYRVYPTAGQRESLARAFGCARVVFNDALAMRRAAFTADRSYVSDAELSARLTAAKTTAERKWLGEVSAVVLQQALADLNTAYRNFFQSVTGKRKGSPVAAPRFRSRKDNRQSIRFTRNARFSVTAGGGLRLPKIGDVRVAWSRGLPSEPSSVTVIKDAAGRYFASFVVEVDEQPLPQLEAEVGIDLGLSTFAVLSNGKRIESPRFLRQAERKLARAQRNLSRKQKGSANRAKARFAVARAHAKVADTRRDWAHKHTTAIVRETQAIYVEDLCVKGLARTRLAKSVHDAGWAMFTGMLQEKAARRGRYFAKVDRFHPSSQICAPCGHRDSPKALSVRTWTCPACGAVVDRDLNASENVLAAGRAERLNACGGQVSPGLAPAPADEAGTRRKRPTGRW

SEQ ID NO: 35575 - protein, 832 aa, unknown
  TnpB Polypeptide
MLNDKIREYAKTKKMLKNTPAMYKKEYPFLKEIDSLALANVQLHLEKAYKNFFRDSKIGFPRFKSKHHSKNSYTTNVVNGNILVESKRIRLPKLKWIAMKKHREPAESLRLKSVTVSMESSEKYFASLLYEGYSCENQAAEPDYSTAKILGIDYAMQGMAVFSEKVETEEAGFFRTLGRFSGWYLLGIGLSAVILLPVLIAFSGNARTTLDVNYFSIFLYKKSYYKQIFLQFAGFQKIYKGTNLNYAALGYCAIIALFLKRDKKRFSYKVAVVLGIVSLLSPVFAYILHGFSYPMNRWTFILALIVGMTVTEIYPDLFVLTRIQKTGILAGAVFYIVFALSLGDNMVKGKYELAILAATVLALFVLNECKMFGQEKYKHFILYAVLILTAGTSSYVQYSPKYGETISNYVKSGQAYEMLCGKEMRLIQPDKYKIQNGVYRAESLDNKVTNWSLNAHIPGITNYYSVTDKNVSETMQEFGLKSYQYKFKFRKLDMRQGLMDLYGVRYVICTKETGAKLLSDYQLLRSKDGMQLYENKNVFPFGYTYDGYLSSQTYKTLNPAQKEQALLQSAILEDDSKSADKLKKMTIPENVTCHVVGENYRIHSEKEKEKIIQIKIPKQYIKANSYIYLQGVSTEALDGKSSRHVLGVGMNKSNFQLLYGGKQVHLFNAEKNSSYDIGKRNYLVKMSRDAVKDREDTLTLKFKLKSDYYIDRISILTVDQQTEIKQIQKRKKADHLTNISYDGGNHFSGDIKASQNEILCIPITYHKGWKAYDDGKQVKSEQVNGMFEGIYLNKGDHHITLKYETPGLKIGAVVSLFSLIILFIISKKKKFQ

SEQ ID NO: 35576 - protein, 407 aa, unknown
  TnpB Polypeptide
MDETSYKRTLSNKSMSNQAKTKPKKEAKPRKTYLFRIYPTHKQSNTLEQWLGLCCQLYNAALDERTSAYRMAGVSLSYEHQCAELPGCKHVRPDLHDVPSQVLQDAVKRVDLAFDNFFRRVQQGQNPGYPRFKSRFRYDSLTFKQYQNSFAVIPGTKKHKGTLLLAKLGPVKMVLHRPIKGTPKIAIVKRTPTGKWFVSISVEIAEEEVTSRHLPVCTEEVGIDVGLKTFAYLSTGEEIANPRFFHREAAALARASRKLSKAPKGSKQREKKRKVVARVHERIGNRRKNFIEQEVCKLLKRFGLLAVEALVVRNMVKNPKLAKSIADASWSMFFKHLQAKAEEAGRQVVRVNPAYTSQTCSACGYRQPMPLSVRVYECPQCGLVIHRDHNGSKNILTDALHACGRAG

SEQ ID NO: 35577 - protein, 407 aa, Streptomyces sp.
VQLRYSFRLYPRPGQRTALARAFGCARVVFNDAVRAREDARRQGLPFPKAADLSRTLITRAKQTAERSWLGEVSAVVLQQSLRDAESACRNFFASLKGERKGPKLGAPRMKSRKDARQSIRFTANARWSLTPSGRLNLPKIGEVRVKWSRTLPAVPSSVTVIKDAAGRYFASFVIDTDPAADAARMPQADQSIGIDLGLTHFAVLSDGTKIDSPRFLRRAEKKFKKAQRELSRKQKGSKNRAKARLKVARAHAKVADARREFHHQLSTRLIRENQAVAVEDLVVKGLARTRLAKSVHDAGWSQFVGMLEYKAARYGRTFVKIGRFEPTSQVCSICGHHDGPKPLHVREWTCTACGTVHDRDHNAAKNVKSAAGLAVTACGAPVRPEPVLAQREETGSQGIPHGNRAA

SEQ ID NO: 35578 - protein, 413 aa, Verrucosispora sp.
VVIVQLRYNYRVYPDAAQRTALSRAFGCARAVFNDALRLRLQAREAGVKYISDGDLSKLVITQAKATEERAWLNEVSAVVLQQALADLNTAYRNFFHSIIGKRQGRALSAPRFRSRKDNRQAIRFTKNARFKVCDNGRLGLPKIGDVPVRWSRTLPSEPTSVTVIKDAAGRYFASFVVQTTPDETLPSTDAEIGIDLGLTHFAVMSDGTKVTAPKFLRRTARKLKRLQQDLSRKTRGSNRRTKAATKVARAHARVADTRRDWQHKLSTAIIRDNQAVYVEDLCVVGLGRTRLAKSVHDAGWASFTRMLQYKAARYGRVFARVDRYYPSTRMCSDCRRTNNKMTLNVREWYCPCGSHHDRDINAAINIKAAGQADFNARGAHVRPTLVPAARKEAGTHPDVACSTRSVEGISIP

SEQ ID NO: 35579 - protein, 396 aa, unknown
  TnpB Polypeptide
MASDTEYYRRTAITRLDGLSQQDHECLRATIEEWLDGCNVASDLAWENEHTQAGVRDVAKDTIQRETGLNSQHSILACHGVASSIQSCIQRRKNGKKATQPHFTSKYITYDRRTLTVFPEKEQVSLTVLGDYSRVRADLALPREDDGYQYQYLHDEDWEYTESTLHYRDGEWYLHLGYRKEKPDTETTTQNGTVLGVDLGVNQIAVTSTARFFSAGQLNHARREFEKTRGDLQECGTQSAHRTLQQVSGREDEYVKHVLHSVANGIVHEAVEHDCDGIIFEKLDGIRDRLPYADWHSMWAFRKLKQFVEYKAEEQGVFVDTVNPKNTSKWCNECGCVRDDNRHQDEFECQRCGKQNHADYNAAKNIAELYLLRGHQPSRGRSISQYALKSGPRTPS

SEQ ID NO: 35580 - protein, 373 aa, unknown
  TnpB Polypeptide
MVANRAYKFRIYPNDEQKILFAKTFGCVRMVYNHWLDRKIRQYEENKTNVTYTICAKEMAAMKKTEEYGFLKEVDSIALQQALRHLDTAFQNFFKQPKTGFPRFKSKKRNKNSYSTVCINGNITLFNGYLKLPKIGQVRLKQHRFVPSEYRLKSVTVSQTPSGKYYASILFEYEDQVQEKELQKFLGLDFSMHELYRDSNGKEPAYPRYYRNAEKKLAREQRKLSKMQKSSNNRNKQRLKVAKLHEKVSNQRKDFLHKQSRQIANAYDCVCIEDLDMKAMSRSLNFGKSVSDNGWGMFTTFLRYKLEEQGKKLVKVDRFFASSQTCSVCGYKNAKTKNLALREWDCPQCGTHHDRDVNAAVNIRNEGMRLVNA

SEQ ID NO: 35581 - protein, 353 aa, unknown
  TnpB Polypeptide
VILTYRYRVKDKTSAKHLRRMSGAVNYAWNYCCATQREAQRRQARWPSQFDLVKLMTGAGVELGIHSDTLGAVARQFIDSRNAAKRCPAWRSRKKGSLGWLPFNAARAFRIDHDSGAAIVLGRKYRLWFSRPIPDDANVRTACFAEDARGRWYFNVQIEVVEVPIKEGLTVAIDLGLKDLATLSDGRKIEMPAFYRRHEAALGLAQQRGQKRRVTAVHAKTKNCRKHFLHCESTRLVQEHGRVIVGDVSPAKIAKTRMAKSVLDAGWSMFREQLRYKALRHGAAFEIVTERLSTQTCSECGSIGGPKGITGLRMRHWTCSDCGALHDRDVNAARNLLFAGAERRPPAVEIPSL

SEQ ID NO: 35582 - protein, 543 aa, unknown
  TnpB Polypeptide
MSERPVFTYQTRPVLDDEQAAVLDAYAELYGRTERSLFAALQAGGKLNDLKRDFLPRFGITARQFNAVRIGLDGKMDSIKQRRPDLMIEAQAKIKKAAKVIAKLASKKSARADKLHQKKRRLGMLQARLSAMQADQAAGKVRLCFGSKKLFHAQFDLQANGYASHEDWKQDWLAERSSQFFVLGSKDESAGCQGCQAVVALDGSLSLTLRLPDALVSQDKYLSLTGIRFAYGHAEIVAALNSSQRITATTKAGIATVKRTGTALSYRFVRDAKGWRVFVSCQAQAVNIETNWSMGAVGMDVNADHLAVSEIDRFGNLVGTRRIDLHTYGKSSEQAKALIGDAAVSIARQARQAGKPVVIEKLNFQKKKAELEAVNRKQARMLSSFSCNKVASTILAAAFRAGVEVIEVNPAYTSVIGAVNHAQRQGISVHQGAALVIARRGLGLSERSAVAGGLVPTANGDHVTFELPARNRSKHVWTFWSKVRTNLKAAHVAHYRCGDHQRPPPPLAPPTRPLGAIWSSTVRSRGANRQQNCSADVLDDVPW

SEQ ID NO: 35583 - protein, 456 aa, Verrucosispora sp.
VKTIQAYRFALDLTPTQERAVLAHAGAARVAHNWALARVKAVMDQRAAERTYGIPDELLTPSLPWSLPALRKAWNQAKAKVAPWWGEVSKEAFNTGLDALARGLKNWADSRTGRRAGRPVGFPRFKSRRRTTPSVRFTTGVIRVESDRKHVVLPRLGRLKLHESSRKLARRLDDGTARIMSATLRRDGGRWHVALCVQVDRVERRVARPASVVGVDIGVKYLAVLSTGELVANPRHLTAAQARLRHLGRALSRKTGPDRRTGQRPSRRWRRASARLGRAHARVANLRRDGLHKLTTRLAGEHGTVVVEDLNVTGMLANRTLARHIADAGFGEIRRQLAYKTEWNGGRLLVADRWYPSSKTCSGCGVVKTKLALSEREYTCQACGLVIDRDRNAALNLAALAAKSAGSGPVPARGADQKTRTRGQVAMKREPGTTPVGQTGTVPPQGGDYQSCAKAH

SEQ ID NO: 35584 - protein, 420 aa, unknown
  TnpB Polypeptide
LVRTIHKAYRYRVYPTVTQVVRLDAWENALRYLWNLAHEQRLLGLARPRGERRYYTAFDQCKELTGLRAELPWLADVPRNVCAQLLVELDKAWQRCFKRLAMQPRWKRKGRDPVTLCEPHPKVWALKDGGIRFPKLGLLKTVVHRPLEGTPKTCSIVRDGDQWFASIVCELVVADPVRPSGDPVALDRGVVNLVADSTGALVPQPAYLKQSLKRLARAQRVVARRKKGSANQKKARGRVARIHRTVRRQRDWNLHQIANRYAKNHGTVIVEKLQLRNMTRSAKGTRTNSGRNVRAKAGLNRSILDAGWGRLVEMLRYKCDWAGGTLVEVPAAYSSQTCARCGHVASNSRQTQARFACVSCGHAAHADTNAALVLLSRGIHGGAVCGGFAEVRRPMKQKLRVARRGTRQAVRLEASSFTVR

SEQ ID NO: 35585 - protein, 390 aa, Moorea sp.
MIILEFKAYGKRNQYLAIDEALRTVKFIRNSCIRYWMDNKGVNKFDLNKYSKILAKQFPFANQLNSTARQSSAERAWSSIARFYENCQKKVPGKKGFPKFQKHCRSVEYKQSGWKLSPDKKWIVFSDKKGIGKLKLKGTWDLWRFDKKQIKRVRIVRRADGYYVQFCIQADNNEQLKPADATIGLDVGLKDFYTDSKGNTEPNPRFYRTGEKRLKFYQRRVSRKKKGSANRRKAINRLGRTHLKISRRREEHAKRLARCVIRSNDLVAYEDLRIKNLVKNHCLAKSINDAGWYQFRKWLEHFGDKFGRVTVAVNPAYTSQNCSNCGEVVKKSLSTRTHICKCGCQLDRDHNAAINILERALSTVGHTGTRIIDPNACGEETSTVLGSGLE

SEQ ID NO: 35586 - protein, 424 aa, unknown
  TnpB Polypeptide
MIIAHQYRLLPTANQKTTMNAWLDKLRLQYNWLLAERFNWWEQNRCPVNACPLICHLPELKEQPDYYSQKRSLVPLKQKRPWYGEVYSQVLQDVVKRVKLSFDRYIKGDSTGHRSGKPRFKGRNRYRSFTYPQASDSWLKNSKITLPKIGEVKIVLHRPIPEGFELKTAIVSKKADGWYITLSLEDKRVPDISVDIIPSVENSMGIDVGLEKFLADSEGEFEGIPQFFRKSEEKLARLQKKASAAKKGSRARKLLFRKVSKLHQKIARQRKQFHFETSKKVLEKADVIFVEDLNVKNLCKRAKPKQDKEGGNFLPNGQSAKSGLNKSIADAGWGQLIEILSFKAEKAGQKMIKVSPHGTSQHCSGCLNRVPKTLSDRWHSCPECKLEIDRDTNSAILIKKVGLGIASLKKAQPNSRKRSPHCTA

SEQ ID NO: 35587 - protein, 510 aa, Crocosphaera sp.
VILGYCYKLRPNISQSDKIDRWINMLRANYNWSLADRIDTYYQRYICGDYCDLRTKVVITPLTCSIGGATGNPWSNKGQKKSPVNIQITELPLFKKARPWYDEIDSTVLQQNLRRLDKAYNNFFQQNKGFPKFKNRSTFHSFTYATGVKIKGNKIYLPKLGWVKFYNSRPIPDGFKIKSVTVRKKSNGYYVSVRIEDKSVPTFPVKQLEEITTITGLDMGLGKLVYCSDCSAIDNPKFTTNKITKRLQKIRQKRVSRKKKRSNNRRKAQQKLSGFQYRIAIQREAYQWQTAKKIVQKSDAIAIEDLQISNMIKRCKPKGALSNGEETSPWVAPKYDENTGRFLKNGQSAKRALNRLIADASWYSLTQKIEYMAAKSGKIVLRVNPRHTSQECSVCHHIDPNNREGEKFLCTNCGHADDANFQASINIKNKAINQYGLNIVKKSKKKVRRDLPEPKQLSLFQTPTSELTETKGRKHYARKSKRDVPGNLSEYAFQLGLFNQENNHPDRDSS

SEQ ID NO: 35588 - protein, 463 aa, Lactobacillus sp.
MKGADKMTLSSKEQKALKFFWQKRLKLSTPNIDARTGIDKNQIDYLTEQHIVRESHPHYPRLLVAAHEANNVYNQGLYRVRQALFKHQWLSCQDLWKSFKASADQRDSMIKNKIGNANVTQQILKVVAHNMTAWNQARKAYQRNSHRFTGYPRLPKYRTKGGLFTLYISNQTAKLRANGVVEIPFLDHFKIKLQHTETSKLQIVRIVPKHHHFLVEVVYQTSHKISYKPDNHRYLGIDPGVNNAFSLISNVKDFQPLIINGRPLKSVNHFYNKRRSQLYSIQAQLHQPHQSRQLSRLEFYRYLKITRFAHEASKRIVDIALSHALNTIVIGKNKQWKTNLNLDKKTNQNFVGIPHQSMINMIKYKANLAGIVVIEQNESYTSQTSFLDHERPVNANGNQARKRKGLSPHNRRLKRGLFKSNHDILINADINGAYQILRKAVPNAYVEGIQGSGLTPVKVNLNF

SEQ ID NO: 35589 - protein, 534 aa, Lactobacillus sp.
LVFKKFQNINEIKRLINRQNSIQKRAVSLLQKGELNKNDLMATLNKNIGQRRRLSQETINVMVDIFKNEKITSIPTNSFFLFARTTVNPHDGTPSELLLQLNKQDTYIITLAAGETAEKLFSSPRRAWLFDLTDQHITLHLPEQVATHGLHILLPETTDKPAAKQAAPAKKAATQAPKSAAKATAKSAQAPQKTAAQPKPAQKTAAKSATAKATPKVAAQSATTKPTKKATPTTPKQRAHSTAQAPKSSAAAQHAPRVPQKPAPKVAQPTKVATSVAAVTPATSKAAVATVTKAHKVPAQTATEPLPGPQAPEVLIKRLLEAGEAYRVVGLDYGKINMISATDGTEKLLQIPGSVISNHILEYQHAIRQLTRGTIDLDADVELARLTYMLKRYVLKSCRKIVSRLAEFYGDNVIYVTEMHPSLNLDQPQTIILSPDYFYKALFTVLFEMIGSNAAIIQVPNNETSIICPWCGFTNADNRQKEVHQFKCLNCGHTINDDHVAAINIRQRGLRQISEITKHLAVTVPTPAESHPDD

SEQ ID NO: 35590 - protein, 274 aa, Lactobacillus sp.
MKRDDIKLSTVSLKMDACGRYYISFQLASNNPFKTKLPKTNHSVGIDLNLENFLTDSDNNIVDNPHFFQKSEAKLAKAQRVLSRRKRRAKKENRQLKDAKNYQKQRQKVAFLHRRVRQQRQNLLHQTSKAIIENQDLVITEELRSQNLLKNHALANRISDVGWRTFLAQLEYKAELYGKEFRTVNPRFTTQICHDCGFRMGTHGTHKLTLDMRQWTCPHCHSFHIRDHNAALNIKAKGLANGPTVKQSKPKTKKKPNIELTASGCKIIRGMATV

SEQ ID NO: 35591 - protein, 395 aa, Kribbella sp.
VSRYRMYPAPTQTAGLLAHCRHARYVWNLAVEQSAMWTRDKGSTPGFHEQSRQLTEARAAFDWLRAGSQTVQQQALRDFDQARRNYFAGSHGRPTWRRAGRHEGFRVVGPQAGRVEQLSRKWGRVLIPKVGWVRFKLSRALPAARSYRVARDSVGRWHIALAVVPDPIPAPGNGSVVGVDRGVTVSAALSTGELLNCPRLSESEQRQLTHLQRRLARAQPGSNRRQRVKAAIAKLHARAAARRKDWVEKTTTDLARRFDVIRVEDLRIAHMTRRPKPKPDPARPGGYLPNRRRAKAGLNRGIRSNGWGLLVQRLEHKAAGRVERVSPAYTSQTCSRCGHCAPANRENQAFRCRACGHSDHADVNAAINIAAGRAVSARRDKPVRVSLKREPQLTT

SEQ ID NO: 35592 - protein, 408 aa, unknown
  TnpB Polypeptide
MNKTYILPIEQQDLAHRLSRLSGRIYSKTVSTIFKLKQSKDIWLSKNDMEKLIKLYASGFAMHSQSKQGTVQQYYTNLKSFFKSMDKGDNPKPPYRTRKFNKVIYKKSAIRLKDGVLKLSNGRGTTALKIKTSSLKQRPKYAEIIYHHKEQIYKLHIVVEIENKQIDYDNDKTLAIDLGQIHPMVTFDGEQSLIYNGGKLNSFIRFRNKELAKLQTKMSRCQKYSNRWKKLNRGKKKLMLKSKNKINDLLQKYSSHLISYCIKNKVSTIVIGDIKGIRKNISFGAKTNQKLHQWIYKQIADMIEYKAKSVSIEVSYQEESYTSQTCPKCNKRHKPTNRNYICQCGFEYHRDSIGAINIRRKYISGTLDKSTKLEGELTSPFGIRYKSNSISCLTEWNSRPFSSRGVSA

SEQ ID NO: 35593 - protein, 302 aa, unknown
  TnpB Polypeptide
MACLIYKSFRKLKRRGRAKADKPCFRGNVIMLDDHLFSINLSSWEASIATENGRVELKLCHGTYHEKFKEMKVGQAWLVKRGEDYYLKVVFSKTVELLEQNDKAIAVDVNENNITFGSEENVIKLKTKERTIRTAYFLKRRRLQSKPRLNEKPILMKYRGRERRRVEAIYHKAANEIVNEVRHRRASTIILENLKNIRRKKRSKELNGRLNRWSFRKLQTIVDYKAKLAGINVVYVKAKGTSSLCPTCGVKLSPNGHRMMRCRKCGMEQDRDIIAVRNLLRKYLAQIDVPSSSVQGESPPMI

SEQ ID NO: 35594 - protein, 407 aa, unknown
  TnpB Polypeptide
VVGKVFKPNERKVLALNRALNEYFRLVRWYIGFNSKSKSFLHENGYEKAKELFNLNTALIQTARDKAIEILKGFEETKKEYSVLRLKRISLRFDKRCYGFSKTTNVLTPYWLSLSLNRRERVGLPIVFGERQKQRIEEALRGEWQFTTVEMVKRNGEWYAHFTLKKTVELADEPETIIAIDRGEHNLAVAISNSNPNKPMKGQFWRGGEIRRIRGLYGHIRRRLQEKKLLKKVKELKGKEKRRVNQQLHIIANQILDYAKQFPKPIIVMEDLSGVRSNFKRSKKLNRRFHSLPFRKLQTIIEYKALLEGIEVKYLTKKDTRNTSKTCHRCGHVARVEGRAFKCPKCGMEYDRDLNACINIARRVTSSMEWGRREPPEPADEAGGVKPQLNAGSLALQGGVAHQHRLD

SEQ ID NO: 35595 - protein, 396 aa, unknown
  TnpB Polypeptide
MKLVEKHIIKDNRFEDVCLKSGLLYNYVLYNVRQGIFSGDYLKEYDFSTILCGENQFDFRNLPSVISQQVIHQVFSDVNSWIKSKKDFEKNPGKYNNRRPKLPKYKKGKKQNIIVFTTSACRLKKNGYIYFVKNIIKPIKTNIGDNELCQVRITPQATCYVVEVIYEREEQNLNLNKDNVLSIDLGLNNLCSCINNVGIKPFIVNGRVIKSFNQWYNKKKAKLMSFIGNKGTSNKLKQLNNKRNFWIEDKIHKVSRYIIDFCKNSNIGTIIIGLNKGWKRNINLGKKTNQKFVEIPFSKLIDKISYKGKLIGINVITVEESYTSKIDHLAFEPLKKQDNYLGKRKKRGLFQSSIGKLLNADINGAIGIGRKVFGDSYVKEIINSGFAFNPIKVNIL

SEQ ID NO: 35596 - protein, 381 aa, unknown
  TnpB Polypeptide
MIKSFKYRIHPNKSQEVLLSKTFGCIRIIWNANVESFNSYDKDNNPKPKLISKSDLINDKPWLNEVSAAAIQQKIRDFKETTSQFFSKTRKKKINKPVFKKKSGNQSYRLPNQKFLINGNKIRLEKIGWVKMSVDRIIPDNCKIVSCTISKNCCNQYFVSISVDAIIYHKPKTGKSVGVDLGLKSFATLSDNVVIDNIKFFREKQSEIVKIQKYLSRKRKGSNRYRKNKLRIARLHNKIANKRNDFLHNTTTYLVNNYDVICIEDLNVSGMLSNHKLAKAISDTSFHQFRSILEYKCNWYGKELVIIDRFYPSSKTCSKCGWKKEDLTLSDRVFKCENCGVEIDRDLNAAINIERIGVDILCNRMQRDEVTNPVEASKIEW

SEQ ID NO: 35597 - protein, 371 aa, unknown
  TnpB Polypeptide
MITYKYNIYKSKNTKYIDYILRECCFVWNHALALQRRYYKLFGKYIHCNRMQKHFAKRIKRNVLHSQTCQEIIERLDSSYYRFFKKLAKRPPKFKKHNQFSSFVFKQGGYSLNGNILTINNIRKRFKFSYSRPYEGKVKLLKVKRETCNRYSVSITTDKEINTIGKTHDGASVGIDFGLKTYLTLSNGNEYKSPLFFNKYNKEIRNLNRRLSKAVKDSNNRRRRLFELQLLFRKISNLRDDYQWKLCHELCGTYDYIFIETLNIDGMRRLWGKKISDLSHYSFIEKLKYVSRKYNVTIHQIDKWYPSSKTCECGHVNKTLSLKDRTWTCPMCGLINNRDLLAAQNILRKGISELESQSNSSKKLGVSDVCI

SEQ ID NO: 35598 - protein, 415 aa, Moraxella sp.
MYKTATIFIKNTNPLFDVIDDYAFLCKNLKNSALYAYRQAFFSNKTINKFSLINTFTHDKQADYIAIPRKVAQQIIFQVAQEFQSFWGLIKLWVKDKTKPRPNIPRYLDKQKGRANIIFTKQAISKKDLAKGELTLSPFDKSRPISIKLGKLNQLISYDNIQEVKVVKVANGYDVKICYKTQDIESPTSINPTRVLSIDFGVNNLMTVGNNIKAQNIIIKGKALKSFNQYFNKKLAKLKSHLDTTKDFLKPSVQKKLDRLYQKRKHKVNDFLHKASHYLVNHAVENHIDTLVIGYNQGLKQEIEIGRVNNQKFVNIPFATLLDMITYKAKEKGMQVIITNESHTSKCSFLDDEPIQKQPTYKGKRIKRGLFKSSQGKLINADVNGALNILRKVIGNFDYDPIQVCSTPKMVNVLK

SEQ ID NO: 35599 - protein, 361 aa, unknown
  TnpB Polypeptide
MKLIVNLKLQPTKEQSNALRKTIERANKACNAISEQAWESETFKQFNLHKLVYHTTRDTFDLSAQIVVRLIAKVADAYKNDKKVKRVFRKHGSIAYDDRILTFKKDERVSIWTMEGRQTIPFQCGDYQRKLLPFRKGETDLIYRKGNFYLNAVCDIDEPLLDDAQDVLGIDFGIVNLVTDSDGEAFTGAKIDETRRKHAHRRRNLQRKGTRSSNRKLKQLSGKQARFQRDTNHVISKCLVLKAKGTQRGIAVEDLKGIRGRVTVRKSQRARLHNWAFAQLRTFLEYKSRLNGVALYAVDPHNSSRECSRCGYTDKANRKSQDKFLCQSCGHTANADFNAALNLRARGVSIVQTSTSVDKAA

SEQ ID NO: 35600 - protein, 409 aa, Moorea sp.
VGIIYTHWGELGSLTAEQLTPAVEKLMHQTAKRPSVKYPQFKNSFYKFPSYYRRAAISFAAGQVSSFVTRYQNWQRGNRKKKISKPPRLNAKAGCYPTLYKGQCYKLHGFDQVEIKVFERKKWVWTRVQITGLRQRHQVAANKMMSPSLILGDKGCHLSVPFCCKPDKRNPERNVTAVDLGINTTATVAVVRNDGTVIHRDFIHLGRDIDRRDKRLRTVSKKASKTMGRGGKLHKGFCSNIYQKCRRINNQISHVVSKRIVEIAENYNSEAIVFENLKGWKPKGGRKRSNLRQRFHGWLKAKIRDFTEMKWVELGGKVIDVIAAYTSKLAFDGSGTVKRHSKNYSLATFPSGKQFNADLNGAYNIGARGVFKLTRRNDEEGRSSKNSGRPPRSWASLCDLWTSGSSKLA

SEQ ID NO: 35601 - protein, 454 aa, unknown
  TnpB Polypeptide
MKKSENFWFPDLKQEKKSIESNSWFDILKCENPVKNVNDEYIDICKGTVVRSRKIFIYPNDEQKKTLQKWFNDYIDIYNKTNEFIKSKIFKDDEIVDENLKFVNFRDIRDKQMKEYKEELVKNTKINKHLLDEAIKNNVAMYKSCISNKKNKNIKTFRVRPLSKEKRRKNLHIETNLISKIEKNNSFCSSILGDMKTEDDFKLKNIKHTFILQYDKYYNKYYILVPFDIKKVDNISDIKNKVPTTNKERRRYLKLSKNNKGNRIKTKSKCAIDPGIRTAYTLYSKNETLEIGNKIKSTLKPFFNKIDNTNSTKDTNKISEKKYNKCITRIYTKMHNKIKDMHWKTSNYLCKHFSTICIGKISTSNIVNNEKSNIKEITKRELYALSHYKFRQILEHQCEKFNCEYKEINEYETSKRCHKCNKINNVGSSKIYTCDVCKISLDRDVNASINIYKK

SEQ ID NO: 35602 - protein, 263 aa, unknown
  TnpB Polypeptide
VFPSYGDGGKLRDGRAYFQHIGAVKVKLHRPTEGRIKTMAFKREADGWYVVCSCDLGDVAVAPSANPAVGIDLGLQAFLTTSEGESVPPPKFYRAAHRKLRRAQRHLSRGQKGSKRRQKARERVARLHQHIGNQRRDWHHKTALSLISRYGTVAHETLNIAGLARTRLAKSALDAGWRQFLGILTHKAEGAGVSVIAVDARNTTQACSDCGCLTAVPLTRRDRVYHCASCGCTADRDLNAALNIRNRLGWRRQALTGTVVPVV

SEQ ID NO: 35603 - protein, 412 aa, Synechococcales sp.
MIVYEFKCKGKDRQYKSIDEAIQTFQFIQNKSLRYWMDNKGVGRYDLNKYVAVLAKEFSFANELNSMARQSASERAWSAISRFYDNCKKQIKGKKGFPKFKKNCRSVEYKTSSWKLSKNRKAITFTDKKGIGPLKLKGTYDLNFYDINQIKRVRLVKRADGYYCQFCIDVKIRIESEPTEKMIGLDVGINYFLADSNGITIENPKFYRKAEKQLSRANRKKTKKFKKSVKPQSKNYLKAKNRYARKHLRVSRQRKEYSKRVAYSVIQSNDLVAYEDLNVKGMLRNRHLAKSISDVGWTIFRQWLEYFGYKYGKITIAVSPQNTSQNCSNCGEKVKKSLSARTHICHHCGYIENRDINAAKNILKKALSTVGHTGTYAWGDLPSWAVGANLLFKGESVNQESHPFNEISETKV

SEQ ID NO: 35604 - protein, 248 aa, Ktedonobacteraceae sp.
LYSKEPVQAQVDPSFCVAIDLGVTNVAAITSNRVGFVPRLVNGRKLKSINQWYNKRMKELKWCLPKEDRERVTKQMERITNHRNRQVNHYLHAASKAIIDFLVKQGVGTIIVGKNSFWKQEAGMGRRNNQNFVQIPHARFIDMLTYKAELVGIKVEVQEESYTSKASFLDLDPIPTYKPNDETEYTFSGKRFGRRNRLYRTKYGKVICADVNGSYNILRKSKPDVFAYADTKGLAAYVVQPLRLAITV

SEQ ID NO: 35605 - protein, 394 aa, unknown
  TnpB Polypeptide
MGEMVSHMIEIKMCKTMQRYLDQCFGYNRYCWNKMLAENNRRQEAKEKYKFNDLSKYLNATKEDWEFDMPSEIRVRSYRTLYNAFKRMWKGIANYPKFKKKNKTPQSFKYSTENGKRITWNNTYTKFKINCGRGFKFPQRYRWFKLTEPIGFNGTIKEICFFKKADRYFANFQIQLNQPRGQTTAKDIVGIDLGLKTYATLSDETSYHAPKKRLKQLEKRIIFYQKVMDRKFKKGQRKQSNKYLKTKAKFNKLWWKITCLRKDFLHQTTTDICKRYKTIVVETLRPLNLMKNKKLAKQIQDACWGMFVEMLRYKSASHGNIFIQADSYFPSTQLCSCCGYRLEGSNKLRLQDRVYKCPVCNYEEDRDTNAAKNLQLYGSRMLAGLQPSWRTWES

SEQ ID NO: 35606 - protein, 483 aa, unknown
  TnpB Polypeptide
LPSALRVGRAWVAVPSLLPPRHRLQAWLKAGRSRPPREVQQQTLGRRSRLYPSASADEAMTRWGHTRRAIRNLALEQRICAWRYGRTTVSAYDQARDLTELRKEHDWVRDLPAQAAQAALADVERAYRNFWDPAHPARFPRFERRNGELRFSLPGQARGVRTINRHWGAVKLPKFGWQRCRMSRPLGGSVRNATFRKKAGVWYVSFGVHVEKTPAPWNGRPGCGVDFGVACSAFVSDEDTPRLMPPSLTPGEARRLLGLQRRKARQLAYAKRHNHGRYSNRLRRTISERAKLEARQARRRLDFTHTLTTDLTKNHGFVGREDLDVKNMTASARGTKEAPGTNVAQKAGLDRAILDNTPGERARQLAYTSRWYGSLDVPVPAPGTSQTCPQCHKRDPLSRKGCGRSFACVRCGYQGHADWSASVEIERRALAQIVVRALIHAGGHPVNSAGRGASKASPSRGRKAPGASANHPQGHASDQPEAA

SEQ ID NO: 35607 - protein, 429 aa, Desulfuromonadales sp.
MILTKEFALKTTDRVARDLKAARLTCAQVWNDCLALAKEHRLQHEGQWISKKDLEQATKGGKYQLHSQSIQAIITDYTEARQMAQTKRKQGDTNARYPWRQKKYRTIEFKQMAIRQTTQNTIRLTLWKGQHFDTGLPWQEGIGVARLTWDRNRYVLQYTVEVSTPELPTEAPLPETTGGIDIGEIHPAALTTASGDITLITGRAIRSIKQFRNKRLAGLYRRRSRCRKGSRRHRKYGRLIARACQKAENSCRDAFHKATRLAVTAAEAQGLTTVVIGDPKGVADKTKQQRRLSRKSRQKIAQMETGTIKQYLQYKFALAGIRTILTEERGTTSGCPVCGTSNHCSGREYRCSCGFVAHRDGKAGFMILRKVLPEVSTPESFRLTALRALPKYRVGTTPPVDGTDCTRRSNPVRSFATDHPAGSVILRAA

SEQ ID NO: 35608 - protein, 408 aa, Pseudoalteromonas sp.
MKKTLRYNYRLNPTPEQEAKLVEFGATARGIWNLLLSENIRRYEHDKTFLFYKDMASLLKDIKTFEEFNWIKAFDSAAAQQVARDLELALKNVFTKGRLQRFPKHKISYKKKKRHNDSFRAVNNSHCIRIENGAISIPKVGKIPIILHRKLASKIKTVTIQYHHGKWGCSITQEVECKTAKQVLKTITGFDINSKQTVVGSDGFVVDNPTFLKQSKTKLNQLQRQLARRTKGSNRWQKTKQRINKLHGKISRQRLDFAHKISRQITNENDILVFEDLNVKGMQKFNGSMVADNVMGLITQLSKYKTELEGKLYHEIGRFEKSTGVCSECGQHHVLTLNDRYFTCTACETYQNRDLSAAKSIAKTGELDLIAAGIVARVTPTSQQKSAIKTKVFELSKFAVGTEKKEAA

SEQ ID NO: 35609 - protein, 551 aa, unknown
  TnpB Polypeptide
VGDREGHRRRRGGHRGRLRPEREPPEAQAPARRPDRGDHRGGAPRPAGPLRRRVPAGGPCRAWQMHPGRRGGRDHRRPGARPVRCAHQLLRPPVRAAGGTRPGAAGADRRQAGTGGVTVHQAYRFALDPTPGQRRALASHAGAARFAFNWGLALVKDGLDRRAAGQHVEVPWTLAALRRAWNQAKHQAAPWWAENSKEAYSSGLDALARALANFSDSRQGRRHGRRVGFPRSKKKGRARDACRFTTGAIRVEPDRKHVTLPRLGTVKTHESTRKLARRIEQGTARILSATISRQADRWFVAFTCEVQRAVPTGPSGRQQQGGTVGVDVGVTQLAVLSTGEQVPNATPLAAGLRRVRAAGRAYARTVAGSRGRAKQAARLARLHARVANQRRDAMAKLTTRLARGHATVVVEDLNVVGMLGNRRLARAIADSGWGELRRQLAYKTAWYGSDLVVADRWYPSSKTCSACGLVRAKLALAERTFTCEGCGLVLDRDANAARNLASLVARSGRETRNARGGDVRPGLAGRTPAKREPCAAVAGKTGTVGLQGPAA

SEQ ID NO: 35610 - protein, 225 aa, Enterococcus sp.
  misc_feature (175)..(208): Xaa can be any naturally occurring amino acid
VERLKAYKFRIYPTEEQEIFFAKTFGCVRKVYNLMLNDRKKAYEEVKNDPSKKMIFPTPAKYKKEFPFLKEVDSLALANAQLNLDKAYKNFFRDKSVGFPRFKSKKNPVQSYTTNNQNGTVALIDSKFIKVPKLKSLVRIKLHRQPKGMIKSATISRHSSGKYYISLLCKEEISXXXXXXXXXXXXXXXXXXXXXXXXXXXXXXXXXXLSTFQKKEKSCSELYNE

SEQ ID NO: 35611 - protein, 365 aa, Thiothrix sp.
MTEKANLKTLKVRIKDKHKLILERMAFEVNQVWNAANEITANYSDIPIPEVGWLKTYFSAFDLQKDLKRLKAERGFIFHSTTVQEVIAAHHKARRQFKTDKLRWRVSGGARRSLGWIPFKVGAAKWKSGQVYFAGHYFKVWDSYGLAQFEFRSGSFSQDARGRWYFNIVVEVAQTTSSAIGQVGVDLGLKTTATCSNGLKLESEQFYRELEPKLGLAQRANKKQRVKAIHAKIKNRRLNHLHQFTTQIVKNNALIVVGDVSSKALAKTKMAKSVLDAGWYTLKTPLDYKSKAMQAVFIEVNESYTTQTCSCCGCISSNSPKGRAGLGIREWTCPECGAMHDRDINAARNILAAGHCRLAGGILAL

SEQ ID NO: 35612 - protein, 513 aa, unknown
  TnpB Polypeptide
MQYTVRASIETICNNARLDGICRTFSSMVRAAYNRLLEGKRTNEIVRLLQMQYGIENWRWCQWAIAQAQAIIKSQKELLPLYVEMYEEKIVRVKRRMARVADPLKKAGFRARIEKLEKHRGEVEKHIAAGTAPRAVFGSRKLFEELAKGKGSREGWRFRRSSQFFSVGQANQKGNANTRIVRRGDGYTLEVRNWPGGDFEVGLRVPEYYQRLLATAVVSGVAYSVRVKRIEQNYQALISFEVDEAPSQPSDGRRVAAVDTNPEGLAVTVLTPDGNLFASRWFQESALVHARTEKRSWLAANLVKRAFKWIKGYGCNAVVIEKLRFGMTQEGNHRANRICSNFLRKKLVELIKLRALKLDWICVEISSSYSSLGSELKYGKQFSRFNRHQLAAFVLGRRALGFGEKLSTEQLEQIPKGKRASARRIISSFHGHRHELLMPRSGTDGRMSGGDVKGASAFDERLTAHTAVTSLPRLSLVLGGGCRGDEPRARGHGVNPPPAIGVKLGNVNKVNVI

SEQ ID NO: 35613 - protein, 258 aa, unknown
  TnpB Polypeptide
LGALQKKQGHRRDAKASSGSLSAGEWYVSILTEREVVEHIHPSQSSIGIDMGVAHFAMLSDGSTIEPLNSFRKYEKKLAKLQRKQARCKKFSANWQKVKSRIQRLHLHIANARKDFLHKASTMISKNHAVVVLEDLKVRNMSSSKTGGKCKSRLNKSILDQGWFEFRRQLTYKLAWLGGSLIAIPPQYTSQTCSRCGCVDKQNRQTQAKFKCIACGFEINADHNAALNILAAGLAVTACGAGKAQAPAMNQEPAYSLA

SEQ ID NO: 35614 - protein, 423 aa, Salisaeta sp.
MRYNTAYKFRFYPTAEQKAALAEVFGHTRYVWNWALDLRTQSYYDEGKSLTYTATSKRLTAHKKEKEWLRNVSSVALQQKLRDLEQAFQNFFDGRAGYPNFKRKHGKQTARFASNAFTLDGKRLSVSKVPGTLNVRWSRDLSDSCNVTSVTLTKDPAGRYFVSLTCTEEKKPLPETDRTVGIDLGITDVVVTSDGFKSGNPKYLEDDLYRLRKAQRRLSRKEKGSQNWKKQKRKVARLHAKIADKRNDFLHKLSRKLVDENQVIALESLNVKGMQRREASAVSVQNRSLSRSIADTGWSTLVRYIEYKAEWAGRTVVKIDRWFPSTKRCSACGHVGGTKPLSVRHWQCEECGACHDRDVNAAKNICTVGLAGAQKFLREDCEGRGKPHKAFVRSGHGPVKQYVFCVSKNPRPLGRGEVNLVCC

SEQ ID NO: 35615 - protein, 395 aa, Salisaeta sp.
MEHMAYKYRVYPTKEQRRFLAQTFGCARYVWNWALEHRTNVYHDEGESLGFAAMCKRLTQLKKDDEHEWLKKPSSVVLQQSLRNQEQAFTNFFEGRAGYPSFKQKRGTQTARHTKAAFSYDADTRTLKLAKVPGTLKVNWGRGSSFRELRGEPTAVTISKDPAGRYFVSIEFKAPVQDKPKTGKAVGVDVGLESYITLSTGEKVGNPRFLEDAYRRLRKEQKALSRKEKGSNNWERQKRRVAKAYAKVADRRKDFLHKLSTRLVCAFDVITVETLSVKNMQKNRSLAKAISDAAWSEFIRQLEYKAKWYDKTLVKVDRWFPSTKRCSDCGHVGERKPLHVREWTCTECGCVHDRDVNAAKNLSRVGQARTEAIASKAPGDQRKTIGAFRLHGSGR

SEQ ID NO: 35616 - protein, 294 aa, unknown
  TnpB Polypeptide
LTLSKIGSIRIFKHREVKGKIKTCTLKRDSTGCWYAILVTEIADVPKKELYSIISAIGVDLGTRRQKDPATGNLVGRLATLSNGQKVLYPRFFAETEDRLKIAQKALSRKKPGSKNREKARVKLAKIHKKIRNQRDDFLHKKSRKLVDLADLIIFERLQIAGLSKGLHRSKDMHDHALRKFIQFTTYKAESAGGSVEFVNPQRTTTECSLCHHPIRMRPSDLYHRCTTPDCWLSLDRDHIAAINILYRGTKSRGVTSEHDILDHIYKREDGTLGLRGSARVVDLVDYYWNAGSL

SEQ ID NO: 35617 - protein, 318 aa, Streptomyces sp.
VRGRGRRIAAKAVQKTEELAYLNDVSSVPLQQTLRHLQGAFTNFFARRAKYPRFKSRKRSRNSAEYITSGFRFREGKLTLAKMSEPLDIVWSPPFPEHASPSTVTVSQDAAGRWFVSLLVEDSAVQPLPANDRAVGIDAGLDYLRKARGNGANRVKARREVAKVHARIADRRRDHLHKITTRLVRENQTLVIEDLTVRNLLRNGKLSRAISDAAWSEFRSMLEYEAAWYGRDVIAVDRWFPSSKLCSNCGALRDKMPLSVRTWRCDCGATHDRDVNAAKNLLAAGLAVSACGAGVRPQRESSRTGQSVTKQESPRREP

SEQ ID NO: 35618 - protein, 398 aa, unknown
  TnpB Polypeptide
MTTTVPAAAYRCGCHHGHAIPAEPVGARWEDCEVKLVVQVKLLPTPEQARALEATLTACNALATSISLIAHAEKVTSAFSLHHLSYHQSAGSGVSAQPRVRSIKKVADAYKTLRANLRAGNHGRVGSPRRVKLESKPVAFRPDAAQPFDDRCLSWQHTAKTVSIWTTTGRMRGLAYTALPAHLELLAAHRRGESDLIRRGKNWFLIATIDLPDVAPADPAAGFVGVDLGIENIAVTHNPATAEHHDWSGGAVTAPGGPRTGPCGHGCRSRAPSRRSGCSRPAPGRNAVRRRHQPPDFQNDRGRGQTHRMRNRRRRFDGDPPTGTAPQAPTGHALLLGVRPAGIVPHLQGRPRRCAAAAGEPRLHQPKMLGVWAHRPQEPAQPGRLLLPSMRLLVGSRP

SEQ ID NO: 35619 - protein, 200 aa, Klebsiella sp.
TVGIDVGLKDLFVTDAGFKTGNPRNATKYAKRLALLQRRLNKKQKGSRNRAKARLKVARLHAKIADCRMDNLHKLSRRLINENQVVCVESLKVKNMLRNPQLSEAIADAGWSELVRQLQYKGEWAGSSVVAIDQCFPSSKRCSCCGFTMKNMPLDVRKWHCPECGADHDRDINAARNIKAAGLAVLADREPVNPESQHAA

SEQ ID NO: 35620 - protein, 289 aa, unknown
  TnpB Polypeptide
VPLKLRQTDLRYLERYWSHVKASAPILERRYNRWYLRFAFEEQQALSDTPIQDQRICAVDLGLNIDAVCSIMTADGTVLQRKFIDFPSDKDHLYHVLNRIKRRQREHGYTSIHALWLYARRLNNELAIKVAAAITDFAVLHSAGVIVFEHLDFKSRKHKGNKAQKLSLWKRNSIQDYVTHKAHRCGIRISRICAWGTSALAFDGSGSLSRDKHNHALAVFASGKQYNCDLSASYNIGARYFIRELAKPIPAKEWSDIAAKVPDVQRRTSCTLSTLRALAAVLGLSSPAA

SEQ ID NO: 35621 - protein, 402 aa, unknown
  TnpB Polypeptide
MGQSLRGHRYKLSPTGEQQRLLARWAGCCRYVFNTALAHRQAAYAATGKGLSYAALCKQLTAWKKALTWLKQPPAMLLQQAIRDLDTAFTNFFAKRARYPRFRSRHRGQPSLRIPQDKTTLRVERLSGSVGRLNLPKLGWIRFRWSRTPEGTIRSATLSRDACGDWFVSLLCATEAEELTEPTEVDPEQFRGIDLGITRPVTTDDGRHHAVPTPTTEDLRHAAKLARSVSRKQKGSTNRAKAQNRLNRFRREWRNRRTDAHHKLSNTLIAENQGIAVEDLTIPNMTRRAKGKRVRQKSGLNRSILHQSWGDFRAMLAWKGLAAGVIVERVSARHTSQTCSVCGVIDAASRPSQASFVCTACGHAENADVNAARNIRAAGLSSVKARGVHVRPTPLRLGGSGR

SEQ ID NO: 35622 - protein, 417 aa, Mycolicibacterium sp.
VLAGRRFRVDFTDEQALFAEQIGTACRAVWNTGLQQRREYRRRGAWMNYGPQAHELAEAKLEHPWLKDVPGHCLQQTLMDLDRACREHGTFKVQWRSGRRWVASFRFPQGSRMTVEKLNRRHARVKLPKLGWVKFRASRSLDGQVIRSATVSREGKHWFVSFLVDDGMRTPNEHRAPGVAVGVDRGVAVAVATSDGELFDRTFVTDGEHRRAVALQRKLSRAGKGSANRAKTRSKLARLRARERRRRQDFCVQTAARLARANAVVVVEDLKTRNMTRRATPVEDPDNPGRYLANGAARKSALNKAILGKGWNRFDKALTSVARYTGTQVINVAAAFTSQRCSVCGQVDPKNRESQAVFRCTSCPHGPVHADVNAAKNILAAGLVVTACRETAAPVGAAVTLTQEPAGNREELLLQPV

SEQ ID NO: 35623 - protein, 451 aa, Mycolicibacterium sp.
MCSRKLSRASVNAARLHVNTRIMWSRRNDTLCRPQRCVSVVTGWPYSRVMHMRFRYRIEPTPGQQMTLARVFGCCRVVFNDALRVRGDAYRAGFTLSHSEIQRRVITVAKTTTERAWLCEVPSVALVQSVNDSRRAWQNYFNSHTGKRKGRTMGRPRMKSRKDYRQSFRLTRNGFSVRSNGRLYLAKIGEVRVRWSRDLPCEPSSVTIIREPDGHFYASFVVDVPASPLPPVEQEAGVDVGLTRLATISATDGTRVDVLNPKHLRRKLRKLARLEREKSRRQKGSVNREKSRRKVAVAHNEVARARRDYHHKQALALVRDNQVIHVEDLNIVGMLKNRRLARSISDAGWGQFVRIIGEKADRYGRTVHQVSRWLASSKTCSQCGHRLDELPLQVRSWTCPACWVVHDRDHNAAKVILAAGRAERLNACRAPVSPPDREVRGDEARSIPTAG

SEQ ID NO: 35624 - protein, 474 aa, Mycolicibacterium sp.
MARHTTFRFCLDPTVEQCAVLARHAGASRFAFNQCLQIVKTTLTQRRTDPGVEVPWTGFDLINAFNAWKKSEAAGRVFAVDAHGGVEVAVTGLSWRREVCQQVFEEAAVDLGNGLKAWSDSRSGKRSGRRVGFPRFKKKTGASASLRLRNKHSKGKPPAIRVGDGNRPRSVTLPGIGLISVHDDTRDLRRMIAKDRAKILFATISYRGGRWWCALNVEAADLHPRQQHPTRADDADGWVGVDRGLSTFLVAATSDGTEVARIRDAPKALAAGLKQQRRLAKSLSRKQKGSHHRKHAAARLGRHHHRVANIRRHFLHQVSGELVKTHDRLVIEDLNVAGMLANHRLARAISDAGWSEFARLLRYKQAWRGGEVMEADRWYPSTRLCPQCGAVKNDMTLADRVFTCGCGYCADRDTNAATNLARWGHSHDLHRSPDPQAGGRATNARRRDGSGQHSYVGETSPKDAGTDVHTSPAA

SEQ ID NO: 35625 - protein, 450 aa, unknown
  TnpB Polypeptide
MSQQQQDSEPEEKKKKKKKNRRQLLTRAVTHIRLREINPGKLAALDALAEVYMAVCQQYVTLFCTEEQPDAFHASVYETPLSERWQRAVIQQAAGIAQSWRTNRANAYQEYTDALADYYDEQQADPTPERKEPTWKEWSIPALKATCIQANTNVVSLEPSTDSTFDYWLTISTLQPYKTVKVPVKLADYHRDTLTDQTVNTSVTLNKRGETWWLTLTYDETKPTAPAILAPVVGIDVGITNFVTTSTGEHYGSFDKKLRARHKRDRRKRQRKAKLRKCLEKKGVHKLPATSSRTGQRLARHVRQSINRAVNEYFEKHPSAPLAYEHLSVATMRFKARAMNAYLYASNLAHIPQKIAWGALKRGLPATQVKSAYSSQECSVCHYTDKKNRPNQQTFCCQVCSHRANADVNAATNIARRLGDEQLRACTNRNEIKVLLMRRHEHWKTVIGCL

SEQ ID NO: 35626 - protein, 473 aa, Leptolyngbya sp.
VRVVPEAFRLFSHIFTVDNYVFIHNNSYNKGMAKTFAAQVNRLPSDPSLSAALEFLCRVSNSLYNCTTYLARQVYFKEKKYANKFWLATEMKRNPHMKALYTSAAQQTCFSVGEAFKGFKELRKLWFQGELPDEPKAPNYRKSGGRFQLSYPKRWLKLTDKGVRVAMGTACKVWFGLREIFIPFPSNLDWATVKELQIVPRAGYFDAVWVSAADAPEKPELDPNKALSIDQGVDNWLTCTPSDAEAFIIDGKQLKAVNQFYNKQVANIKRDKAQDFWCRLLDRLTTKRNRQMRDAVNKAARQGVNYCVANQIGVVVFGWNKGQKNKANMGRKTNQKFVQIPTAKLKKRISQLCELYGIEFTPQEESYTSKASALDLDVIPVFGAKPEGWKPSGTKPKRGLYKSADGTRINADCNGAWNIGRKANVTGMQCKPASGQLTSPRRLRIWSLRTSRLAEVLKPLTEAGESPVLQSRE

SEQ ID NO: 35627 - protein, 379 aa, unknown
  TnpB Polypeptide
MRKTFKYRLYPTKLQTTKMNNILEQTRWVYNETLALRKNTWESEKKSISLYASQIELTKWKTVKPELNEVFSQVLQNAQLRVDLAFKAFWRRCKAGENPGFPRFKGKGWYHSITYPQAGFRLHPDGVYLSKIDRVKIVLHRPVEGTIKTCTVKKTPTGKWYVYFSCETEKPEPLTKTGKIAGIDLGLITYIQCSDGSKIDKPRFFNLEQKAFAQAKRRENITFKAKHKRVLAMIHERIKNKREDFCHKASKKLVDKYDFIAHENLNVKDMLEQKKYSKSIADASWSTLIQYMTAKAENAGRIIVGVDPRGTSQRCSQCGTTVTKTIEVRVHNCPHCGFKTGRDLNSALEILRLGLESVERPVPRRKAKALVRTHGSPRL

SEQ ID NO: 35628 - protein, 416 aa, unknown
  TnpB Polypeptide
VKRLKLSFKFKSQINSKQLEIIEELSYHTTKLYNIINYDLRENGFKNYYEIEEMYKNNWHCDFLHSHTRQQMFKVLEQNWKSYFTSIKDFGINPTKYRGCPRPPKFKNIERNKNEIIFTNLAIRFQDGVLKLSLSKTIQKLFKVESLNFEVSNKLQGLINWDRIQQARFNYDKVQKCWYLIIIYNKDEVENTLTNVMSIDIGLDNLATITFKDGLNQYIFCGKELKSVNSYVNKRIAYLQAIEMKKVGSDKFKNTKEINRLRKYRNNYINDYLHKVSKNIIDKALENNVGKIVIGKLKDIKQDMNYNKSFVQIPIQRLVELITYKAKLQGIEIKLQEESYTSGCSAIDLEPISKKYYNKSRRITRGLFKSGYGVLNADINGSLNILRKAEKCIPDLVNAMRDKGNWNHPKRIRVAY

SEQ ID NO: 35629 - protein, 509 aa, Bacillus sp.
MEVNQIMMNKAYKFRIYPNQAQAILINKTIGCSRFVFNHFLSLWDHAYKETGKGLTYGTCSAKLPAMKKELVWLKEVDSIAIQSSVRNLADAYMRFFKKQNSAPRFKSKKNNVQSYTTKQTNENIAVVGNKIKLPKLGMNKAYKFRIYPNQAQAILINKTIGCSRFVFNYFLSLWDQAYKETGKGLTYGTCSAKLPAMKKELVWLKEVDSIAIQSSVRNLADAYTRFFKKQNSAPRFKSKKNNVQSYTTKQTNENIAVVGNKIKLPKLGLVRFAKSREVEGRIVNATVRRNPSGRYFVSLLVETEVQELPKTSSYIGMDVGLKNFAILSDGTTYKNPEFFRSLEEKMAKAQRVLSRRMKGSSRWNKQRVKVARIHEYISNARKDYLDKISTEIIKNHDVIGIEDLQVSNMLKNHKLAKAISEVSWSQFRNMLEYKAKWYGKQIIVVAKTFASSQLCSCCGYQNKDVKNLNLREWDCPFCRTHHDRDINASINLKNEAIRLLTARTAGLA

SEQ ID NO: 35630 - protein, 380 aa, Azomonas sp.
MKRAYKYRFYPDTEQQTLLAKTFGCVRVVYNKILRWRTDAFFQRQERIGYIEASAELTRLKKQAEFSYLNEVSCVPLQQCLRHQQAAFKNFFAKRGQHPVFKSKKHRQSLELTRSAFSYRDGQLYMAKSKKPLDVRWSRPLPCEPSTITISKDCAGRYFVSCLCEFEPEILPVTPRMIGIDLGLKDLFVTSEGERIGNPRHSAKYATKLARAQRRLSRKKLGSANRAKARQKVARIHAKISDCRLDGLHKLSRRLINENQVICAESLAVKNMIRNPKLSKAIADAGWGELMRQIQYKGEWAGRSIVQIDRWYPSSKRCSCCGHIVTTLPLNIRQWQCPECKSEHDRDSNAAANVKAAGLAVLALGENVSGMGLVPMSCSQ

SEQ ID NO: 35631 - protein, 402 aa, Saccharothrix sp.
VRTAYRVRAYPDAEQAAVFNRTFGCVRLVRNKALAERRHRYQSEGKRTTYRETDAALTGWKRTEDLAFLSEVSSVPLQQTLRHQHTAFQNFFAGRTRYPRFKSRSGRQSAHYTRSAFRMRDGKLILARTSMPLELVWSFDQVNLATLDPTMVVVSREPDGRWYATFAVDTDDPEPPAATGHEAGVDLGLKDFLVTSDGDRVANPRHLERKARNLARHQRRLARCQRGSNNRRKAKTKVARAHRKVRNARQDFLHRTTTNLVRSADLIAIEDLAVKSMVRNRRLARAISDAGWGEFRRQLEYKAAHARRTLVVIDRWYPSSKTCSACGHVLTELKLSVRHWTCPDCRTRHDRDLNAARNILAAGRAVARGDSGDACGADVRRQGPSLPRSATKQEARTARCSA

SEQ ID NO: 35632 - protein, 406 aa, unknown
  TnpB Polypeptide
MRLRFRYRLDPTPVQQQELAQAFGCARVVYNDGLRLREDAYKAGLPYVRDGTLLHQVTTTAKLREDRAWLGEVSAVVLQQSVADLNRAYRHYFRALAKARAARAQGRKARLEDRKPRFKSRRSGQAVRFTRNSRFRLLPNGRLSLPKIGDLKVHWSRPLPAEPSSVTVTMDGAGRYHASFVVEVREILLPVIKTAVGVDLGLSAFVALSDGRKEGNPHWLRQRERALRRSQRNMSRKQKGSKNREKARHRVARLHVKVADARRDFHHQLSTRLIRENQTVCVETLNVAGLDRSNFAKSIHDAGWGQFTAMLVYKANLYGRTVVKMDRWFPSSQLCSACGHRDGPKPLKVRAWTCPSCGITHDRDVNAARNILAEGLSVAACGGGVRPGGIPAAADETGTALGAVAS

SEQ ID NO: 35633 - protein, 395 aa, Kroppenstedtia sp.
LRLNQGGEKEIAKKRKSEPLLHQAYKFRIYPTKEQATLIHKSIGCSRFVFNHFLAKWEDTYQETGKGLTYNTCSKFLTALKIELEWLKEVDSTSLQRALKNVDDAFKRFFKKQNDRPRFKSRKNPVQSYTSQCNHPKKGKPTIEVLENKIKLPKLGWVRFAKSREVEGKILSATIRRSPSGKYFVSVLCEMNHCPYVPATNETVGIDLGLKDFTILSDGRKENTPTYFRKYEKQLAKAQRIMSRRTKGGSNWHKARIKVARIHEKITHARHDFLHKLSTKLIHENQVISMEDLQVKNMVKNHNLAKSITDASWSEFVSMLEYKAKWHGRTLVKVGKTFPSSQLCSGCGYRNKEVKKLNLREWICPECNQHHDRDMNAAKNILHEGLRLISVGLTV

SEQ ID NO: 35634 - protein, 449 aa, Calothrix sp.
MEQQYWIYQCEEANSLINCAIYYVRQTHYSFLESKGDAFTTYWNEDELLKGWKIYFCSVNYNELDKVLKDNKHYKALAAQSAQQVLKSVGESITSYNSLVQLYYQGEVNRPLLPGYRKKGGLAAVTFPKQALSYKDGYLKPSVSKTCKPDLICDIKLQIPDFINHEQVREVTIRPNYGQLWIDWVIDDGKEPVKKNPNLDYSQAWSFDHGGTNWLTGVSTLGKSFIIDGRKLKSINQNYSRLVAKYKEGKPNFYWDANLDRIQLKRNNQIRDGINKAARFIINRCLNDGIGNIIIGWNEGQKNGSNMGKRGNQNFVPIPTGRLIERLKQLCSEYGIVLTLTEEAYTSKASFLDNDLVPKYGEKPEKYEFSGIRYPRGQYKTKSGLIVNSDCNGAINIAKKVATQLGLVLTKVSRVALNLPQRCDVFRDLSRKYRRKTLRSADLSHEATS

SEQ ID NO: 35635 - protein, 433 aa, Calothrix sp.
VQNVERHIVKSGHEWFSYCDAITTTSRKLYNTAQFIQRQSLFYGWGTESQARLDSRLNSDSNYVSMPAKVAQLVLKQSADSWQSYYNSLESYKLEPEKFTGKPNLPGYIEKDNNLVKFNYQAIGKREFKKGFIVPSMSPIKIPVKPGLKFEELKEVRIIPKVGCFVIEIVYEVPEKIELFCSLNPHLVAAIDLGLDNLATIVFNDPTIQPIAINGKPLKSVNQFYNKQVANYKGFLPNPDDSSTRIKNIIRNRNNFVDSYIHQATSMIVDSMVKNGVTEVAIGKNEQWKTNLNIGSRNNQAFTAIPHARFLEILTYKLERVGIIVKVGEESYTSKSSLIDWDSIPTYDPNNKIKHQFSGKRITRAFYVSKDGFKIHADVNAAFNIGRKVIPNSFYCLQEIVERNRGCLVVHPRRITPLFYRVDDKKGAAQTQV

SEQ ID NO: 35636 - protein, 449 aa, unknown
  TnpB Polypeptide
MTQVLTVSCKLKVSQSQAAKLDETLDALSLRDANANGQALNWVNQNTPEKVVNPLKLQSLCYYEIRARFGLSSNLARTTSRLRDQQICRRVASARKVAQQKNRPVKALSLRDANANKGGFATYDARIFSFREKDWTVSLSLRDANANTTVEGRERFELAIGHYQREQLAGSNPKKTSGPLTRTATLVKRKDGSYSIQICVEAKLPEQQNTAQVVGVDLGRTDIAHTSEGDNWNGQQLNRVRDHYSRLRAVLQRKASKGTRSSRRRCRELLQRLSGKERRFQSRQRCVAKTWVNHRISKAIVSRAKATNSAIALEDLTGIRERINQQPRSKAERRRANSWAFYQLRQFLEYKARVAGVSLILVPPAYTSQTCHKCLHIHPDPAQSYRSGKQFKCGHCGWEGDADWNGANMIAKLGAAVNQPRGPWLACQLQGYRKPALFRFSGAERSASA

SEQ ID NO: 35637 - protein, 420 aa, unknown
  TnpB Polypeptide
MCIKSIIKPRKGGEIMYLTEKEIIYPTDERFDLIKELCHLSKNLYNASLYDVRQYYFETKSYRTWQSQRPIFTKNHNPDYYALPADLAGEVLMQVGRQFISFFNNKSNKKKRVPKYKDKNGYNVITFPKRTISKYIEFDKYKQLYTYTLCKKSYNLKIQSTKPNIKMIKFVYDEMNNLIKCFKDYEFEKPKLKRDNSRYFSIDPGLNNIVSIYNNIGIRPLLYNGRPIKSINQYYNKTNAKLRSELPNNIKSSKRLNQLALKRANKIDYEMHKISSHIINEAVKNNISKIFIGNNVGWKNEINMGRRNNQNFVNIPHAKLFNQLLYKGLLNGIEVVFTEESYTSKARFFDKDELPIYGESDNHKFSGKRIKRGLYRDSKGNIWNADLNGAANIMRKCSDKAYKNIRKTKEMMKRPILITL

SEQ ID NO: 35638 - protein, 453 aa, unknown
  TnpB Polypeptide
LRTSWNRYYGHEWRIILTRRRTGEGFDCHCHAFFCSTSWPAFPQKRHSSGCFAKGWEAMIKAHKIRLNPTPEQANYFARAAGTARFVWNWALAEWNRQYEAGEKPTALKLKKQFNAIRRDQFPWTWEVTKNASDQPFLDLGKAFTAFFEGLKNGKKKGRPKFKSKKRSRASFYLANDQFELGDHRMWVPKLGWVNMAETLRFKGKVTGVRITKTADWWFASITVELPETQPDPAHPRPHAVGIDVGLNRLATLSTGEEYENQAFLKTALGKLRQANKRLHRRVKGSKNREKARRQVARLHYQITCMRDDVLYKLTTRLATCYGIIGIEDLNIKGLLKNRRLSRSFSDAALGKLLTLLTSKVQQRGGQAILVGRFFPSSKTCHGCGWKWETMGLSDRIFICQNPTCASYGFSQDRDHNAALNILYEALRLIGLVDQAVNGIGSDEDANLAVDAG

SEQ ID NO: 35639 - protein, 455 aa, Hyella sp.
MNQIFAAQINRLPDDKELSAVLEYLCSESNKLYNCCTYLARQIYFKTGKLSNKFWLATQLKTNPHMKALYTSAAQQTCFSVGEAITGYKKLLKLWKQGELTNKPKFPQYRKRGLFQISYPKRWLKLTEEGVRIPLGKSCKVWFDIAEIYLPFPSNLDWNSVKELQIVPRAGYFDSVWVTKTETIDNKLNQNNVLSIDHGLDNWLTCISNLETSFLVDGKHLKALNQWYNKRLATIKENKSQNFWCKLLDKITTKRNRQMRDAVNKAARIVVNHCLKNNIGTIVFGWNKGQKQESNMGKKNNQKFVQIPTGKLKDRIEELCKQYNIRFLETEESYTSLASSLDLDDIPVFGAKPEGWKPSGKRVKRGLYRSASGIEFNADINGAIGIARKAIQRGLGGFPHERLNQEVAEQYGFQFDASGFARGVLTMPRRLKLWNKQGTVPNFSSAVKESHVLQP

SEQ ID NO: 35640 - protein, 338 aa, Thermogemmatispora sp.
MAQVQRTIPLLLPADEDLRETLAVFQRVQQQLSAPCFNGGKPLSAVALHRACYQEVKSQLNAQMTCTAIRLVAAASQCACSNHCPPQRPFQFRRRRALFLIGPRGWDARLCPDGTLSIWTVAGRKQLSCRVPEAFLPRLAQAKTIESLTVVEQAGKLVGRLTITLEVPDPPTARPEIKAVVGIDLNETNALVAVDGQERLLFVSGKAVKVRNRRTAKTRARATATQAGGPQGTASGHAQWLAGAATAWPPATTPHPDVCPDRGAASGGVGTVTGSAGLRTAAGATAAERADPWEDPATPARAVATRLDPPVGRAAGTGARTACGGGEPVLHQPNLFPL

SEQ ID NO: 35641 - protein, 413 aa, Actinomadura sp.
MLVGRKYRLSLTAEQAEMAEEFGNICRSVWNTALEQRREYRRRGAWMNYVPQAAELADAKREHEWLRAAPSHVLQQTLKDLDKACRTHGTFKVGWRSKTRWNPSFRFPAGNLITVERLNRKRGRAKLPKLGWVVFRWSRHPGGEVRSATVSRKAGHWYISFLVEDGVLPPGHHAGTPVGIDRGVVVAATTSTGKFYDREFATTGEKTRYRRLQQRLARTRKGSANRRKTVASMSRIMVRVTDRRADFTAWTANRLTARHSVVVLEDLRTKNMTASAKGTEAEPGRNVRQKAGLNRAILDKGWHRMELAIRNAARSTGTQVVLVDPAYTSQTCNRCGHVDAKNRESQAVFVCTACGHRGHADVNAAKNILSAAGHAVPACGDLGVTRSVKQELPGPREAVPVRLAFELVGIPRL

SEQ ID NO: 35642 - protein, 634 aa, unknown
  TnpB Polypeptide
MDEDNPNFTVVKSTLNRFCNNDFIKSTLQDYLFQTNLLLNESYLFVNLHINRILENNLTSNYKTLNETFFNNVFMGLKTDVKDESKRFKEIELTDTYKLYKQSLPANFQHSDTKGKSTLLTELSLQLSTITDNHLKLNFYKRFSKYLQLQHPDTDWKTVYNIVNHILLSKKKFDESTDMEIKQHPLVIQYRTTFLNRTLDELLKYDVWIVLKQLREILIFNETRLMNEQETGLEYKLRTRNARLFSMLPIKQLSNLSYMILTRQPLYYLLSKSLGEEFTTIINNNGKPLSNVNYFTETTYKQICNELFNIKYFETQLKEFHYFMTDGKTVSIVLKKRGFEPKKRRTKLEIEKDKKEPPKKKVIKKQDNKIKTETKLDMKNLKLIGIDPGLRMVFVGCKTTIDPTTDKNHIIKLSSKQYYTDIKSTRMSMKLKKLVERNNLSNLFSSTAPSRKTSKIDQLSLCIETITEKLHKLIRTLMESKAREWKFDKYRFQQKKIVEICKMLSGKRRPEEERNVIIGWGNWSNPNNSIIRGHKRGPVKRIVKELRRWCRVETIDEFNTSKKCSKCLSDTEKMKYLQHDEMRTVNDVLRCKNEKCRTYFDRDINGARNMLKKLKIKLGLEIEVEELNRKTIEV

SEQ ID NO: 35643 - protein, 367 aa, unknown
  TnpB Polypeptide
MLARTFGCARVVYNDAIRLRDACYEAGVKLSDTEIQRRVITAAKQTAEREWLSEVASVALVQSCQDAARAYRNWFDSLSGKRKGRKVGRPRMKRRRERQSVRLTRNGFSIRSDGRIYLAKIGEVKVRWSRTLASEPSSVTVILEPDGRYYLSFCVERETQPLWVIDHEAGIDLGLSRLLTTSEGEIVDNPRFLRRRQRKLACLQRATSRKQKGSANRRKASKRVAVAHRKVREARLDHAHKTALRLIRENQAVYAEDLAIYGLARTRLSKSVHDAGWSQLLRLLAEKAEHYNRTFVQIGRFVPTSQICSECGWIDGPKPLSIRTWTCQCGAVHDRDVNAARNILAAGQAERLNACGERVSPSTRAAA

SEQ ID NO: 35644 - protein, 403 aa, Clostridium sp.
MKVERTERYIIKKSHKMWKACDKLCFKSKNLYNYANYIQRQRFINSEKIYKYKDLTFELKHLEPFKDLGSNSGQHTLKMLCRDWKSFLVSIKDYSKNPNKYLGRPKLPKYKKKDGRHICVLTNMQSQIKDGYLFFAFKYLKPFNNMFKVNFKGKHMQTRIIPRGNVYILEIVYEKEVKELKEETNRILGIDLGVDNLATCVNNIGIKPIVINGKVLKAINQYYNKKLATLRSDLKKRHNKDWSNKIDRLQRKRDNKVDYYLHCSSKKIIDHCIENNIDTIIIGLNKTWKQESKLVKKANQNFISIPYDKFISQITYKTQDVGIKVMTTEESYTSGCSFLDDEEIGKETYNKNRRVYRGLFVSNKGIKINADCNGAYNIIRKVVPNAFVDGIEGVDLHPIRVNI

SEQ ID NO: 35645 - protein, 657 aa, Micromonospora sp.
VSGKLRLAEGEAARTACARGVLRAGVDEATGEVLSRTVLAQRVGWCADLVAGMVAALIGAHWNRVDVGVLACGVDAGGRRLPSNAWMALRRLGWTVTAPQGVRVNDRVVRMAQEQAGRVLRSAAWRAEVTAGVLSTWPADPRRRTPAEWDQVRASIPGGEHLPASIIKSRTRQAATFAKANGRLPVDVFELEGTPRIPRMLLLAACDRQQATIERCDTDPAGALLRLQLPTRPDPRGYRDWTWVACRITLPPTVPASAVLHLPTLRVTDGTVRADLAYTYPVPKAARTGHTVAVGVDWGLNTLLSAGALRLGKDGRITALGAGGQFRAAGVLAKQHRLRRQSERLHAKAERYARLLGGRPDEQLRAKHEVLAGEIRHVSDRRQNLNDALAWAAARWMVDQAIAARASVIYLEDLRSLEAKGMGHSLNTRLSQQVRGKISDRMRHLAAEHGIAVVTVPARNTSKHCPQCLTPLRHCKAPDRPTTPGWKWASCANTGCGWQGDRDHGAWRRIAARGLTHQAKTVIDRTNGAMVIRSVVDDLEANAVVTPSSNASRRDRSKTGPTRHKPPRPAPRRRRAPSPTRPQSLAGKRPEGHAPTGRTRLPRAAHRHQSVNTTSTPTTGHQPRGAALGAGFHLHAHATPPRWETIPDTQSGSGSLS

SEQ ID NO: 35646 - protein, 485 aa, Bacillus sp.
MEKGKETHYKTHQIWIKKGHRMYPYFKEMAQNAKNMTNTTNFYIRQVYTGLTQEKELQPLQKEVLAIIEKNLDNMNGVQKSFYLKKIEKEKTKPKEQQKSFTCHVFEAPSKAHPYVDYNFLDCLFKVTAQHDYRSLPTQTSQSIMKTVFQNWKSFFSSLKEYKKNPAKYKGRPRIPKYSRASEKEVLFTNQDCVIKEKKFLKFPKTKERLNIGKLGAGEGKLKQVRVIPKYGQYVVELVMDVPLKKEECQEINRLMAIDLGIDNLATIVTNTGSGPVLVKGRHVKSINQYYNKMKAHYLGILRRGKQPNEGPFTSKRLEKLHQIRHQKLKDLFHKVSFSVIKHAQEENIDTIIIGKNNDWKQSSTIGKCNNQSFVSIPHSLFIRMIQYKAKEQGIKVIVTEESYTSKASFLDGDEIPTYGECESKKTFSGKRIKRGLYRSKAGFIINADVNGAANILKKAFLRLKEEAIFHKETIHVWHPQSKII

SEQ ID NO: 35647 - protein, 473 aa, unknown
  TnpB Polypeptide
MALTLQLKPEINIKATKDAESYWSERAAKLSSALWLPASKSQQESYSIHHHGWMSTLKPLAAPVSFDVSLPAASLDIKNNQSATIKATKKIRFYPESELKYIQALMLYRRAYNLAISRYIEGSHEDDDGKFYDLRPWVKATCQLEQKEKSHIYNSLICDNAVREAKTTFFAMAKKNKGKHPEQPGFARLHFKSRKGDIHSFRMCRMPAGLSPAVRALDEIHLTETVPQEAIDQAITVTFDKGRWFINVQQHITTKAETQGKVRCVSVDPGVRTFATCYSPSEVVVAGDKLAKKRLFPLMRKVDVLLSQRQRIYNQFAKDIKFDELPQWARDRLRYIQKRSQTLKTKKEDIVRDLHQRLAHYLTENYDVIFLPYFETKSMVRRKAGRVIRRNTCRQMLDLGHYHFKLMLKWMAKKKGKRVVDANESHTSKTLSHSGEVVNNLGGREFINDGEMRIHRDINGARGIFIKTILQVT

SEQ ID NO: 35648 - protein, 461 aa, unknown
  TnpB Polypeptide
MGFVTMAVLTSGRRHPDMKVFSTYSMKIKHYNHIFKETVSLYRAAVDFLIGVCLDEWDTLSVLDSLSRCNCVEQLCHKTKDNPDVKYPFDRKFYKFPSYLRRSAISEAIGKVSSYKSNLANWESEDPKTRGRKPSFPKAGYVYPSMYRTVMYEQSGDYEMKIKVFIRNTWDWLTVKVRKSDMDYINRRCASRKKCSPTLQKRGKEWFLDFPFEEKVTLPDTDIFNRTIISVDLGINAAATVSVMRADGTILGRYFCKLPKEYDSLTHAVNRIKKAQQHGNRRMPRLWAKAKGINLDISVKTANFIMNVAVLYNADVIVFEHLDRTGRKRGSKKQQLHLWRSQYVQSMVTDKAHRSGMRISHICAWGTSRLAYDGSGRVLRGKEAELPTYSLCRFQNGKVYNCDLSASYNIGSRYFIREILKSLPAKVRLELEAKVPQASKRSTCTWSTLINLNAELMSFAA

SEQ ID NO: 35649 - protein, 266 aa, Fischerella sp.
MKARYQYRFYPSDQQQQSLAQLFGCVRVVWNDALAICKDAEKLPSNNDLQKLVITQAKKTTEREWLSEVSNIPLQQSVADLGVAYKNFFDSLKGKRKGKKVGRPRFKKKTNQQSARFRIGGFSIKGDEVYLAKIGNVKPIWSRELPASPTSVTVIKDCANRYFLSFVVEIELVNIDAKNQSIGIDLGIKTFAVMSDGTKAESPDYSTLDRKIRSYQKKLARQPKDSRRRNRTRIRIAKLHNQIADTRKDFLHKLSTKIVSENQVLS

SEQ ID NO: 35650 - protein, 419 aa, Fischerella sp.
MLLTHQYKLAPTPEQVVTLEAWGELLRRHYNYALGQRLDWLNRTRSQIDRCSLVREPIGEISDKVDYYTQASDLKQTKDLFAEYKNIYADCQQQNLMRLDKAWKRWLVPDKNGKRGGRPRFKKRGDICSFTFPRVNNPKAGAHLVGNILKLSKIGEIEVILHRPILDGFEIKQATILRKADGWYVSFSLEDKAVPEPLPISEIKSATGIDVGLEKFLTTADGQSIAVPQYYRKAQSVLAHQQRKLARRIKGSKNYQKQSNKVARLHLHVARQRKEFHYQVAHWLVNSYDLIIFENLNIKGLARTRLAKSILDVAWGAFLQILQAVAVRRGKHTQGVNPRGTSINCSGCGERVEKSLAVRVHSCSCGLVIDRDWNSALNLLNLGSVGLPIPGCGGLEVTQPVRQQVSFVNLRCSRYTACS

SEQ ID NO: 35651 - protein, 446 aa, Fischerella sp.
MIYAYATHEHNKEGKSKLYGCQQNLINSNTELRAVLEFICSESHKLTNCGIYYARQLYFKTGKLIGKFDLINEYKTNKHYQVLHSQAAQQVLMSVWESFKSFKELNKKYSKGELHFQPKLPKYRKGAGYALVTYPKQALKLVGNNIKIPLGNTVKRWFNLDSFTIPMPSNLEFENIKELRILPRNQCFYAEFVYKKESVPRYYLNPNNALAIDPGINNWLSCVSNVGTSFIVDGRKVKSLNQWYNKRVSTLKEGKPHGYWDDQLAHITEKRNRQIRDAVNKAARLVVDRCIKHQIGVVVFGWNQGQRQQATLGQTTQSFVQIPTAKLKERVKQLCEEYRIKFVETEESYTSNTSFLDGDFLPTFGAKPEGWTPSGKRVKRGMYRTAKGQLINADLNGAANILRKVETQLGLNLVKVCRRVLTLATRFRIWETKTKKRRGMDATPPL

SEQ ID NO: 35652 - protein, 231 aa, Fischerella sp.
LHNILFVVDASVPVFTPDAPNLDNTIGIDMGLKSFLVDDSGALVEIPQHYRKSEKRLKQLQRSLSRKKKGCKRRHIAIKRVAKAHLNVANQRKDFHYKTAKKLLSQGKHVAHEKLNIKGIARTKLAKSTHDAGWGQFLQILSIKAERAGLLAIAVNPNGTSQNCSGCGTKVPKELKDRLHACPECGLTLLRDHNAAINIKHLAVGHSVNKAQVTSDAIAGITEKPALYASA

SEQ ID NO: 35653 - protein, 429 aa, Fischerella sp.
LYNAAVNNRFTQYQKFNQSVSYFEQQNCLPVFKEVWTEYKKINSQALQATLKRVDFAFERWFKGLGKRPRYKSIRHYSGWTYPAKSGYSVESNGENGYLNLSKIGRIQMRGKAKYWGVPTTCTIVYRNGKWYASITVDVLDQILKPETLPTGAVGIDLGCKSALSITDGENHQQIEAPKFLRNAEHLIKKASKIKRRKQAPNKNKKLKASRRWKKAQSKVSKLTRKVANQRHNWVHQVASEIVSGNSFVATEKLEVKNMTSIAKKGKRKKQKAGLNKSILDVGFGMLRSTIKYKVEQIGGVFVEVPTKKVKPSQTCPKCGHQHKKTLDIRVHNCAVCGYRQDRDIAAAEVMLYWAKGEITSRLGFCRDGSVANPNGNLTELGTSFVDADVTSSTSRTRKQAGSMKQLGRAKRQKSKSTGLVSQTQTSTK

SEQ ID NO: 35654 - protein, 419 aa, Fischerella sp.
MLNVLKVRIYPNKEQEISLAKSFGCSRFVWNFYLNKTNTQYQETGKGMTYCQMAKDLTQLKKLSDYGWLQEPTAAVLQQSLKNLESAFKNFFAKRTGFPKFKSKHSKQSIRFPESCSIKGGSLKLPKLGLVKARLSKSVNGKIKSVTVSKTSTDKYFAAILFETDELTTTKQGKISGIDLGLNSLVTVFDGENYYKVDPIKPTKKYAKRLRIRQKALSRKTKGSNNRRKAVKVVAKVHEKISNTRQDFLHKLSRKLCDDNQVIVAENLCVKGLARTKLAKSIHDAGFGMLLNFISYKLEREGGKFVQVDRFFPSTKLCSCCGHKNDLLNLSIREWICPSCQTPHDRDENASHNLRLEGIRILSTLRLRSGLTVSEAEPSTNTAGHAEIQACGESVRLVGTCAKKRVSEKQESPATLRSN

SEQ ID NO: 35655 - protein, 262 aa, Fischerella sp.
  misc_feature (10)..(11): Xaa can be any naturally occurring amino acid
QFKKHHFVNXXITLSKIGDIKVIAHRPVPDGFDIKTVSVTKKADGYYVTLSLDDKTVPTIKPDFNPDNIVGIDVGLIDFYVASDNTRIAAPKHLRKAERRLKSVQRRVSRRKKGSNRRRKAIQKLGRQHKKVADARKDFHFKTAKTLLDKYDVVAVEKLNIKGLVKTRLAKSINDAGWSQFVTILSNKAVNAGLKVIAINPNGTSQECSICGHKVKKLLSQRMHNCPICHASLCRDLNAAINIKNRGAHGLKAQSMSSYRSH

SEQ ID NO: 35656 - protein, 431 aa, unknown
  TnpB Polypeptide
LSICLYIIDPEKYIEAGKVFEVRRTNTFIIEDCPALWELADSCAKLYNELNFERRQAYMRYKRFEWYPKHLYEKYAPLIGSATAQQIINKNNEAWRSFLALKRLEAEGRLPEHVKKVSMPRYWKRNGKRELRIIIRKDCYKIDDEYIYLPRGLKLKYKGKLKWKGKQGRLEIVYDDVDEVWRGFMAVEVEESPARGGNKPLYIDLGVINLATVWFEGLKQPVAYSGRAVLSDWWYWTGKIAKEQSRLARVNRARTSKKLRKLYKIRQKMFRHAVNAMVKAIVEDACRLGISKIILGRLGGIRSRRRNNSKANAMINNFWSFSYIIRRFREKAEEYGMEVDEKSEYKTSSICPRCHSEEIVTRGRLLKCLSCGLEANRDAAGVLNIGYLHGGSVNGVVAHPLLLRWNGMTWEPKRAVNSRPMNTLEARISRL

SEQ ID NO: 35657 - protein, 421 aa, unknown
  TnpB Polypeptide
MEREAVASARKTPMQRAHKIRLNPTPEQEKYLRQACGVARFVFNWGLAEWQRQYESGERPSAYILKKQFNAIRREQFSWSYEVTKCAVDTGFRNLDNAFRNFFRRCKNGDSKKGYPKFKSKKRSKLSFRMDGSRVSTDGHWLKLEKLNEPINMAEELRFDGEIKSVTTSEDAGCWYAAINVEVGPPGHKHLQKSVGVDLGVKTLAVLSDGREFENQKLLRSELRKLRRLNRELSRRQEGSGRWNRAKRKLARFYRQIANRRLDYQHKMTTEIAKTYRIVGVEDLNVAGMFRNHRMALSIADAGFGEIKRQLQYKAEWYGGELVEVDRFFPSSRLCSACGAIKDDLTLNDRVFICECGYVVDRDLNAALNIERQALNIIRGRSGFTDSLNAQGQDVRPVIGRSWMNCENMAEERQPSNPAVV

SEQ ID NO: 35658 - protein, 247 aa, Nitrosomonas sp.
MKDPLNIRWSRTLPKATKLTIATVSKDSAGRYHVSMLCDDSVARKPRVSGKVGIDLGLTHFAILSTGEKIASPNTLRKNETRLAKLQRKLSKKRKGSANRQKARLKVARLHAGIADARKDFLHKLSTRLVSENQVIAVESLAVSNMKKNRCLAKSISDAGWGEFVRQLEYKSLWYGRELVGIDRWYPSSKRCSGCGHTVNKMPLNVREWTCPECGSIHDRDINAARNVLAAGLAVSALGESVSPVCI

SEQ ID NO: 35659 - protein, 118 aa, Nitrosomonas sp.
VNENQVIAVASLAVSNMKKNRCLAKSISDAGWGEFVRQLEYKSLWYGRELVGIDRWYPSSKRCSGCGHTVNKMPLNVREWTCPECGSIHDRDINAARNVLAAGLAVSALGESISPVCI

SEQ ID NO: 35660 - protein, 330 aa, Nitrosomonas sp.
LQQALKNLEKAFKDGFDKKQPLKRIPKFKKKGLSDSFRYPQGFKLEQESSKVFLPKIGWVKYRNSRQVIGDVKNMTISRKGGYWYVSIQTEYETELKRHSSTSMIGVDMGVTRFATLSDGSYVEPLNSFRKLSKKLAFEQRKLSKKVRFSANWKKQKQIITRLHERIANARLDFLHKTSTEISKNHAMVVVENLKIGNMSKSAKGSVEKHGKNVKAKSGLNKSILDQGWGMFVSFLEYKQACSGGDVLKVNPQYTSQTCPRCQHVSRDNRKSQSAFECTECGFKANADLVGALNVLERGHRLLACGVETLVSSKKQEPVGSSNTNLLLTA

SEQ ID NO: 35661 - protein, 219 aa, Nitrosomonas sp.
MEIKHAYKFGFYPTFEQETILAQTFGCARFIYNRMLRVRSDAGYTEKKRIGYHATSSLLTELKKEPEFEWLNKVSSVPVQQSLRHLQAAFSNSFAKRTKYPSFKRRHDKQSAEYTSSAFKWDDKSLKLAKMKDPLNIRWSRALPKGAKLTTATVSKDSAGRYHVSMFCDDSVALKPKVSGKIGIDLGLTHFAILSTGESLWALTDGIQAASAARDVDIP

SEQ ID NO: 35662 - protein, 299 aa, Nitrosomonas sp.
MEMKRAYKFRFYPTFEQETILAQTFGCARFVYNRMLRVRSDAWYAEKKRIGYHVTFSLLTGLKKEPEFEWLNKVFSVPVQQSLRHLQAAFGNFFAKRTKYPSFKRKHDEQSAEYTSSAFKWDGRSLRLAKIKDRLNIRWSRTLSKAAKLTTATVSKDSAGRYYVSMLCDDAVALKPKVSGKVGIDLGLTHFAILSRGEKIGSRNTLRKNETKLAKLQRKLSKKRKGSVNRQKARLKVARLYASIADARKDFLDKLSTRLVNENQVIAVAPLAVSNMKKNRCLAKSISDAGWGEFVRQLE

SEQ ID NO: 35663 - protein, 219 aa, Nitrosomonas sp.
MEIKRAYKFRFYPTFEQETILVQTFGCARFVYNRMLRIRSDAWYTEKKRIGYYATSFLLTELKKRPEFEWLNKVSSVPVQQSLRHLQTAFGNFFSKRTQYPSFKRKHEKQSAEYTSSAFKWDGKSLKLAKMKDPLNIRWSRTLPKAAKLTTATVSKDSAGRCHVSMLCDDTGALKPKVSGKVGIDLGLTHFAILSTGESLRVLTDGIQAANAARDVGIP

SEQ ID NO: 35664 - protein, 441 aa, unknown
  TnpB Polypeptide
MLKRKFTVVAQLHAKNNHELIKYIEEARGIYAKALRETFHAIKNCKGFNKSKYNTHLQNKYGILKRTANSIISDAQGRLNALKEANSYRLKQLEYKIETLINYIAQLETQKANNCAMISAGLSINLIKHRNLKRRLVSKKLKLNTLRQRLNNLKYQIETGHYKLCFGTKKLLNSDYNAFIERRDSQLSFVGSKTEPACNQLLQLSFNYHNNQFNVKLRKDINGFKDVDDKYVTGRVYFNHHKDRIRQIIQNRNSPLSYKIIKRNNRYYLTCTFEIQVDLQDFQTRAYYGTLGLDFNKGFVTLAETNQYGHLVQTQSLYYRFKAGHKTKTDLQDIANHVVNLALNTGKDVCIENLDFKTTKAKTQSKKGKKYNDMIHSFAYRQFANSVEQSAYRHFVYVRRVSPAWTSWLAKQLYCPTMKLNIHVGASYVIARRGQGFKEVV

SEQ ID NO: 35665 - protein, 258 aa, Oceanobacillus sp.
VNGNIEVLGKHIKLPKLGLVRFAKRREVEGRIMNATIRRNPSGKYFVSIVAETEVRHHEKTGSSVGIDVGVTDFATLSDGTVYENPRFFRTLEEKLVKAQVILSRRQVGSANWQKQKKKSSPALRKKISNKRKDMLDKISTEIVKNHDIIGMEDLSVKNMLKNRNLSKSISDVSWSAFRTMLKYKAAWYGKQVVTVAKNYPSSQLCSNCGHQNQDVKNLALRAWTCDICQCHHQRDKNASINLRKEALRLTAGTVEIA

SEQ ID NO: 35666 - protein, 404 aa, Campylobacter sp.
MSKTKNIYSTVRSVKFVLKPNSKQKEMIESFFGLSRAIYNLSLYNIKNSKFGTYEIQNGKNKGNIVPRIPTEFDLNNSIPKLKEEHSFLSLLPNDYAQAVMKNLSRGFNNFYRTMNYPKFKSKKNNIQSFNMYAGCRIKIDGDYIILIKPRGSSYTKDDLKIRFKRHKIKYNFNKVTGFTISRENNKYFISFTFHCNIESKETNGAVGIDLGIKDFCICSDDVTYENKRFLEKSLRKLKISQRSLSRKQKGSNNREKQRLKVSKLHKKVKNQRNDYQHKVSRELVNQYRTICLETLKVKNMVKNRKLAKAISDVSWSSFIEKLSYKVAENQGCLIKIDTYYPSSKTCSNCGCIKETLSLSERTYHCNECGFTIDRDLNASINILNLGLKNIVTTDATAGTTLKN

SEQ ID NO: 35667 - protein, 303 aa, unknown
  TnpB Polypeptide
LPRARAPRIWLTNSYSYRVRDGYVELLGGYRLRIIGWDKRYDVYPSGDAILLFRDGKLILEVSKRVPKPAKYVARGVLAVDVNEKHIVVGNSQHEHRFETAVERALHYKRLAEYLQKKYSFPKYNAWLRRKGIKRRISRFHSKAKRIIEDWAKKTSHEIVALAKRHQYAVAREDLAGLVESLRKLPKEHKVSLLILSYRRLEQWIDWQCEKNGVPIIVVEPRGTSTTCPKCSSRLIENSYRNLKCPRCGFKADRDTVAVMNIEKIAISKMGGSLATPTAPQRTDVNPNRCGEPVSRPEGTLAL

SEQ ID NO: 35668 - protein, 296 aa, unknown
  TnpB Polypeptide
VSRNTETSRRGFPGFLPPRKERSATRLPALSVLQALRLGFLAGCEGLEARRVRPPALLAGRRAREAEPAPSAVWSSKDSHHPPPRSTPRGDGVLLGVPKNELPKTGRSVGIDLGVGVLAATSDGVLQANPRHRKQLSVRLAASQREKSRRRRGSYRYEQASARIARFKEKEANRRKDALHQLSRSLVDDHDVIVHERLKISNMSRSAKGTVDNPGVNVRAKSGLNDAISDCGWARLIAMINYKAEGAGRRVIAVNPALYEPALLELRPRRKREPSRAAFQLRRLRLHRACRRERRT

SEQ ID NO: 35669 - protein, 296 aa, unknown; identical to SEQ ID NO: 35668
  TnpB Polypeptide

SEQ ID NO: 35670 - protein, 352 aa, Clostridia sp.
MTKTIKIKLLINKVHASLLKEMSKEYINSVNALVQSMVDLGKSITYSSKDFSANLPSAVKAQCTLDAKSIYTKHKKGVTKTIAVLKKPVCVWNNQNYSIGDGNISFPVWTGKSQRITFKAEITDEQKQLLQGKLGTLRITQKSGKWIAQIAMEIAEKESSGDKAMGVDLGLKVPAVVATEDGKVKFAGNGRQNKYIRRKNKSKRRKLGKAKKLNAIKKLKDKEQRWMKDQDHKISRQIVSFAVQNSISEIKLEKLANIRSTARTSRKNEKNFHTWSFYRLAQYIEYKAHLEGIKVEYVNPAYTSQTCPSCGKHNKAKDRNYKCACGYKAHRDLVGARNIINAPVTDGNSLSA

SEQ ID NO: 35671 - protein, 406 aa, unknown
  TnpB Polypeptide
MEHWDEIAVIKQPLERRGFVERLVHATEARPVVPYDFDAEFYKFPCYLRRGAISEAIGKVSSYQTKLAKWKKQDQKTKGTAPGYPKAGLVFPCLYRKDMYNSTGTYTAEIKVWVRNTWDWISIELRKSDADYTLHHCQYRKECAPTLQKRGKQWHLDFPYEEKVVLNNTKVTKQTIVAVDLGINNAGTCSVMRSDGTVVGRHFLKLPAEYDCLKHKLSHIKRAQKHGSRKVHNLWAYANGVNKDIAAKTAQFIVDTAVLYDADTVVFEYLDLKGKYHGSNKQKLHLWKARAVQNIAKNKLHRLGVRFARVCAWRTSQLAYDGSGKVMRGNKSTKTNGSYSVCEFTTGKVYNCDLNASYNIGARYFIRELLKTVSVTEQQCIEAKVPECAKRSTCTLSTLINLNAVM

SEQ ID NO: 35672 - protein, 327 aa, unknown
  TnpB Polypeptide
VIRSITITYSDSQDWRLREGYVEVRTHRGWIRIGYRNNKQLHRYLYNNWKPSSELKLKLFSGKILVYLTLTKEFEVSYNPDNAVAVDINENNVTLAVFIDRRLHEIYRIETSIGRIVIAYSERRRRITEGRSTRDRVARKALRKLRERERKEDIIYKTAGIIEEIARKYSATAVVGNAHRGKSRIASKASKKNLRHRIHQWCASKLVETLNNKPLYVVEESEAYSSSRDPFSRKPIKRYTPSVIRIALRGGKRVRAIKIQLRLARLSNGLTMDRDMIGAINIGLKYLSSDGSPVALGSTGPHAAWAKLVIPSLGPTPLTELKIFTSI

SEQ ID NO: 35673 - protein, 397 aa, unknown
  TnpB Polypeptide
MQKTYKFRLYPTKENEVLLSQTLEYCRLVYNHLLEKLKKQDKPDRYELQNLLPDLKKQHPELTGVYSKALQYDVYRLFSARKALHELKKQGRKIGRLRFKSANRFKTIHYNQSGFKLTMTGKRLDLLHISKVGEIPIMVHRPVEGTIKQVVVKHYPSGKWFACITVEQKDVVVQRQPIKNAVGLDMGLDEFLTDSDRRTIENPVYLKKSLKRLKQRQRHLSKTAKGSRNRAKRIVRVARLHEHISNQRDDFSHKLSRWYVNNYDLIAVEQLNIGGMISSLDADTTLTKVERRHIRRKIHDVAWYRFHQMLSCKAEWAGKTFMRVDPSYTSQIQKYGSDLDRDYNASLNILERALQQYVGQGLPELTPVDIRPLRELITTPASLVVETGSPFLELRKG

SEQ ID NO: 35674 - protein, 374 aa, unknown
  TnpB Polypeptide
MEYSYKFRIYPNGEQRALIARTFGCSRFVYNHFLNLRKETYETSGETINYVKSSALLTQLKKELTWLKAVDSIPLQESLRDLDSAYQGFFRRVKKGEKPGFPRFKSKRDRRKSYKTKQHVTNGKPTIYVDGKHVRLPKLGLVKCRVSKEVKGRILSATVSQNPSGKYYVALCCADVEIAPLPSTGAVVGLDMGLKSFAITSDGVDYENHRHLCKSQKKLARLQRQLSRKTKGSNRREKARVKVARLHEKVTNQRNDTLHKLSTALVRDYDLISIEDLAPKNMVKNHKLARSISDASWGEFRRQLEYKAAWYGKQVVTVDRFFPSSQFCSVCGAQWPGTKDLSVREWTCPVCGTDHDRDINAAKNILNEGLRLLA

SEQ ID NO: 35675 - protein, 418 aa, Halostella sp.
MGVVTKTLELKLVDPNVHKRQKLRETRDAYHQALRAAFNAGCETQSAANDVVIEYDLSGYAKNALKKYVPQLHNSYDADELHDDHPVRFTNEGLQLDHQPQNAIEWYIKIPHHEDYHLWIPARANPEQREWLEAVYVDDAEMGESRLFERDETWYLHVTATRNVEDESEASSDERTPIGVDIGEASLVTVCHRDEHGSPVRPQLWADDGKAVRRLRKTYSTAKRRLQQRGSERIAESYGESLWDQIDDVFHRVTREVVEYAGSVENPVLVLEDLTYIRENMDCGAYMNRRLHGWGFAKLHAQIRYKAAEKGIPVETVNPRNTSKACHTCGEHGSRPRQATFRCSNDGCWVGEYQADVNGAINIADRYRSGESHHQSDRASRQKAGDDDSATDGASLTGPQDSHADAETQQTTRGTYAS

SEQ ID NO: 35676 - protein, 515 aa, unknown
  TnpB Polypeptide
MARNSTPSFITELSLRITPNQESTILVRLGFARQLYNACLGEALKRLDLMRQSKAYQSAGYIHKDEAHVKERKEAYGEVRKAFHFNEYALHKFAGTLKIGWIGSSVVQTVATRAFKAVDRYAFGKNGRPRFKKQNQFDSVDGKQNTVIRWDEQAKSVTWGGLVMPVILPKEGRKGNDVIQYGLDAPLKYVSVVRRKLNGKNRFYAQLVCEGLPYQKPNNKVGEGRVGLDIGPSTIAVASPDAQTAELKQFANELEPDQKKIRVLQRKLDRQRRANNPQNYEANGTVKKGKKEWNNSKGYEQTRVDLAEINRKLAEYRESLHGRLINHIFSLGNVVNLEKLSYRGFQKMYGRSVGKRAPGKIVSMLKRKAVSAGVSVNEFPTRTTKLSQVCLCGEVKKKPLSERWHICECGVVAQRDLFAAFLAACVEGKQLNADLANSDWRSGMDVCLKVALSEVQPASDGRMPVTFGLSRSQSGSIEKAWKKAGDGRGGVASGTENRQRREPDKACQTPGTSRL

SEQ ID NO: 35677 - protein, 370 aa, Paenibacillus sp.
LILAKKVRIRPTPEQEQKLWRCAGVSRWAYNWTLARQEENYAYGGKFLSDAVLRKELTKLKQTEQYAWLNEVSAQTTKQAVKDACGAYIKMFRGKSGKPKFKCRKRSKPSFYSRYDRFKVNGCLIYLEKIGWVQTSEDLPKHDKYSNPRVSFDGKYWYVTVGIEQGQEKKELLGGVIGIDVGIKDLAVCSNGMVFININKSITVRNAQKRLRRLQRKVSRKYEMNMEGSRFVKTGNIVKVETSIRLLHRRLTNIRTNYIHQATSAIAKTKPCVIVMEELNVSGLMKNRHISKAIAEQKLYEFVRQMKYKCEKIGARFIQASRFFPSSKLCSCCGRIKAELKLSERTYECVCGLRIDRDMNAAINLSKLAV

SEQ ID NO: 35678 - protein, 361 aa, Paenibacillus sp.
MQRTYKFRLYPTKEEQENIHFVLECCRLLYNRLLAERIAAYKQSGRSLTYYEQKATLPERKLYIPALKNVHSQVLQNVVERLDKAYQAFFRRVKNAEKAGYPRFKPESQYNSFTYPQSGFSIEGKQLLLSKIGDVRIRLHRQPQGRIKTCTIIVKNDNYYACFSCEVESQRLPVSEKQIGIDLGVSQLAVTSDGDRIESPKFLRKSEDKLKRKQRAVSKKKHGSNRRRKAVRELAKLHEKVANQRRDYAHKESRKLVNEYGLIAFEDLNIQRMVKNHRLAKSIVDAGWSGLVQFVTYKAESAGRQVVQVNPYNTSQQCSNCGEIVKKSLAVRVHQCSCGYVADRDENAAINILKLALQNVS

SEQ ID NO: 35679 - protein, 394 aa, Gammaproteobacteria sp.
MENRNIRYRLYPKSRDRAELLKQCLGATRFVWNHFLGENREQMQRHREDASQPKPNISFFSLGKEFIQLRNRTDWLRELPCAAIRYTLKYQADAWQQCFHSGKGFPQFKSKWYDQDSVSFPMGSFKITGNSLFLGKIGQVVLSGSNPYPQGEPRLVTITEAGGKFWATVCYTVEVVPKNANGKMVGIDMNVGQYATSTGDIRHVPEVQKLEAKRRRLQRKMARRQGPNRQRGQQPSTRYLVVKSQCAKISRQLANIKSDWQHQESRRLANQYQYVVVEALSVKGMTKSAKGTVAQRGKNVKAKSGLNRSILATGWSGFKLKLAYKSSVIEVAPNYTSQKCNACGYIDKENRKTQAKFTCVACGHSGNADVNAAFNVLALGTQAIGHGGRSQGGT

SEQ ID NO: 35680 - protein, 491 aa, Lentzea sp.
VKADGHGARWATGQDCRCRPLPWRRDGHGDPGIPVRARPNRGTASSPAVALWRAAVRLQLGIVTDQGESRSARRREVLRHPHRSAHASGVVVGVQPAQRLESGQVGSGAVVGENSKEAYSSGLANLATALTNWRDSSNGTRRGPQVRFPRFKGKRTGLSCRFTTGAFGITDDRRHVKLPRIGTVRTHESTRKLARHVERGTARIRSATVSHRSGRWFCSFSVEITRTDPAPARPGKVVGVDLGVKALVALSTGEVIPNPRLLDGALRELRRLRRQAARRTGPNRHTARTPSNRWRKTQGRIARLHARVANTRRDGLHKLTTRLVREFGTIVLEDLNVSGMLRNRCLARHVADVGMRELRRQICYKSVWGAARLVIADRWYPSSKTCSDCGAVKAKLPLRVRVYNCDECGLVLDRDLNAARNLVALVGEAAGSTSAASCAGTVNKPDGNPRQTHAVWAAGTATGRPGHGRANATPQGDGYRAERADVRSRLR

SEQ ID NO: 35681 - protein, 316 aa, unknown
  TnpB Polypeptide
MVCNALKNVCGSYSDLVSKKPFAKNKPIPAINFRPTGSVHYDKRTYSIKGSELSMYTILGRIKVPMVVARFQSDYLASGTPKEAELVCRNNTWYFNLALELENKEIVPVKTLKVLGIDLGENVMAATSSGKLFQGGKVRHDRDCYLSLRRRLQANGSKGAKKRLSMISGRESRYMTHVNHVVSKQLVEEALAHGCNAIAMEDLTHIRDRIKARKRERTRLHRWAWKQLQTFIEYKALAAGLYIIYVNPAYTSKTCSKCSSRGHRLKHLFECFLCASRMHSDVNAALNHERLAMSADIATGDVNHPSVLRLAQSLWL

SEQ ID NO: 35682 - protein, 366 aa, unknown
  TnpB Polypeptide
MSQCADIFNAHVDWALEQHSCNKSKAHDALYLQFRQSNPDVPSALIQAVRDTALEAVKANKYKNCPRKKAYSGLRYDKRTITRRGNQLTLSTLGTRAKTILNVPEYYREIYNTWVFKSATITYKRYDQRIWVQLVFDHATPERCPMNQIQGIDKGLYHLATTSDGQVYSNAKVRSVQRRYLYNRGTLQAKGTRAAKRRLKKMSGREKRFSRNMNHVVTKYLANQESVTIFVLEDLTGIRNQNRGKKMNKWMASWPFYEFDSFLIYKCEALGKLVVFVDPRNTSRKCSRCKHVCKKNRHKSHFHCVKCGFRAHADFNAAINIRDDYILSTMPLATVEQAAVNPPYVSSVMGENPALVTSHQPCAGGH

SEQ ID NO: 35683 - protein, 390 aa, unknown
  TnpB Polypeptide
MILGHKIRLDPTCRQVKLFNRACGVARFTYNWALAEWNKQYDAGQKPSISNLIKQWNKIKGAEFPWVYDSPKGANQRPFTCLRAAFSGFFKKQTKYPKFKKKFVHDSFYVENDKFHFIGDAHVRLPKIGTVKTCEKLRFTGKIMGAVVSRIADRWFIAVQVDVGDYHKPRTGNGIAGTDLGLITAATIAVSDTKTIKIKSPKPLKKALSKLRRINRKFSRQQKGSKRREKTRRRLARLHFRVSNIRRDFTQKLTTRLCRENQVVVIEDLNVKGMLSNHCLARSLNDIGFSEIRRELGYKNPIYDMQLVVADRWFPSSRQCRMCLHVNKNLALRDRIFVCPKCNHTEDRDDQAAYNLRTLGLREIHAQGEAMASSTLDELRTNPYSQMSTI

SEQ ID NO: 35684 - protein, 527 aa, Microcystis sp.
  misc_feature (296)..(507): Xaa can be any naturally occurring amino acid
MEKAYSYRFYPTPEQESLLRRTLGCVRLVYNKALHERTQAWYERQERVGYTETSSMLTDWKKQEELDFLNEVSCVPLQQGLRHLQTAFTNFFAGCTKYPNFKKKHQGGSAEFTKSAFKFKDKQIYLAKCTEPLPIRWSRQIPESCEPSTVTVRLHPSGRWHISIRFDDPTIKPLPVTDKAIGIDLGISSLVITSDGDKVSNPKHFKKHYRRLRKAQKNLSRKQKDSKNREKARIKVAKIHAQITDSRKDHLHKLTTQLVRENQTIVVENLAVKNLVKNPKLSQAISDVSCPPLAPXXXXXXXXXXXXXXXXXXXXXXXXXXXXXXXXXXXXXXXXXXXXXXXXXXXXXXXXXXXXXXXXXXXXXXXXXXXXXXXXXXXXXXXXXXXXXXXXXXXXXXXXXXXXXXXXXXXXXXXXXXXXXXXXXXXXXXXXXXXXXXXXXXXXXXXXXXXXXXXXXXXXXXXXXXXXXXXXXXXXXXXXXXXXXXXXXXXXXXXXXXXXXXXXXXXXTHAKRGINNQSLITRFSISP

SEQ ID NO: 35685 - protein, 174 aa, Chloroflexaceae sp.
VGSTETVGESVPVPTPDVPEMENTIGIDMGLKSFLVDNSGEAIVIPQHYRKAEKRLKRLQRSLSRKKKGSNRRKKAIKRVAKAHLKVANQRKDFHYKTAKKLLSQGKHVAHEKLNIKGLARTRMAKSTHDAGWGQFLQILSIKAERAGLLAIAVNPNGTSQDCSNCGTKVPKKI

SEQ ID NO: 35686 - protein, 278 aa, unknown
  TnpB Polypeptide
LVWFGKQCRLEIVCDDTVNRRYAHIPVEVGVETTKKGNPSKHIVHGERKSIQIASPTGNKVASIDLGINVLASVVLDDGTWLLYRGVRAKEDYFYFEKKIAEVQSLADQAKKLGEYEAYGELARERRRLFKKLRRRFLHLYRALASELVKSLHSLGVSTIYLGYPYGIGQDTGNKFSVNVWSYREIMSAVELKAQEYGIKVYEVVEYNTSKYCAYHSVEVKGQPRGVVTCPEGHRLHSDLNDALNIRKKATGSVVQAVGRPLSFVVDHNRVAPVCKGV

SEQ ID NO: 35687 - protein, 397 aa, Lactobacillus sp.
  misc_feature (218)..(280): Xaa can be any naturally occurring amino acid
MKRMSSLAYHFGIKLCFYPSSKQKKIIKLNCDAQRFVYNSYVGRNRTNYHAKRYLAVRQYQAMPFAFSALNSYEARLAEEVVTNSELLAKPRNIRDTYSFLRVKEIDSLALANAIQNYQKAWNNYRKIGHGIPTFHKKRSDWSYQTNCQYPKQKEAFLDNGTARFIDAKHIKLPKLGIVRIAGFRRLIKERLLNHIPTRIGTVTIKKTADDQFYLSMXXXXXXXXXXXXXXXXXXXXXXXXXXXXXXXXXXXXXXXXXXXXXXXXXXXXXXXXXXXXXXXEELRSRNLLKNHALSQAISDVGWRSFLNMLAYKANLYGKEFKTIDPKYTTQRCHQCGSIMGQNGYKKLTLKDREWTCPICRTHHIRDWNAAVNILEKGLGKWQNPKIKKQPRKAAVR

SEQ ID NO: 35688 - protein, 556 aa, unknown
  TnpB Polypeptide
MVVAAASYDPIMRSITTPFVVATPAGARVQTRLRPSQQDAAVLHMVGEYLGGLAGSDLARRCAVGPGTDGRTGRKRALTAASSSRWAGVITRTSNDQWRRGWRNLLDARSGLHRTIRVIDRRLAVPVDGRSGRTRGYATQKERWAKQQRLHHLQARLVGVESRLGQGRVSVCRGGRRLAKARHHLEDASITEGQWRARWEAERWFLTADGEADKHLGNETIRVDPEAGWLELKLPPPLAQLANRPRGRYRLSCPVRFTHRGDEWAAQVASGPVRYDIDFQPDRGRWYCSASWTRPAPPAGTVQQAVAGGVLAVDLNAGHLACWQVDPDGNPVRAGVDIPLALDGVPASTRDGRLRAAISTLLDLVHQRGCGAIGIEDLDFTDARQTGRETLGRGRGGRRFRRVVAGIPTAQLRDRLAQMAANRGIAVVAMDPGWTSKWGAAYWQRPLQAKYPNRTITRHHAACVVLGRRALGLRARRRPGVPAPHQRMEAAGMLPAGAESYRPGRAHIRVRAGHDPPATRTGGSLELRKTGSGDQARAPVQVAQDRSVPPVSADRR

SEQ ID NO: 35689 - protein, 498 aa, Erysipelotrichaceae sp.
MLLTYQFEIKVNNKLGIILGHLTYAASKLFNVGNYERKEYKSLGFDTMPNWYDQKKRLKDNIWYKSLPSQTSQEILAILDRSWKSYLTLHNKWEKKNKDVPMKGSKNAPQPPYYKKDGYHMNINYLSNGFKVIDDKIRFSIPKKLKEHLNDKYQINDNFFYIKLKRHFDDIKQIEFSYLDKDRYKVYVIYEKDIKKQVEDNKHYISIDIGVKNLLSVYDNNGSSFIVSGHSLLNTNYYFSKKIAYYQSLFDKCYPTHKKGEVTKRVKHLYDMKNKRIKLALHRATKTIVDYCLSHDVSKVIIGDLMGLLETNKEFTNNKEKHRFNQNVRAINFSKIYRHRFNQNIRAINFSKIYRLLDYKLKLVGIELIKVNEAYSSSCSPNSLNVCKEFANKSNRVYRGLFKEYSNVYNADIVGAYNIMRIYRQKNNDNFLMPKVGLSNPSKKYIPVTDQFLNEDCVNWNGKAGNVGISGRNYPTGDELITLINQFMTKMLGNSIAE

SEQ ID NO: 35690 - protein, 409 aa, unknown
  TnpB Polypeptide
MGRTVKIQLHPTPEQAILLSETLAQFTYAFNLVCRYGWDNQERNGVRLHHATYYESKAACPGLVSDILIQARVKATEAVKSALTWKAKKEASHVKKVEKACTQGKSEPRFKPVKCPESVSCPIRYNVHTYTLKWDKQVVRLSTSGGKVTVPFTVPHYSVKYVGNTIATADLLCRNGKWWLHVVISVPEPIVPQDNTVIGIDLGLNRPAVTSNRQFLGSKRWKEIDHRSFRLKRKLQSNGSKSAKRHLKKVSQKQSRFHRDCDHVLSKQIIASTPTGATIVLENLTNIRESSKMGRGKNKKNVENKRKLHSWTFAQLYGFIAYKGQERGIRVEKIDPRHTSQTCSKCGHQARNNRRSQSLFLCRSCGYCLNADLNASVNIRDKHIASLATFDTLLGSGSSSTDLSSQSSD

SEQ ID NO: 35691 - protein, 549 aa, Streptomyces sp.
MATGEKGMGGLRQVGASFVVPGPSGVAVRDRLKDLTAEDERVLRLVGDHLGTLASLDLKERCTAGLEHDSEQWARRKRVLTQVSSSRWAGSITKATHDQWALARRAQLADIRSLEAGVRTIAYRLSLPVGEKGARRAPGGYRSKREWFAKTRRLHMLADRLQAARADWEDGVVHVVRGGKRLLNTRHHLQAAQLTEEQWRTRWQAGRRFLQADGESGKRFGNETIRVTPDGEVSIKLPAPLAHVANAPNGRYVLACRAAFAHRGEQWADRVQANRAVAYRIHEDTSLGRWYLTAAWKTPAVQSVPLSAARTNGLVGVDTNADHLAAWRLDTHGNPVGAPHRFDYDLSGAATHRDAQIRHALIRLLHWAKHHHLAIAIEDLDFTAETTREKHGRRKQFRKLISGMPVARLRARLVSMAAELGITVVAVDPAYTSRWGAQHWQKPLTTNNRTTTRHDAAAVAIGRRALGHPIRRRTAPPPAHRSDEQGHRTVQAGSGIPGREEPRPRVPGPRTRSVRAGREAKAGDQDAQHRSGGPAEHEPWQQGPLPLSL

SEQ ID NO: 35692 - protein, 509 aa, Streptomyces sp.
MVLRLVGAHLGSLASRDLKARCRDGLDHDGEAWAARKRELTPLSSSRWAGAVTKASHDQWALARRCQLAHIHSLEAAVRTIQHRLSLPVGHKGSKGAPGGFRSRWEWHAKTRRLHLLQDRLEREQADREAGIVHVVRGGKRLARTRHHLPAAQLTETQWRQRWEAERWFLQADGESGKRYGNETLRITPDGEVSIKLPAPLKERANAPHGRYVLACRVAFPHRGEEWADRVAANRALAYRIHQDVQRGRWYLTASWQIPVPRTVPLVTALAHGVVGVDTNADHLAAWHLDVHGNPTGQPRHFFFDLSGPASHRDAQVRHALTRLLHWTKRCGVKAIAVEDLDFTAEKTREKHGRKRRFRHLISGMPTGRLRARLTSMADHTGITIIAVDPAYTSKWGAQHWQKPLTSNTRKTTRHDAAAVAIGRRAQGHPIRRRTTPPPAHQSDVQGHRTVQADRRALGREGPRPRIPGPRTRCVPPDTARTRATRTSKTVRDVRSEQVWAQDSLLLTE

SEQ ID NO: 35693 - protein, 414 aa, Streptomyces sp.
VIVKLTVQVRLLPTPEQATALEATLRACNEAATWASGVAFEKDVKRNFALREHTYGEVKARWGLGAQAAQHVIKKTCDAYATLKANLTAGNLGRPGSKRYRKATEKPVVFRPEGAQPYDDRMLSWQIGGQRVSIWTVAGRIKDVAFTASPEQLATLALYRNGESDLVCRDGTWFLLATCEVPEPEPNTDPHDFLGVDLGIVNIATTSDGEIMAGREINRARIRERTLRTKLQKKNTPSAKRRLMRRRRKEARRARDINHKIAKHVVAEAERTGRGIALEDLTGIRERVRLRKPQRATHSSWSFHQLGSFIAYKARQAGVPVVYVDPAYTSRTCAECGHIDQANRVSQPWFACRCCGFVDHADRNGSRNIRARAWELWRRGAQSTAPAPPPRPRDGAGRERSITASGARCASPAL

SEQ ID NO: 35694 - protein, 229 aa, Streptomyces sp.
VQFRLDVIFRRERSRSVHSVIRMQLRYNYRAYPDAAQCRALARAFGCARVVWNDCLRDRTQAHTAGLPYVKSAELSRLRITQAKRTEERAWLADVSAVVPSGRRHGVRGQGRKPQSQVVPAASGRTILSDRHQGQLRPVLPQLRRGHRAGHPARAGDRHRDRPRLVRLRCPVRRAEDRQPALPAPGGEEAFPRRSSATTKRCTWKTSRCPASAAPGSPSPCTTRDGPRS

SEQ ID NO: 35695 - protein, 353 aa, unknown
  TnpB Polypeptide
MKLIATVKLNPTEEQANALLATLERANDACNYISERAWEKQTFNRYKIQQLCYYEVKEQFKLSAQLAIRCIAKVADAYLLDKKIQRVFKQYGSIAYDDRILKYYTDRSRVSIWTLGGREHIPFFCGESQRTLLQTRHGESDLIYRNGNFYLFATADIEEPPPEEVNKYLGIDLGVVNIAVDSDGEIHTAEAIDKVRVCYANLKDSLQRYGSKNAKRKLKKLSGREKRFRKDRNHCISKQLVEKAKDTKRGIALENLNGIRQRTTVKKSQRARHHTWSFSQLRQFVEYKAKRFGVLIVLVNPRNTSKTCAHCGHLDKRNRKSQSHFECTSCGHVAIADVNAAENISALAAVNQP

SEQ ID NO: 35696 - protein, 393 aa, unknown
  TnpB Polypeptide
LKQKAYKVQIYPNKAQEQLLNQTFGCARFVWNKRVESFNNYDKENPVKDKTVKELKSEYPFLSDVPYNALEQKLMDWNQTVKQFFNKKRKVKLGRPKFKKKGYNDSFRLSYSGFSIKNSKFKLAKIGIVKTKGYDLSTIPNLGTCKQVTISKSSSGKYFMSILIAQEIHKKMPTGKVVGIDLGLTDLLTLSSGIKVSNPRWFRESQAELAKAQRHLSRKTKGSKRYHKQRLKVAKIHEKTTNQRKWFYHNLTTWLTSQYDVICLEDLNVSGMSKNKHLSKSIYDAAWSTFISQLRYKCDWYGKELKQVDRFFASSQICSSCGHKDGKKTLDIREWTCSECGTKHDRDLNASINILKECLNLTSEEYSDYSRGDSVNPLEDLHPRVVESVKRLF

SEQ ID NO: 35697 - protein, 397 aa, unknown
  TnpB Polypeptide
MIRLSYKYRLKPSTEQVAVLQEQLRLCRWAYDTLLEHSFSERRAGRGTPTHKALTYLLPAMKARTPELNAVFSQVLQNVAKRVRSGFESYWNRKRAGLRAHLPRFRGEDRYDSLTYPQFGFRVKDGRLRLSKIGDMRVVQHRPIEGQVKILTVTRSRAGKWYAIFTCEVEAKPIRKRLPAVGVDFGLNGLVALSDGTVIEAPQSYRGAEERLGRAQRCLSRKRRGSRNREKARLRVASACEKVANQRRDYAYKTARSIANRYVRVYVEDLKIANMVQNRRLSKSIGDAGWGMLRNALTYMAERSEGVMAFVSPRNTSQLCSGCGALVPKPLSERTHRCPVCGLVLDRDVNAARNILRKGIGMEQPESKPEGEATTTQLSEVEQVASMNQEASLLVGR

SEQ ID NO: 35698 - protein, 418 aa, Calothrix sp.
MQLVERRVIKSNHQVYKQIDEMSFAAKNLYNAATYIVRQSFFALGQSNVPKYESLYHMMKNSLEYKSLPAKVSQQVLKLVAQNWTSFFAAIFEYTKEPYKFTGRPKLPGYLQKDGRYCLVFTEQATSKKQLGQELIKLSEIDYCFETCVKLGKVNKYCQSRIVPKLNHYVLEIVYEVSNVPVLDNNSIAAIDFGVNNLMAITSNVPGFEPVLINGRPLKSINQFYNSKRAAITSSNANKSSNRLKRFTTSRNHKVKDYLHYNSTYVINLLSELGISKLVLGKNKGWKNRINIGAINNQSFVQIPHAQLIDMLTYKGAMKGIQVIIQEESYTSKASFLNNDFIPVYGNKPVDWQPSGKRISRGLYVTNNGIAFNADINGSYNILVKAFPNAFGIGDREVLVTPRKVNLEGHAPTLVIPF

SEQ ID NO: 35699 - protein, 418 aa, Calothrix sp.
MQLVERRVIKSNHQVYKQIDEMCFASKNLYNAATYIMRQAFFSWGQSSVPQYNRLYQIMKDSSEYKALPAKVSQQVLKLVAQNWTSFKAASLEYSLDDSKFTGRPNIPGYLDSYGRYCVIFTSQATSKKQLGQELIKLSEIDYCFETCVKLGSINKYCQSRIVPKLDHYVLEIVYEIPDVTESDNNSIAAIDFGVNNLMAITSNVPGFSPVLINGRPLKSINQFYNSKRAAITSENGNNSSKRLKRFTTYRNHKVRDYLHRASTYVINLLAELGVSKLVLGKNKGWKNGINIGAVNNQNFVQIPHAQLIELLTYKAAMKGIQVIIQEESYTSKASFLDNDFIPTYNSKPVDWVASGKRVKRGLYISQNGIAINADVNGSYNILKKAFPEAFGIRNSEVLVTPRKVNLEGHALKMVTPF

SEQ ID NO: 35700 - protein, 540 aa, Calothrix sp.
VNDMAEKKKKPSFVTEFELIVTSQAEKELDARFKSGRHLYNAVLGEAIIRVQQVPNSEPYQEAKKIKVKSDDDNKLRNELFATARKQLRFSDFELQEFATITAKSAKWIAEKLDSHTIQKIGTRAFKAAERVLFGKARKVRFKSFHAFHSLESKTNASGIRFFGGNDCCIKWGKNLTIPIRFPNKWNEVLEYGYRSPVKYCRILWREINGKRRWYVQLINEGVPYKETPAYKLHNKVNPNTGLVGIDLNVSNVAVVSDDKAGLLPFAENVPTFEQEIKTLQRKMERSRRATNLDNYEPDFEKRVGRNNKRKKGKVKKGSRRWRQSNAYKKYARKKRELERKKAAYSKSKNRGLANKIVRDFGNNIKAEKVSVRAWQRRYGKAISAKSPGFFQSELARKAESAGGKFTTFSTNKTALSQTHLDGTRMKKSLSERVHKDASGFEMQRDLFSAYLSRYVNDNSELNVSQARRDWERTEPFLTQAWSEFKTASTKTSSKSGGVISPAEQNCVKTKQPNQIALNKGKKLGKNGISNNSVVSPESP

SEQ ID NO: 35701 - protein, 451 aa, Calothrix sp.
MAKKKKDRKTIGVQQVLLQPDVETQAILCYLCEQSGKLYNNGVYFARQTFFKTGKLLTGKFDVAFEPSVAKTLIAQSLPSTPMQQTLMSVTEAFKSFKELRSLFKSGQLHFKPQVPNYLTGSKLFKVAYPNSGAQRPTIVDGQLRFSLGLTIRRWFGISDFFLPMPSNLDYSKVKEFTILPKNGAFYLEMSYEIEEKKHELDINQALSIDLGTADNLAACVDTLGNSLLIDARAMKAMNQLWNKKVATRAYDKPQAYWDSWLDRVTRKRNHQMRDGINKAAKLIIDHCLKYGIGTLVIGWNEGFKANANIGRVQNQKFVQMPLGKLKDRLEQLCNLHGIRFQVTEESYTSKASYLDGDSLPVYGNKPLWWKASGKRVQRGLYRTANGLIVNADLNGSANILKKVARNLSLDLSRLGRRCLTTAARIRVWNGSSKNPLPGSLLLAESQCLKT

SEQ ID NO: 35702 - protein, 333 aa, Calothrix sp.
LESANLTLEQKSINKANLAIRSLWCKALSDGTFFNIPRLHRWVRQEYKRGHCRQNRQIVYQGQGYKCKRINRYTVQLSIQSATPRVPIILTVRTNRIITGQIRVIRKDSGNLEIHNLETLMNLDYFKLLNRESSIGVDRGYTEVLATSTGMMLGDGFGKQLTRKTDRITSIGQHKNKLWSLALVKFKDKNPLKAKRIIENNLNNKTELKRRNRDDSYVETIVNTSVKIATQLTDHLIYEDLTSDIPDRRKHMSRRAKNRLHHWQKGTVVERLKVWANRNHTHLTCINCAYSLQVDAATGTLLGSRSGDRAGPLYGGRVAGRPKCGRSDLTSSA

SEQ ID NO: 35703 - protein, 556 aa, Calothrix sp.
MPSKKQTYVKQIHIDTDTGLFLADYATISMSASIFSLKGLLENQKQSELKTALQNKFAINRRQASSIITFIEGEIKSAKESHTRHIKTLEGKIKSLKSSVDAREKKVKKHIEYLQAVTKYNSTKKQGKKAKIPSKYKPQFDEASSRAFGRYSGTYYQSAKKKLHHQKRKLYKMTCQLKYLKTKQLHVNLGNKETIHFVGSKDESNGNQVCQLILGLEKNSLDILKIRVPYALESRYGEYVEVPINLNGYGDKEIRAGWAEGRAITYRITQRKYGVWEAHITVDVYRSITSDSVMLGCIGVDLNIDSVAWCKVNADGNPKRFGEIKFNLHSLSHNQTSCVLASVVTELTTLALAFKCPIVIEELDFDAKKAQLNSGTKHKRYNRMISSFAYNRFYELLSSRCFKLGIKLITVNPAYSSLIGMTKFMSNYGMNSGTAAALVLARRAMNYSEGVPARTAYFDQESKKHVWSHWNRISKRVKGSARHSFFQPRPTASPSLRNGTTSNSALEFGNSVATLTNHPGGLNVPNEQTFASSNFERLECHLETDEGNRTTNRDCA

SEQ ID NO: 35704 - protein, 560 aa, Calothrix sp.
VSKLQVAYKFKLRPKQGQVELLEDWQHKVGYIQNRSLGDRIVSYNNTFVMGDYCDLYTQREISTLNLYCDINLYSINCIPNIVSPLHCSVSKSASFGNIWKEDKPSLRRSKDKEKPFNPKRSTYEMHSNWITEFKQANPEFKNVNADAIQQALRHVDGAFNKFFSGKAGFPNFKQHIDVSFEFKPGTVRIINKYIIFPTLGGMRFFKSREIPPSWEIRTVTISREVDGWYVSVLLRDETVPDLPIKCLEECESIQGVDVGIKKLASLSDGTLISNPQFLKKSERRLRIRQRRVSRKQKGSRKRKKAAIQLSRLHQKIRRQREDYQWKQAKIIGAKADITVFEDLNIKGMKSRCKPKKDEATGKYLKNGQAAKAALNQAISDASWYSLRQKTEHQAQKLGNLIILVHPKNTSITCPECGHTSKSNRDKEKFVCENCSHCDDADVNGAINIAKKARTNLGLDTLQVDSLKVTPKNTKESSFSLGDEPGNPANSTAKQLRCVTVKSVKVKKERVRNKHKSSQPEPPEIGIQRDKFTSLDGDDGELARTDSSESVPILQGSWAR

SEQ ID NO: 35705 - protein, 506 aa, Calothrix sp.
MPKRKATITTEYTVTRVAYSIGDINPELLELASTLGKLRSELWNKYGSLKAWGINKNDIIKEIRNTPHLRKIYGAERFNLSSEIWERTVQSVLDDIHAVQEAAKSQVIRKVYQFFKPEQHQVQKGKKLVWEDIPETSFRHELIKALNSSYSEWYQYPLLSRWIRQYYQRGHTHVNNQIVINATSRAMKGRIEHNTRSITTFLIPSKMVDSKCQWLEIKFKTGRVTPRAGRCRLIFNGSNFELHYPHTTKITVTKQSSVVGLDKGFTEGFYSSDGDVYASGLGEIIKTASQERTDKNKKRHKLFALSRINTEKADRILNNNLGRQKADKKDRVKRQKIKQLIRTDVQKIFNNYGTLVVEDLSKHIKGKKKAKVLNRKLNEWSKGELQKALDEISRRKGAKIVLVNPAYTSQVDSSNGTLLGKRFGNQFFTYSGVVFQADKNAATNIKNRASDSEITRFMKKEEVHKILMSRTAKFLEQLGHTFDEAISMGWLDKKHLCQGEASRRRS

SEQ ID NO: 35706 - protein, 540 aa, Calothrix sp.
MLKQTYVKQIHTDTNSGLFLADYAAISTYASIFSLKGLLENQKLAELNRTLQDRFAINKRQASSIITFIEGEIKSARMSHARHIKILESKVKTLKSSVDVLEKKVKKHLEYLQAVVKYNQTAKQGKKAKIPSKYKPQFDQASSRAFGRDTGTYYQSAKNKLHHQKRKLHQMMCQLKHLKSKQLHVNLGNKETIYFVGSKDESNGNQVCQLIIGLEKDSLDILKIRVPYALEANYGEYVEIPINLNGYGDKEIKQAWASGQSITYRIIQRKYGVWFAQITVDVHKPITSETVMLGCIGVDLNVNSVAWCKVNADGNPKRFGDIKFNLHSLSHHKTEAVIADVITELTTLALAFKCPIVIEELDFDAKKSQLNSGTKHKRYNRMISGFAYRRFYELLFSRCFKLGIKLITVNPAYSSLIGMTKFMSLYGMNSGTAAALVLARRAMNYSEGVPARTAYEGKEPTKHVWSQWNKISKRVKGSARHSFFQPRPTASSSLRNGTTENSFLEFGSSVANGCNNSGGLNYPNEQTFASHNGRAVRVPS

SEQ ID NO: 35707 - protein, 457 aa, Calothrix sp.
MKTTYQYKFYPDTNQKLELNDWLRICRYWYNRQLGERFIWWQNNHLQLQAFPQWKEIFPTLFGNRPNYYSQKLQLPGIKQDLVRVMHSGELLDFKQVDSTVLQDICKRVDEAFVRFVIGDCNGKRSGKPRMKTQASFRTMTFATASDDWIKLIRSEWFYLRLPKLGVVKVRMHRPLPDGFKLNLVSVTKKADGWYMQLTMEDTSVPEFNPDVITPTWENSMGLDAVLQGDDYLATSEGNLFPSLKPLRKNQDKLAKISKKKQKRQRGSKRRRNLAKREARQHQKIARSRKDFQYKTAHKLVRTGKKVFFPEKLNLQGLSKRNAPKQDEDGKYLPNGQSAKSGLNKSWMDAAFGQFFGILAYIAEKAGAVVIPQNPAYTSQVLSYRNEIVFTDTDIREYWDEKEMLKVDRDINASINLKRLGLGIFPRIKRRSGKLIITGIMSESTTKEIIDILKRTQ

SEQ ID NO: 35708 - protein, 518 aa, Calothrix sp.
MSTLKVFDERIYMRTEGGDIYVALKKEKGHFQVNESILATISIKHPEYINTTQVLFNDVVMFYVAVMANDVALLISTSSKDLYVVYELLTIKTKERTSVKFPLLFKDVPSDFRRAAIKKAAGIVKSWNSNKIRWDSKIEKALKSKSVKTQNRLKKKAGKPPTLPTKTNFPAQFYSGMFKSDTGETVLIKLWTGNAWVWLKVDYKCRELPQGYIKGSMSLMMCDQQAVLIWTIQKNTPSKGKLDDQIKASGKIRILSIDLNLDDPIVVGKVLEGYEDTGVVVELANLRLCGNNRLSHLRKRILGKIAKAKALTNTHTELGFLPPKNMCANLWKRIKQLEKEIIETISNSIVKFAQQYLVSVIVFENLKTLKPQKGKYSKRSNTKRSFWVAKKIQKRTTEKALNRFSIYTVKVNPAYTSITDAYHGGKCLRGSQVGALNLYLWTKNGLGKLVLTPENKIYDSGENAAKNIGLKYLVRKFEKPVTLKHPGLSTGCVAWLKKPVDKGTVVIPSWFACTATTK

SEQ ID NO: 35709 - protein, 502 aa, Calothrix sp.
MSTITYVKALPTPLVEMNSLGNTRFEMFLTDLSLLFRQATIKAVDIILSSKNFEKVKAKVNTQLQQEFGLNKRQVNGVIALASSKVDSAIECRKNYIKQLEGKLKSALTWIKNAEKRLSDSQKFYALKNWHKSKTGCKLPLACDLSNCRSNWHALKFQIHNKKRYVYQLEKKITRLKVAPVRVKVSSSEIYIVGSKDESFGNQVCQYDGNKISFRVPYCLEPKFGKYVNTVIGNFDRNTNRLPDYCAKTWHFYRKNNRWVLAVQFTPAPVEKVSKPIQYGAIGIDINPSSIGWAYIDYQGNLIECGTIPLISGLGKNFNTQQLVDACLQLATLATKYACPVVCEELDFSKKKESLREKGRKYARMLSSFAYSKLYQLLESILSNRGISLYKKNPAYTSVIGLVKYARMYGLSSDIAAALVIARRGMNLSEKLPVSTNAYLGVNPRKHVWSGWSKLNTITKNIARVLSRHDYFNVPNWGVVVKDTVEQVAVKRERRAVSKSTL

SEQ ID NO: 35710 - protein, 239 aa, Calothrix sp.
VTESDNNSIAAIDFGVNNLMAITSNVPGFSPVLINGRPLKSINQFYNSKRAAITSENGNNSSKRLKRFTTYRNHKVRDYLHRASTYVINLLAELGVSKLVLGKNKGWKNGINIGAVNNQNFVQIPHAQLIELLTYKAAMKGIQVIIQEESYTSKASFLDNDFIPTYNSKPVDWVASGKRVKRGLYISQNGIAINADVNGSYNILKKAFPEAFGIRNSEVLVTPRKVNLEGHALKMVTPF

SEQ ID NO: 35711 - protein, 430 aa, Calothrix sp.
MGVQQNLIYCDADTKAILTFLCEQSNSLYNCGVYWARQIFFKTGRIISKFDPVYEVGNNVHAIALPSVPAQQTLLSVSEAFKSFKELRSLFFKKELNQKPKAPLYRKSGGMYKVTYSNMGAGRPTLKKSGMLRFPLGNQINRWFKVKEFFLPFPTNLDFKKIKEITILPKNGEFYLECSYEVEPVSVKLDINQALSIDLGTSANLMACVDTLGNSFLVDSRHAKSMNQLYNKRVAKHKAGFPQAYWDSFLDKITRKRNHQMRDMVNKAARMAINHCLAHGLGTIVIGWNEGIKDGADMGKLANQQFVQMPLCKLKERIKQLCEVYGIRTCETEEANTSCASFLDGDSLPEHGKKPVEWKASGKRTKRGLYRTQNGSLINADAQAAANILRKVSMNLGIDLSRISRRCLTTVSRIRIWITKANLVKKNPRP

SEQ ID NO: 35712 - protein, 405 aa, Calothrix sp.
MYALKRELKLNNREISSMRGMAGFRRFVYNFGLEMLKASWSFEGIKASDSVRLNEIKKVFTNHVMTLPEYAWTRNYSSTIYQSAFQDLGEAIARWRQGLAEFPVLAAKKSCDKFTVYKASAVYPKKGEPALPFTNRVVIEPGRKINLPGVGEVRSKEKVDFYYSSQTFTVTRTADKWFVSSNIDAERVPTIFHKVEKVGIDLGVKTFATFSDSSTISAPDSLKKAKTKLSKEQWRNRNKEFGNKILGVRASKNAKKFFNSIARKHAHIANIRRDFLQKITTEISKKYYKIRVEDLNVSGMVANHKLAEAVSSLGLYEFRRMLDYKQSHYGTKLEVVDRWYPSSKTCSLCGHVQDMKLSDRVFNCGACNFSCDRDLNAAINLEKADNHLAKTKQKKSIKKSKKKAG

SEQ ID NO: 35713 - protein, 448 aa, Calothrix sp.
MLKKKKGFSLVQKSLRCKLLRDGFDLLETKRLYNEVVSFYFALINTYPEHVLSDDSEQSGWRAYEILTEPKSNYKLPFNLPSFLKRSAIRKAIGAWESWHTAYQKWLVRSNKMKHHKPPVQPRKFNFSPTYDAGVWKEDVGNSIMLKILVKSQWKWIKFYYQAPEFEHDIEGINGWHKASPTIVIKNASAFVTFSLQKYIPATGGCKKLLTTDSVRVLGVDTDLDRNIAILSVLEIAANDEVIEVARHFIKQTAHTKLRKRNLGQIAIRMKKTGIITSGFCKARWNKLHNREQEAGRTYARIIANFAHSWQCSVIAFEHLSNLKPCRAKYSRRSNQKRAYWLKSRVFKEVNRIAFQDFGILTTRVNPRNTSRLDPWGNELFRVNLHSGETAIRMIHDGKLEPIYQPGADFVINPRNCYSAHSGLNAARNIGLKAILRHRTNAVFALRA

SEQ ID NO: 35714 - protein, 501 aa, Calothrix sp.
MSTITYVKGLPTKESEMNHLGFTDFEMFLNAFSPIFKQAVCETVDAILSSKDFELKLGKFNTHLQKKYGLSKRHANGVITLANGKVDSARECRKNHIKQLEGKLKSANIWLKNALKRLSDSQKFYAKKNWQNSKTGCKIPLSCDLSTGRSNWHAIRFQIHHKKRYIYVLEKKIAHLKTAPIRVKVSSSEIYIVGSKDESFGNQVCQYDGNKICFRVPYCLEERFGKYIETEIGNFDRNINRFPEEGAKTWHFFRKNNRWVVGVQFTPKPVEKVSKPIQYGAIGIDINPDSIGWAYVDACGNLFDCGTIPLLLGLGRNFNQEQLVNACLELSNLATKYASPVVCEELDFSKKKESLREKGRKYARMLSSFAYSKLYQLLESILSNRGISLYKRNAAYTSIIGLVKYSRMYGLSSDIVAALVIARRGMNLSERLPASVSAYLGVNPRKHVWSGWSKLNKLTLTAAIVKSRHDYFSIPNWGMVVKVQVEQVSVKAERRACSKST

SEQ ID NO: 35715 - protein, 539 aa, Calothrix sp.
MAKKEKKPSFVTEFELVVTSQAEKELDARFQSGRHLYNAVLGEAIIRVEQVRSSDPYQEAKKIKVKSDEDKKLRNQLFATARKQSRFSDFELQDFATITAKDAKWIAEKLDSHTIQKIGTRAFKAAERVLFGKARKVRFKSFNAFHSLEGKTNASGIRFFGGTDCCIKWGKNLTLPIRFPDKWNEVLEYGYRSPVKYCRILWREINGKCRWYIQLISDGVPYKETPAYKLHNKVNPNTGLVGIDLNVSVVAVVGDDKAGLFPFADNVPTFEQEIKALQRKMEWSRRATNPTNYEPDFEKKVGRRNKHKKGKVKKGTRRWFNSNAYKKYARKKRELERRKAAYSKSQNRGLANKIVREFGNNIKAEKVSVRAWHRRYGKAISAKSPGFFQSELSRKAESAGGKFTTFSTRKTALSQTHLDGTRIKKSLSERVHKDVSGFEMQRDLFSAYLSRFVNDDSELQATQAQSNWGRTEPFLTQAWREFKTASAKTSSKPGGVISPAEQDCVKAKQPNQIALNKGKKLGKNGVRNNSVVSPLTPSL

SEQ ID NO: 35716 - protein, 527 aa, Calothrix sp.
MKGKSKVSKTQQGKDSTTLNPTPVAIQLELPLFATVESLPQNNVTTLTDKSCTCSPSTQQQKLSETLGQVSTLSAKVCSPYWTSLCAEISSHLSLPVVTDSHGLDSSFFSTWSSKTVDKSWFSTKLYIAQNQNLPKIYSQSFTSFPVECTDLEKFERKSRKTYLYLTKKQKTTIKYWFGVARFVYNQTIELLRDGVIKANWKAIKGDILNGLPDWCKDTPYQIKSIAIKDGCKAVSNAKLKFKKTGEVNRVSFKSRKSPKQSCYIPKSAVSEKGIYHTILGEVKYKETLPYNFGDCRLVCVYDDYYLTLPTESLQLETENQGRVVALDPGIRTFLTFYSESSVGWLGKNANIKIQKLCFKLDELCSVISKTTGQQKRRFKKAANRIRAKIKNLVSELHQKSAKFLVDNFDVILLPTFETSQMAKKGKRRIRSKSVRQMLTLSHYQFKQFIKHKAFEHNKVVLDVNEAYTSKTVSWTGEMIKIGGSKIIKSPSTGQTMDRDLNGARGIFLRALVDTPWLRENLSLIIC

SEQ ID NO: 35717 - protein, 503 aa, Calothrix sp.
MRKQTYVKQIHTNTDTGLFLADYAAISTYASIFSLKGLLSNQKKSELNTTLQKNYVINKRQANSIIAFIEGEIKSARMSHARHIKTLETKIKTLKSSIDALEKKVKKHIEYLQAVAKYNRSTNLGKKAKVSSKYQPQFDEASSRAMQRESGTYYQSAKNKLHHQKRKLHRMVCQLKHLKSKQLYVNLGNKETIYFVGSKDESNGNQVCQLILGLEKYSLDILKIRVPYALESRYGEYVEIPINLNGYGDKEIRAAWACGQAITYRIIQRKYGVWLAHITVDVYRPITSDSVMLGCIGVDLNINSVAWCKVNADGNPKRFGDIKFNLHSLSTNRTEAVLAEVVTELTTLALAFKCPIVIEELDFDGKKARLNNGAKHKRYNRMISGFAYNRFYELLSSRCFKLGIKLITVNPAFSSLIGMTKFMSLYGMNSGTAAALVLARRAMNYSEGVPARAAYEGMEPLMHVWSHWNVLSKRVKGTARHSFFTPRPTASSSLRNGCVEKYP

SEQ ID NO: 35718 - protein, 408 aa, Calothrix sp.
LKIKLYPSKELHRIWKRWLAAYRFYYNQSIAILIKDYDVVTKTIIDKKTGKPKEVKITSDDLDKILLHLENIPEWVKTLPGHQRQEACSEAYDAFKQARSQGGEPKFKSCKATSQTIQFKVGNFKRGTWYCSTTKGLKFSSFQSVPQDCEYGTELVYKRGEWFGCFPQCVEEIPTGSERVIALDPGNRTFLTGYDGENILEIGKGDIGLIQRLCLHLDQLIGKGDKAKSRQKYRIKKAIKRARTRIQNLIKDLHNKAVSLLVNSYKVIFLPTFDSSQMVCKINGKGKKRKINSKSARQMLTLSHYKFEQHLKQAAQRKGVIVVLCNESYTSKSCGSCGHIYEVGSSKTHSCPNCGTKTSRDVNGARNIMLRSLVSLKFSVSDNSIILSDAPQGIVGNDQERHVENVLL

SEQ ID NO: 35719 - protein, 518 aa, Calothrix sp.
VQVRWNFKLKPNIGHVETMERWLVTLRKHRNYALREREIGYSTNNQDVVEEIVYAFGSYCDLESRIEYGACCPLTCPVLKHGVVPEKLSIAFKKTKEKFDIKTGKLLKPSVVKWDDASGIQKKVTTELRGKSPYFGEIYSAVLQGNLERLDDAYTNFFKHGRGYPSYVARLDSFEYKPGQAKIELTNKNYATAYLPGIGNVKFHNSRQKEFGSVADIRSVTVSKESSYWFISIIVEIPDLIQELLPFEKVKSVVGIDVGVNKLIAFSDGSFALNTKPATNKKTARRLAMRQRSIARKVKGSKNRKKAVIKLARTKHKIAASRNGRNWKVANDIVKTADVVVREDLKIKNMVKRAKPKHDGKGGYTHNGASAKSGLNKVILDCGWGDIYNKIAWLALKAGKHVIAVNPKHTSQECPTCGHIDKANREGEKFLCTNCGHTDHADTKASRTIAKKAGLVFPKNEKTLRADCAKVTAVKRTTDGVVSSNHAFGTSGEQLSLFDTTVYHSPDNRITKKYGRTS

SEQ ID NO: 35720 - protein, 578 aa, Calothrix sp.
MGKSLLSELTHRSYSKIKTQSGTRTLQLRVGIEARIDYHPFLDDWGDRYQSIMRTALNALQNGQSENDIEKSFQSRFDIDWAWADSVASDAKGRFDQLTTARALRIKALDDDINAGWKSVASTIELMSQQLANPTLLNMKGFAKRLMGLESKVNRLELKGVEKEELKKATRLHICFGSAKLFNAQYHLEENGYSSHYEWRVDWEKKRGGNFYSVGKGSVSGNNPVAKIFYISDDIFNIVFTVPRYLRGDYGDTVSLEFEVSGQRKHNLLYALESGKPVTVQCFRREHKQDKWYIHLTTYVQDVPTVSSRNNGCIGIDLNAETIDVIYIKRDGNPERCRNAISFPIPTGTTGQKEAQLRDIVCEIIKLAEIYQCPIACENLDFSTKKNQLRHSGSKEYNRILSGFIYDKFRSYLVVRAEKYGILILFKSPFMTSIIGMIKYMGKYGLNSGSSAAMVIARRAMGFREYIPQQWLKTLTAFFRPEDWHDAGFAGGWRRISAWLKKFCIRRPQLFELDIVLRFLLDSLVSESQKKTHGARKPGGRDKSAGRRKGKVNPTVGQVPLEREQARATNIGAVTVAP

SEQ ID NO: 35721 - protein, 514 aa, Calothrix sp.
MPSRKQTYVKQLHIDTNTGLFLADYGAISQGAAVFILKGLLENQKISQLNTTLQKTYAINKRQASSIIAFIEGEIKSASESQASHIKTLEEKIKTLKSSVDLLEKKVKKHIEYFKAVNKYNTTTKQGKKAKISAKYKPQFDDACSVAFGQKIGTHYQGAKNKLHHQKRKLHKMTCQLKYLKSKRLHVNLGNKETIYFVGSKDESNGNQICQLIFGLEKKSLDILKIRVPLALEHRYGKYIEIPINLNGYGDTEIRSAWASGQQAITYRIIQRKYGVWEAHITVDVYRPITSDTVMLGCIGVDLNFNSLAWCKVNADGNPKRFGDIKFNLHSLSHNQTEAVLAGVITQLTTLALAFKCPIVIEDLDFDKKKAQLNNGTLHKRYNRMISGFAYNRFYELLSSRCFKLGIKLITVKPEYSSLIGMTKFMSNYGMNSGCSAALVLARRAMNYSEGVPARTAYFDKESKKHVWSHWNRISKRVKGSARHSFYQPRPTASSSLRNGTTENGVLEFGNSVP

SEQ ID NO: 35722 - protein, 282 aa, Calothrix sp.
MILRKKGGDYNLLTNYVYKLQPNNSQSTEMGRWIDMLRSHYNWCLNDRISQYNQQFIQGEYCDIRTKATASPITCFVSKSGASGEPWKEDKLFEETLQSAQGEYCLLPVDLKNPRRGAGDIQITALPQLKKARPWYANIDSTVLQQNVKRLDTAYENFFNGQGFPQFKNRSNFTSFTYQMGVKVDGNKIYLPKLGWMRFHNSRPIPPGFVVKAATVRKRSCGWYISIRIEDKTVPGYILKPLPEVNKVIGCDLGIVKLVHLSDGHQIDNPMVFKSWSACDSA

SEQ ID NO: 35723 - protein, 336 aa, Calothrix sp.
MPGVGIIRFPIYQSAFQALGEAVARWRKGLAEFPVLATKKKGDSFTVYKANAVYPKKGESALPFTNRVVIEPGRKINLPGIGMVRSKEKVDFYYSSQTFTVTRTADKWFVSSNIDALRVPPIIHKVEKVGIDLGVKTFATLSDNSTITAPPELKKAKTKLSKEQWRNRNKQFGNRKQGVRASENAKKFFDSVASKHAHIANIRRDFLQKTTTEISLKYYKIRVEDLNVSGMVANHKLAEAVSSLGLYEFRRMLDYKQSHYGTKLEVMDRWYPSSKTCSVCGYVQDMKLSDRVFNCGACNFSIDRDLNAAINLEKADNHLAKPKVKKSIKKSKKKAS

SEQ ID NO: 35724 - protein, 463 aa, Calothrix sp.
MGKSLLSELTHRSYSKAKNSDGTRTPQLRIGVEARIDYHPFLSDWGDRYQSMMRTALNALQNGQSENDIEKTFQGKFDIDWAWADSIATDAKGTFDQLTEARALRIKALDDDVKAGWKSVASTIELMEQQLANPTQKNMKGFAKRLMGLESKISRLERKQVEKEELEKAKRLHICFGGAKLFNAQYHLESNGYSSHDEWHVDWEKKRGGNFYSVGKGSVSGNNPVAKIFYISDDIFSVTFTVPRYLRGDYGDTVRLEFEVSGQRKHNLLYALEFGKPVTVQCFRREHKDDQWYIHLTTYVQDVPTISSINNGCIGIDLNAETIDVIYIKRDGNPERSRNAISFPIPIGTTGQKEAKLRDIVCEIVKLAEIYQCPIACENLDFSTKKNQLRHSGNEEYNRMLTGFIYDKFRSYLVVRAEKYGILILFKSRFMTSVIGLVKYMQKYGLNSGSSAAMVIARRAKII

SEQ ID NO: 35725 - protein, 374 aa, Calothrix sp.
VIEICCILGVIMTFKSKEKKEQDKEKNKNTYVSTVVQHLKLSSLGYAVVSDILEHANSLYNTLTYNLRQGFFVYNTLNFQSIAYDLQTDFKENYHYKMLQSQAAQSVCHKVAENFKSFKQLLDKHYIDGSKKPKLPGYRIPGGMFEVTYPASSVKIGVEHGIRFASVSTGLLFKKRHKEDVVGTHLNEYIKFRVPDAVDITTLVELTITSKHGEIYLHWVCRKIQETVATLDKSNVLGIDIGLNNFVTCIPNTGEQGFIINGRPLKAINRFYNKTVSKLKKGKDENFWSGSLARATQTRNNQVRDFLKKSARTIINKCLDSGIGKIVFGWNEGIKNEIDNGRVNNQNFVQVPFTTLRDTLKYLCERYGARICSC

SEQ ID NO: 35726 - protein, 485 aa, Calothrix sp.
MALKKQKGHFQINESILATAQTATPEQVKLTQGLFNDSVMFYVSKMSSNLELFLKTSSDALYSIYEKLIYSDPILNATRIPQDLRRAAIKKAAGVVKSWHTNFSRWKKRIENAQRCHTLKKRTRLKKKAGKPPVLPEKTNFPIQVYSGMFKNDTGDSLVVKLWTGKTWQYQKVSYQCRELPLDYVKGTFSLIYDENQLKLVWVIQKNTPSKGKLVDQIKASGKLRILSIDLNLDDPIVVGKVLEGYEDTDVVVELANLRIKGNNRLHHLRKRYLGRIAKAKSLTNTRTELGVLPPDNLCAKLWKRIKSLEKELIETISHTIAEIANYHNCNVIVFENLKSLKPQRGKYSHRSNTKRSFWVAKKIQKRVEQKALNRYSIYTVRVNPKYTSITDSRSGGKCLRGSQVGSLNLYLWKDSGLGKLVLTPDGKIFCSGENAARNIGLKYLAAKFEKPVVFKNAGLPTGCVVWLLCPAGKGNVVIPAWSFA

SEQ ID NO: 35727 - protein, 336 aa, Calothrix sp.
MLGLEIIRFPIYQSAFQDLSEAVARWRQGLAKFPVLATKKSCDKFTVYKASAVYPKKGEPALPFTNRMVVEPGKKINLPGIGIVRSIEKVDFYYSSQTFTVTRTADKWFVASNIDADRVPPIIHKVEKVGIDLGVKTFATLSDNSTITAPPELKKAKTKLSKEQWRNRNKQFGNRKQGVRASKNAKKFFNSVARKHATVANIRKDFLQKTTTSISKRYYKIRVEDLNVSGMVANHKLAEAISSLGLYEFRRMLDYKQSHYGTKLEVVDRWYPSSKTCSVCGHVQDMKLSDRVFNCGTCNFSIDRDLNAAINLVSADNHLAKLKEKKTIKRSGKKSA

SEQ ID NO: 35728 - protein, 382 aa, Calothrix sp.
MPSVPAQQTLLSVSEAFKSFKELRSLFFKKELNQKPKAPLYRKSGGMYKVTYSNMGAGKPTLLENGLLRFPLGNQINRWFKVKEFFLPFPTNLDFKKIKEITILPKNGEFYLECNYEVEPVSVKLDINQALSIDLGTSANLMACVDTCGNSFLVDSRHAKSMNQLYNKRVAKHKEGKPLIYWDNFLDKITRKRNHQMRDMVNKAARMAINHCLTHGLGTIVVGWNEGIKDGADMGKKSNQQFVQMPLCKLKERIKQLCEVYGIRYVETEEANTSCASYLDGDSLPEHGKKPSMWKASGKRTKRGLYRTQNGSLINADVQAAANILRKVSMNLSIDLSRISRRCLTTVSRIRIWEPVRCGGFPRCSNWRATKSFSTKKNPRPL

SEQ ID NO: 35729 - protein, 411 aa, Calothrix sp.
MYALKRELKLNNKETSLMLANAGFRRFVYNFGLEMLKASWGFEDVKASDRDRISEIKKVFTNNVMTLPEYAWTKNYPSTIYQSAFQDLGEAISRWRKGLTEFPVLATKKKGDKFTLYRTSGTYLKKGEPALPFTNRVVIEPGIKINLPGIGVVRSKQKVDFYYSSQTFTVTRTADKWFVSSNIDADRVTPIIHKVEKVGIDLGVKTFATLSDNSTIEAPLSLKKAKTKLSKEQWQNRNKQFGNRSKGIRASKNAKKFFDSIARKHARIANIRRDFLQKTTTEISKKYYKIRVEDLNVSGMVANHKLAEAVSSLGLYEFRRMLDYKQSHYGTKLEVVDRWYPSSKTCSRCGHVQDMKLSDRVFNCGACNFIIDRDLNAAINLERADNHLAHPLQKKSIKRSRKKKGARINKI

SEQ ID NO: 35730 - protein, 268 aa, unknown
  TnpB Polypeptide
MKIPFNVPQYGKYAIGYPPASADLMFRKHKFYLHVVVTLPDVEFVSNGKAIGVDLGVTRPAVSSDNKFHGNRHMKEVVKRIFRLRRDLQANGSKSAKRHLRCLAGREQRFRRDCDHVISSSIVKDIDAGTTIVLENLTNIRNRVKVYHGEANRRLHSWSFRQLRSFLEYKAEARGCQVVLIDPRKTSQRCFRCGFTSRGNRRSQSEFLWRKCGFHLNADLQASRNIRDKYLVGWSISPSDALVSTSVSSRSLPAGKGRDKLTALAVSG

SEQ ID NO: 35731 - protein, 402 aa, Escherichia sp.
VKRLQAFKFQLRPGGQQECEMRRFAGACRFVFNRALARQNENHEAGNKYIPYGKMASWLVEWKNATETQWLKDSPSQPLQQSLKDLERAYKNFFRKRAAFPRFKKRGQNDAFRYPQGVKLDQENSRIFLPKLGWMRYRNSRQVTGVVKNVTVSQSCGKWYISIQTESEVSTPVHPSASMIGLDAGVAKLATLSDGTVFGPVNSFQKNQKTLARLHRQLSRKVKFSNNWQKQKRKIQRLHSRIANIRRDYLHKVTTTVSKNHAMIVIEDLKVSNMSKSAAGTVSQPGRNVRAKSGLNRSILDQGWYEMRRQLEYKQLWSGGQVLAVPPAYTSQRCACCGHTAKENRLSQSQFRCQVCGYTANADVNGARNILAAGHAVLACGEMVQSGRSLKQEPTEMIQATA

SEQ ID NO: 35732 - protein, 449 aa, Caldanaerobacter sp.
MRFAYKRLLEGYDRKTLKRDLQKPFDLNSRYVHDAIMKAKGVLESSRQLDNNPKKVIFGGRDLFGKLQKRHINGKAYEKLKIRWQEKRKGNLYSRGDKSKKGNLNTRIEVEKNGTFLRINVGERKYVYAKIEAGYKKNKRREEFLQEIGESNIPYSVELKLKNGSIYAYFAIEEEYPEIKITKEKGVIGIDINAYPDNISWTEVDEKGNLISYGNMPMPELASGSKDKKEYFRWQYAHEIVKIAKEKGKAIVIEGLEIKEKGKRGDFSGRKSRRIRHRFSYKSLLSKIKILAKREGIEVIEVDPSYTSIIGMLKYSPQYMITKDIAAAYVIARRGLGLQEEIPDNYMKFLNALTVEELEELKEHVKKTVRNKHIKKKHLREINKAIEILQSLESKPGRVLEPLDGTSFSTYDFWRVLKVAVVTPLSPEKVPRDFSTLKGLLIQGKWRDP

SEQ ID NO: 35733 - protein, 498 aa, Caldanaerobacter sp.
VASFAARIYGKGVKSMIVIQAKLIFLNQEDKQIVLDLMRRWSSCMRYAYKRLLEGHDRKTLKRDLQEPFELNSRYVDDAIMKAGSVLESSKELGNNPKKVIFGGRDLFKKLQNRHINGKEYQKLKTKWQERRKGNLYSRGDKSKKGNLNTRIEVRKNGTFLRINVWERKYVYARIEAGYKKNKSRKNKSRGELLQEIAESNIPYSVELKLKNGNIYAYFAIEEEYPEIKITKEKGVIGIDINAYPDNISWAEVDEKGNLISYGSIPMPELTSGSKDKKEYYRWQYAHEIVKIAKEKGKAIVIEGLEIKDKGKRGDFSGRKSRRIRHSFSYKSLLSKIKTLAKREGIEVIEVNPSYTSIIGMLKYAPQYMITKDVAAAYVIARRGLGLQEEIPDNYMKFLNALTVEELEELKDHVKKTVKNIHLKKKHMKEINKVIKLIQSLESESERVLKPLYGTSFSTYNFWRVLKVAVVTPLSPEKILRDFSTLKGLLIQGKWRDP

SEQ ID NO: 35734 - protein, 362 aa, Paenibacillus sp.
MLVKKAFKYRIYPNDEQQLLIQKTLGCCRFVFNHFLEQWNTTYAETGKGLSYSKCAKQLPVLKTSLEWLEEVDSTALQTAARHLADSFNRFFKKKSRAPRFKSRRNPVQSYTAKHTNGNIAIRGHEIKLPKLGWMRFANSRACEGRIISATIRRNASGKYFVSILCEVEQEPLPAAHKHIGIDLGLKEFAVCSDGLRVESPKAFRRYEKKLAFWQRRMSRRTKGGSNWHKAKMNVARIYEKIANIRQNFLQQLTTKLIRENQTISIESLDVVNMLKNTKLAKSIADSSWGEFERQLTYKAKWYGRTLKFADTFAPTSQTCHVCGYVNPKIKLLSIREWSCPSCKTSHDRDDNAAQNIKRVAI

SEQ ID NO: 35735 - protein, 351 aa, unknown
  TnpB Polypeptide
MIRRVQFTLKHANQSKITVLDGIFEESMRVVNLYIDKLWAGKNFSAKFVDFKVDTWLSARLQQCLGKQALEVVKSQRKRKKKTKPVFRRPTLNLDSRFVTVSFDINSFDTWITLSSLGKKIKLKLPSRKHKHYHTLCSNGYLLKKSCRLRCVDGKYYVDLYMEKPAPPLVKGGTAVGFDCGYKRLLVDSKGALHDVGLEPVYKKIARKRQGSKAFKRSLTERDNLINRTVNSIDLVGVKTVVVEDLKNVKKNSKGKRYKSFNNKLQRWSYPKVLDKLASVCEAAGIAFIKVAPAYTSQTCSQCGHVAKESRNGTSFCCVACGYCIDADYNAAVNIRSLGVYSPHATLTVPQ

SEQ ID NO: 35736 - protein, 452 aa, unknown
  TnpB Polypeptide
MKRTNVVKLIVDKDAHGLLKELGVATAKCWNEVNWLRMQQYKNGERVDFAASEKKVYEKYKHVLKVNAQQVARKNAESWRTFFSLIKEKKEGKLPKWFKPKPPGYWKDEDGNYKLIVIVRNDRYEVDEENRTIHLKDFKLALKFKGKLRWRGKQGRLEIIYNEARRSWYAHIPVEVQSNAKPEGSLRASVDLGIVNLATVYVEDGSWYVFKGGSVLSQYKYYSRRIAVAQKTLATHKQKRSRHLKLLYEKRRRFLKHALNSMVRKIMEGLKEKGVGEVVVGYPKEISKDNGNKFTVNFWNYGYIIKRFEEIGEELGMKVIKVDESYTSKYCSLCGEAHEGGRIERGLFKCPHIGEVINADLNGAANILHIPESPGAGSRGQLLVRDRGKGLKAQPAVYRWTNKAGWVNPTSYNVMRMKAVNRKPVIRPEGTLALQDREEVSLTGSGDRKASR

SEQ ID NO: 35737 - protein, 415 aa, unknown
  TnpB Polypeptide
MLKAIKIRLYPNKTQQRYINQLLGCSRLVYNKCLDKKKTAYLTDKSNLTLTHLGKYFHNELTKSEEYSFLTEHNTKVLKQSILNMLDSYKRFFINGSGFPKFKSKHDNKQSCRFPDEAISNKNDYQSNRITLTKQIKDIKFKTSDNYKNYLTKHKDNIKSATLTRTKSGNYFLSILVDGDINKILPKPKNNIIGVDLGIKDFVITSKGDRFENIKIKRNNQKKLTKLNRQLSKKVNGSKNKNKSRIKLAKFNEKLNNQKENYLHQVTNQLLDENQVIAMENLSVKNIMKNHNLARSIQELSLNQFKNILIYKADWHDRYVVEIDRWFPSSKLCNVCGYKKNDLTLKDRSWRCPECQTNHDRDLNAALNIEKEGIRILISDKIIKIGSRSTEFTLEDNHNIDWLRQEEKSKKHSFS

SEQ ID NO: 35738 - protein, 367 aa, Eubacterium sp.
ILVAYKYRLYPNKEQKEYFTKCFGCVRFIYNRMLSDKIEYYKETKKKLNNTPAQYKKEFEWLKEVDSLALANAQMNLQTAYNNFFKRPEAGFPKFKSKKNHNHSYTTNNQGGNIYVSDRYIKLPKIGLVRVKKHRDFEGLIKSVTVSQNPSGKYYVSVLVNQDEKGKLPISNNEIGIDLGIKEFCITSDGEMIENPKYLRKSEKKLRKLQKDLSRCKKGSNNREKCRIKVAKQHEKIANQRKDFLHKLSTRIIRENQTIVLEDLRVKNMMSNHKLAKSIADVSWSEFVRQLEYKAEWYGREVIKIDTWYPSSQICSNCGHKDGKKALSIREWTCPICGIHHERDINAAINILNEGLRMRTAGTVEIA

SEQ ID NO: 35739 - protein, 367 aa, Eubacterium sp.
IIKAYKIRCYPTDEQKQLIIKTFGCCRWYWNQALHDNIKYYEKNKKGKINTPAFYKKEFLWLKEVDATALCFTQMDLQSAFSKFFKEKNFGYPKYKSKKYPKNSYKTMQTSGYPVTENDIKITKLGRVKIINHRHKSGIAKSCTISMTPTGEFYIAILWKDEELLKKLEPINKEVGIDLGLKDLAICSDGEKFPVLQSLRNELPKLKREQRKLSKMKRGSKNYNRQKIKIAKLHQHIANQRKDYLHKISYKLTNENQVIALEDLNVKGLMKNHHLALSISDVGWIEFVNMLEYKALDKGRTVQKIDRWFPSSQICSCCGCVTGKKPLWIREWTCLECGTAHDRDINAAKNILTEGKRILGASSCPGR

SEQ ID NO: 35740 - protein, 509 aa, unknown
  TnpB Polypeptide
VKYYDTVTRHRFTTKNGVDAKQVERDLAQMVAWMAEAEQEVLANQEFHDLALKALRGDRPTGSLNSWGRKRLSRYEFSFQKHNMNEMLVSNVVGALELYAMSVGLFQVMSTHPKETKPDRILSHYRGTYPDAPQLANGMIRSHLRRYHVKGERKASLPGVNAKLNLAVCDTYFAPKVFRDEKDPLNVIVQVKTPSYGLTRLYFRLPDNELRFSEGKVCRPTIRLNNKGRIVFDIAIEHEINTRQTKNVVGVDLGKVESFIATVIDPRTKYKSAPYHANHKRRLGSLVKSERKRRDLASYLYRRAEVCDRYDRNQHAQVLRTEAKRVSAKVTRIKHEISQCIASQVVGIAEKSDAHLSLENLSWLDSQGGRWPHAEIQRRIENTAKRYGLKVTKVSARDTSRTCSRCGGRVSNNSKSRVGTCSVCGFSLNRDVSASREIGLRAVSTARNRERMRSLLRQRREKRSSAAIRQSKPVTALGGIQGHTGTSNNRLEATLMMVRENLDSRESPT

SEQ ID NO: 35741 - protein, 383 aa, Deltaproteobacteria sp.
MKITRASKTTINFATKKKREILNEIMDEYAIVVNFFIDYLWEHPEIESKNQIIADIYNLSNSWFTARMKQCAAREALSMVLGAKNNKNRRKSPSEIEVEELLGEEIFNEPIKPKHYGKRMVLSSQVVRIETGRNSFDLWLVLYSIGNGIKLYIPLKKHRQMNQWFSMDRMSNSVTLYRECVQFSFEIDIKEKKTEGILVGMDAGINHLIATSDKEFLGNEIKPLIAKIKKKLQGSKAYKRAKKTLSYYLHKIIKDYFKNNGNLRIVVVEKLKDLKIGKRNRSKEFRKTLSNWNYMELLDIIQMRCEENRVSFRSVSPYKTSQRCPSCSHTERENRKGEEFKCLKCGFLEQADYVGSLNILWRFLTGRYGAGFKTDQILLNTIG

SEQ ID NO: 35742 - protein, 413 aa, unknown
  TnpB Polypeptide
MNMKETRTIRIQLNTTPEQAALLMQTMHEYTNCFNEVCSLADMKRLYNGVELHKATYLSHRLSTHLPSQLICAARVKATEAVKSVLTRRKKQQTTYQQKLKVAAKKGFTPKPLKLAKTPHSALCAIRYDARSFKFDRVARTASLVHVQQEGKVRNRTVMSVRVPAYYEQYLTPEWEQESADLLYRKGCFWLHLVVSAPIPVVEATGKVIGIDLGMSRLAVTSQPRFFGGKQVKEINNRSFRLRRDLQTKGTKSAKRHLKKLSGRVARFQSNTNHLVAKQLVSSVQAGDTLVMENLTDIRERTVQRRDKRQQRREHANWSFVQLQSFVSYKAAWKGVTVEFVDPRYTSQGCSKCGFVSRANRQSQSEFSCRQCGYQNNADYNASLNIRNKHLASRAKRATSGSLSTDLSSQSSD

SEQ ID NO: 35743 - protein, 417 aa, unknown
  TnpB Polypeptide
MTTVVRSYKTELDLSNEQITACLKHAGCARFAYNWGLAQCEDAYRTTKKFLTSKELHRRLNALKATDYPWMYDVSKCAAQEALRDLEQAYKNAFRRCKLKKEGKWKGKVGFPVFKKRSKAIGSFTLTGSLHVFEKAIQLPRLGTLRLKEKDYLPPGVHVMSACVSERAGRWYVSVQVKEEQQKKVNTARAEIGVDLGIKTLATLSDGTTFDNPRALKQHLKPLRRAEREKSRRKKGGKNRAKSRQKIARLHARIAHIRENATHHLTSSLCKNHALVAIETLAPSNMLKNRKLAQAVAESSFGEIKRQLLYKSEREQCHLVLVDRWYPSSKTCSSCGARRDDLTLGERTFVCLECGYVTDRDYNAAKNILLEAHRTTVSSTGSHAYGHGSSGSHGSVSETILDEVGTIQQVGMSYLSK

SEQ ID NO: 35744 - protein, 405 aa, Paenibacillus sp.
MKFFGVQKEKLRELTQKEFTALRTLFRLSKNMFNVGLYTVRQHFFETEQYLPYKENYHHCKWNENYKLMGSAAAQQTLKKVDEAFKSFFGLLKTPGQAPRIPKYLDKESFFELSFPQFRMQKDGTFDLPMSPAFKREFGKVTIPFPKNLRPESVCEIRLIPKYDARYIEIEYVYEIEAQKYELNPDHALAIDLGIDNLAACITTLGTSFIIDGKRLKSYNQWYNKENARLQSIKDKQGIKELTYNQVQLVVKRNNRSRDYLNKAARYIVDYCLSNQIGKIVVGHNEGWKHECDMGRLNNQTFVQIPHSQLIKTIKNLCTRYGIEFVKQEEAYTSKASFIDHDLIQNMQTYSGKRIKRGLYQTLQGLFVNADVNAAANILRKSNHKAYQGEVARGILTFPSRIQLV

SEQ ID NO: 35745 - protein, 353 aa, unknown
  TnpB Polypeptide
MESVKTIRVRIKDKHAKVLRMLANEVNFVWNYCNELSLKHTQRTGKFMSGYDLQKYTAGAGKEGLNLNSASVQMVCHEFATKRKQFKKLKLRWRKSKGSHRSLGWIPFRSDCISYKGGQLRFSGLKFNVWDSYGLSEYEFGTGTFSEDSRGRWYLNATVKVLTKPNQATKSVGIDLGLKECAVTSDNQRLVGREYRKLEQRLGKAQRANKKLEVKNMHAKIKNRRKDAMHKFSTMLTQEYGAIFVGNVSSKGLIQTKMAKSTLDAGWSSLKTMLEYKSAYAGVVFEEVNEAYTTQTCSCCKSINSNSPKGRAGLRIREWICSDCGSVNDRDLNAARNILALGHERLAVGIPGL

SEQ ID NO: 35746 - protein, 389 aa, unknown
  TnpB Polypeptide
MAIAHKVYRFRMEPTIAQVRSLVRQAGARRWVWNWALARRRTHYQATQTSLSCKDLSADLTALKRCPETVWLQGVDSQLLQQALHDLPAAFSRFFAKAARFPRFKSRKRDRLRFRIPQRVQLKGSRVSVPKVGWIRLRQSQPVPEPTRSATFARDAVGQWFVTLTVEHEVPDPSVVSPATVVEIDLGLTSVAVLSDGTTIPAPRCFRTAERVLAKAQRTVSRRKLGSARRRQAKQHVARVHRRIVRQRQDFLHKLTTRVVHAYAACCIEDLSVTGLAKTKLAKSVLDAALGEFRRQLTYKARWAGKHLLVADRFFPSSKRCHACGALNADLPLKDRAWVCAACGTRHDRDRNAAINLRDEGLRLLAVGHTDSENAQGDCVSPGTPGNGR

SEQ ID NO: 35747 - protein, 414 aa, unknown
  TnpB Polypeptide
MKRTNTIELKPTKQQRRILKDILVRSSAMWNLGNYKKRQAFFKKSSIPSSYKLAEILKTHPLYKVLGSAYAQQILNKLQEAWNSFFGLLKSKKVEGKVGLPRYFKNRRVNQTTPGLLVCRNDCYRIDNRYVYISCPKDLKQIYGIKGLLRVKYNGVLKWRGKQKRMELKYIPCIKKFYAYQVVEPERTPIENNSSHITSGDIGIKRYLVNYIKNTKDFVVLYPSEHVFQEYMKLSKKIYDLQGIAKKENGRYSTKRIKRLFLRRKRKLTNYMNNIIADLVRQLKNNQVSRYVVGDLSHIRDAELPIYFKNKKKLNTMIQNFWSFDLLISKLKNKCEEFGIEFAQINERGTSSTCPVCGKKVKPNDRTFKCKKCGYAQDRDVVGSIQILNKYIQDNNMNLRVENHPIVSSVLIEH

SEQ ID NO: 35748 - protein, 375 aa, unknown
  TnpB Polypeptide
MYKAFKFRMYPTIEQEKIINMNLDNKRFIYNYYLDKAKNSNQVNTKQNIYDYNKKLKLSNQFLQTLDMNIVYKALYSIEETYKKINNLETMKFKSKYNRNSYTVLFNKNINNPNIILDLKRRTITLPNLENVKIKGYKKLKEIKGRIINATISKEPTVNYYVSVSYEIQNVNAITNPKNIVGIDLGIKELLTLSDGTTIDNIHAQEKFEKRIKRKQKELSRKIKGSKNYYKCKKELAILYNKLTNLRKSYIHKITKDITNEYDIITCEKLKTEEMIIKGKNSNLSSKLIDTTFAEILRQLSYKAKFKGKRFYQINSYYPSSQVCSRCDNQDKTYKDLSKREYICKKCGQALDRDLNASINIMFEGLKLYMKNYAK

SEQ ID NO: 35749 - protein, 407 aa, unknown
  TnpB Polypeptide
MGMIRRQAYRYELLPNGDQRRRMRRFAGSCRFVFNKALALQKERYEHDEKKLGYAGLCKRLTEWRNSGDTAWLADAPVHPLQQSLKDLERAYGNFFARRAGFPRFRKKGREDGFRYPDPKQIHLDQANGRIFLPKLGWLRYRNSREALGTVRNVTVRCSGGKWYASVQTVREVEPPLHPSDSMVGVDMGIVRFATLSDGTVVEPLHSFRKHQQRLARDQRAMSRKAKFSNNWKKAKAKVQKIHALIANARRDYLHKVTTTISQNHAIVCIEDLTVRNMSKSAAGSSEKPGRNVRAKTGLNRCILNQGWFEFRRQLEYKQAWRGGLVIAVPPGNTSRRCPACRQVSADNRRTQVRFACVECGFEENADLVGAVNILAAGHAVIACGEPVQSGRSAKQEPTEATQAVST

SEQ ID NO: 35750 - protein, 368 aa, unknown
  TnpB Polypeptide
MNKTLIRTISIKLDRGEHEATLHATQQAFNAAASWIATVCWQEHITNTNTAHHRVYGETRRRFGLGAQLAVCARAKAVESIKATKTQQSETCPQFGERGSLRYDARTYRLLSLDRVSLNTLQGRIVCRLILGTRQHEMLVDSTWKIGGADLVWRRGIYYLNVTQCKEAPDLTETNETLGIDLGMVKLATDSTGESFSGIKVHEVRLRYQKRRQILQSVGTRSAKRRLKKMSGREKRFQKNTNHGISKTLVQKAVHTRKALALEDLTGIRARVTVRRANRSERHSWAFYQLRIFLAYKAAWAGVPLRFVDPRNTSRTCSQCGHCEKANRHSQSSFTCQQCGFCLNADYNAAINISRAVVKQPLVAARQG

SEQ ID NO: 35751 - protein, 374 aa, Polynucleobacter sp.
MKKTQQTNIRVLRERVKDKHCTLLNNLSKDVNLVWNYCNELSSKHTERTGQFISSYTMDRYTAGATKEGLNIPASTVQAISSEYCTRRKQFKKRRLAWRKSGGSKRSLGWIPFKKDSIHYRNGQIFFQKKPISIFKSYDLQDKVIKCGSFSQDARGRWYVNLTVEVQICTNNSSPRAVGIDLGLKTTAVTSDGIQMVSQRYRELEKKLAVAQRANKNKLAKTISAKIKNRRSNDQHQFSRLLANKYGAIFVGNIPSSKLIKTKMAKSVYDAGWSQFKTMLEYKCHEAGVVFLEVNESNTTQTCSSCGEKPPSRPKGIAGLGIRQWTCDCCGVIHDRDINASKNILRIGLDTLVVGASKLKQEGFKEPPCFSYGE

SEQ ID NO: 35752 - protein, 407 aa, Metallosphaera sp.
VKLRVKVNYATYSALKEVEKEYREVLEEAVNYGLAKNTTSFTRIKAGIYKTEREKHRDLPSHYIYTACEDASERLDSFNKLKKRGRSYTDRPSVRRVTVHLDDHLWKFSLSVISIATKRGRVFISPIFPKIFWRYYNDNWLIASEARFKLLKGNVVEFFIVFKKDVKSYDPRGFIPVDLNEGSVSVLINGKPILLETNTRMITLGYEYKRRSITNGRSTKDREVRRKLRKLRERDKKLDVRRKFAKLIVKEAFGSRSAIVLEDLPKRVPEHMVKGVKDKQLRLRIYRSAFSSMKNAIVEKAREFGVPVILVDPSYTSSICLVHGSKIIYQPDGGSAPRVGVCGKGGERWHRDVVALYNLRKRAGDVSPVPLGSKESHDPPVVKAGRWLRAKSLHLIMIEDKMSEMKV

SEQ ID NO: 35753 - protein, 390 aa, Clostridium sp.
LKRAYKTEIKPTKKQIQKINQSIGICRWLYNSYIAKNKELYELYKQDLIPKEKAFMSANDFDKYINNEIKVLEEYKCINNCGAKARKKAIQNAETAYKRFFNGQSKFPRFKKKNKSDVKVYFPKNNKGDFKIERHRIMIPTLKNVRLKEYGYIKVGAKVISGTVSKKADRYYVSVVIDVHMPIVSKNTNEGIGIDLGLKDFAICSNGEKYKNINKTEKIRKIEKKLKREKKKLSKKYENLKKKGVTATKSNIKKQIVKVQKLHHKLDNIRTDYVNKTISNIINQKPKFITIEDLNVKGMMKNKHLSKAVTNQKFYEFRSKLTNKCNALGIELRIVDRFYPSSKLCHLCGSMKKDLKLKDRIYKCNCGYIEDRDYNASLNLRDCLTYKIAQ

SEQ ID NO: 35754 - protein, 497 aa, unknown
  TnpB Polypeptide
MITIKLPYTSSKSNKEIILKLMKQQSNCTHHIFNKIKDSKNSLEQKDLTITVNSMNNIDDIDSWFKQSAIFTANAKYRAFKENVKQVEDYNKKNPGNKKRTPNSVVFGGKKLFISRALRKIKRKDFKLMRLDPLVSVGEASKEGNRKYVLDVIENNLIMFYPDRHTEIEIRLPKLRKNYKNDLYRIQNLVENKKIPIQIGIDLSHIYISYDESNLSETICCPIDRRFMAIDMNPNEIGYSIIDWVDDNNFNVIATGILSIKEINDRQLKLKVPSDDPKNIYLNNKREHEIFEVSKELIEIAKHYRVSAFGLENLDLFSRDYTKGKKCNRLIDNFWAYSRFSKNLTKRLILNNLKYYEVPAAYSSFIGNLTYSNYPDPVAASIEINRRVYLSFLKDVSVKPRVKSHGLKRTKIKFRPMKIAIFPEFKEVKNALIYTLEVMNKRPLKFLTDSDSWKELYSKVKSSKLRYRVSLDLVRSKVFSLGNRASLVQCVGCFSII

SEQ ID NO: 35755 - protein, 229 aa, unknown
  TnpB Polypeptide
LQCPIEFAKAYKSFFQSNFGFPNFKSKKKMYSQSYKTNNNHGNIELCDGEIKLPKVGWVRLKQHRKMTGLIKSTTISKTATGKYFISILCETDIQPFAKTNSTVGIDLGLSHFAILSTGEKIENPRFLVSASKKLAKEQKILSRRALVAKQSGKKLSESMNYQKQRLKVAKLHEKISNQRRDFLTKLSTSIIKNHDRICIEDLASRNLMRNHHLARAIGMLLGLNSVEC

SEQ ID NO: 35756 - protein, 179 aa, unknown
  TnpB Polypeptide
MCVFSTGERAEYPMFYRNTEKKLAREQRKLSRCQKGSQNYKKQKKRVALCHEKIRNQRKDFQHKLSASLAESFDAICVEDLNLKGMAGGLHLGKGVHDNGYGLFLSMLEYKLEERGKYLIKADRYFASSKICSVCGNKKEELSLSDRIYYCECGNRMDRDVNAAVNIMNEGKRIFAECA

SEQ ID NO: 35757 - protein, 220 aa, unknown
  TnpB Polypeptide
MLRNTPASYKKEYPWLKEVDSLALANVQMHLESAFHKFFREPSAGFPRFKSKKSSRKSYTTNVVNGNIFLEGNYLKLPKMTAVRMKLHRPISEKWKLKSVTVSREPSGKYFASLLFCSENQAAEKDRQKNLLGSILRCRECVYFLPVKEPNIRCSTGTQRKSLHGNRESCPDVRKAVRIIRSRRKELHCAMKKSEIREKIFSINSVPVLPRASMQYAWKI

SEQ ID NO: 35758 - protein, 294 aa, Escherichia sp.
VKRLQAFKFQLRPGGQQEREMRRFAGACRFVFNRALALQNENHEAGNKYIPYGKMASWLVEWKNATETQWLKDAPSQPLQQSLKDLERAYKNFFRKRAAFPRFKKRGQNDAFRYPQGVKLDQENSRIFLPKLGWMRYRNSRQVTGVVKNVTASQSCGKWYISIQTENEVSTPVHPSALMVGLDAGVAKLATLSDGTVFGPVNSFQKNQKTLARLQRQLSRKVKFSNNWQKQKRKIQRLHSCIANICRDYLHKVTTTVSKNHAMIVIEDLKVATCQSQQRVRSASRGAMSGQNQV

SEQ ID NO: 35759 - protein, 453 aa, unknown
  TnpB Polypeptide
MNGDIKVKTAYKQRLKNPPEILVKYSCYAKDLWNQSNYILLNEYQKTGRVPYVFDKGGKTTFERLMHATKNLDGEINWTKLPSCCAQNAGILLFNSWRGWVASLQSYKRDKSKFSGVPRPPQFLPKNGKQVIEFTNLGKFDGDVVMLGRASKGEGLLIKLKCDDKRKEQIKKTCKSIKIVPKANNEYEICFVYDDIPVVASEKIAGRLMTIDIGVNNLATCFVNDVSTRPLIINGGIPKSINCHYNKKTSLLKSQLTKGRDVLENKKKGKLTSKQINTITNKRNRQIHDYFHKASKMIVDYATLNKVEKIYVNGNIGDMKQGIDLGKRANQKIVQIPWKKLIDMIEYKARRYEVEVIRDVDESYTSKTDHVVLESMVHQEKYAGSRIKRGLFKSSAGIILNADVNGAVGIARKVSGDEIVLESVNWKTVMNPLKVNAGDRIFGSGGDVEQSTT

SEQ ID NO: 35760 - protein, 337 aa, unknown
  TnpB Polypeptide
MVLSSHFFGLLKLTKQGKYAFRDCKLPHYLPKDGYATLVIGFVRLNGNKLILPFSNNFKKTHKAVEITIPPVLLDKKVKEIRIIPKAGARFFEIQYTYESECIQRNLNKNNALALDLGINNLVTAVSNSGKTFIIDGRKLKSINQWFNKENARLQSIKDKQHFGKKTTNRQKAIARDRNNKVNDYMSKVARKVIDYCVANDIGTLVVGYNETFQRSSKIGKQNNQNFVNISYGRLRSKLKYLCELNSIVFEKQEESYTSKASFWDRDDIPVYNADNPKEYQFSGSRIHRGLYETAGGKTVNADVNGALNIMKKSNVVDMNILYGRGEVDTPVRIRIA

SEQ ID NO: 35761 - protein, 383 aa, unknown
  TnpB Polypeptide
METVKLCVKGVISPRDAGLRKLMREYVNYKKILIPKVQQAVRQVIKDRGISVYAQQKWMVDKKLSEYLKNLPLHPMPFHNQSVFIEHKDGRFRIHFKTKKEEAICRLSVPAKYHDLIKRACGKDNPVLGQVELMEDRKYGWVNCHIVLRLPRPEPYAPKWWMGVDVGWNKLATSILATANPHLTFSHPTVHGKDFKTRIIQLRHLLKDYARKGKAWKKWDFRLKNTIKYAVGTVAKEIVAKAERHRAGVVMENLTFKSQTKRWLIPRYKLMVAVKTLCKIRGIPFRLVAAKNTSISCPKCGCINAKNRSGERFNCKSCGYQADADITASMNIAKEAIDMGLAPMSTEAADLSAASGDVATPLSADEPMTFIKAGANPRKLKMR

SEQ ID NO: 35762 - protein, 391 aa, unknown
  TnpB Polypeptide
MLKSYKYKIIPNEQQKVLLNKHFGSIRFIYNHFLNERKMEYDTNKNSINFYDNCKSLTMLKKQEDYSWLNEINSQSLQDSLKNLETAYKNFFRFKKGFPKFKSKHTKNSFKVPQGVKLEDGKLQIPKFKEPIDVILHRPFSGIIKQCTISKTPTNEYFVSILVETEHKKLEKTGKSIGIDLGLKDFVITSDGYKYKNNRYTKRYQTKLKKAQQHLSRKKKGSNSYQEQKLKVARLHKKITNSRLDNLHKVSTELITKYDVIFLEDLNIKGMVKNHKLAKHIADVSWSKFITLLTYKAEWNDKQIVKIDRFFPSSKTCNCCGYINQNLKLDVREWTCPSCNTKLDRDLNASKNILNEGYKIISSGTDDYRSGGEIRPTLVGTTDETSKILNT

SEQ ID NO: 35763 - protein, 344 aa, Oleiphilus sp.
VRLKDKNAKQLNEMARSVNFVWNYINDLSHRSIRERGVFLSGFDMDKYTKGSNKELGLHSQTLQEITKEYASRRKQFKKSKLNWRKSGGVKRSLGWIPFKIGSAKYKNGQIRFNGKFFNVWDSYGLSDYEFRSGSFNEDSRGRWYFNVVVHYTPKQYKGKGSVGIDFGCKAAATDSNGDGIVGREYRALEQKLGIAQRARNKKRVKNIHAKIANRRKDALHKYSHKLVQENALVVVGNVSSKAMVKTKMAKSVLDAGWSTLNSMLKYKCAHAGIVFEEVNEAYTTQACSSCGSISTASPKGRAGLGIREWTCVECGSTHDRDINAAKNILALGHERLAVEIPRL

SEQ ID NO: 35764 - protein, 426 aa, Bacillus sp.
MNRSFFCFLHVFKKKYIETYVRIWYDIPINNQEVNIVPTITVKIPLYAPTKTKQEMYEAMQQNFSIACNETLDLKQNHPKLKASEIDSKLSHIQLPSTLVQEARKLGTSRFQDWKKNQKTKGFPSFRKRISILFNNQNWRLRFDNGFLKLGIPTLEEGNLTVDKYIPLKSNDYNLFWVNYLLTGEMDTENKYYQKSYASISKPKKGNAQLFFKKGQWFFSFAISFEIQNEEKEEKSIGVDRGLRLVAVAGDAETGKYLTFNGKHIGHIRRKYYKLRRKLMKAKNMKAVKRLEDKEQRIVQYWNHLISKSIVEFAIQCNASIIKIEDLSSIRSMKKYWKRSDRNINSWAFYDLELKLTYKAQLAELKVEKVNPYKTSQECSKCGKVKKSNRRKEWYICSCGNKINADVNASFNISKRPSIDTQSTAA

SEQ ID NO: 35765 - protein, 476 aa, Mycobacterium sp.
MARYTTFRFCLDPTVEQCEVLARHGGASRFAFNQCLRIVKTALTQRKTDPSIAVPWTGFDLINAFNAWKKTAEAGRVFTVDSGGVADATVTGLPWRREVCQQVFEEAAVDLGKGLSAWSDSRCGKRKGKRVGFPRFKKKTGDIPSFRLRNKHPKGKPAAIRVGDNRPRSVTLPGIGPIKVHDDTRRLRRMLDKNRAKVLFATISRQGGRWWISLNVEAADLHVNHQHRTRPDDGGGWVGVDRGLSAFLVAATADGTEVTRISDAPKALSAGLKQLRRLSKSLSRKQKGSHNRTDAAARLGRYHHHVANVRRHFLHQVSNELVKTHDRLVIENLNVQGMLANHRLARAISDASWSEFARILAYKQAWRGGHLVEADRWYPSTRLCPACGVVNREMTLADRVFTCSCGHIADRDTNAAANLAHWGHTHQYETSTDPRTPKQRGRDTKARRRDGADQHPRVGETSPKDAGTDVHTAPAA

SEQ ID NO: 35766 - protein, 248 aa, unknown
  TnpB Polypeptide
MRLPLPVLSDAQAGNPAGADVRLRALRLQHDPGLAHRGVSARENTEASARLTALKKDPDRAYLNEVSCVPLQQCLRHQQQAFQAFLDKRAGYPTTKSKKHRQSAEFTASAFKYQDGQLFLAKCKESLDIRWTKKRETLPSAPSTVTVSRDTAGRYFVSLLCEVETELLPVTPRTTGIDLGLKALFVTAEGEQIDNPRHTAKYAARLAKAQRASNGARRTGLKPDRRSPACTQKLPIPDSMACISCRAE

SEQ ID NO: 35767 - protein, 300 aa, unknown
  TnpB Polypeptide
LQRGLCERNNHNPQGERHSCRAAPQVQRYREDRYRQHDTFGRYFASVLVYTTIQELPASAIQGDTALGIDLGIKSLAVCSDGRTFDNPKNLQRSLDRLKLLQKRLSRKQKGSVNRNKTRILVARLQERIANCRKDSLHKITHALTHDSQVHTICMENLNVKGMQRNHHLAQAVGDASFGMFLTLLEYKCSWYGVNLIKIDRFAPSSKTCGKCGYIYKGLKLSERSWTCPECGTHHDRDFNAACNIKEFGLKALPTERGKVKPVDCPLVDDRPRVLKSNDRKKQEKRGGIGISEAHAFRRE

SEQ ID NO: 35768 - protein, 356 aa, Brasilonema sp.
LICRRSRLLVVIRLAHFLGDNASAVQAAAERAWFAISRFYDNCKKNKPGKKGYPRFQHDNRSVEYKTSGWSLHPTKRRVTFTDKKGIGELKLMGKWDIHTYPVKSIKRVRIVRRADGFYIQFCVDVECREDIASTGQEIGLDFGLEYFYTDSNGHHEKAAFGGKLPPKTCRPNPRFLRKAEKQIKHAQRRIYKKQKGKNGRNKARNRYARKHLKISRQRTEHSLLKARHVMQSNDLCVYENLQVKNMVRNHHLAKSINDAGWRQFRSYLEYFAQKYGKMALAVEPHYTSQQCPQCGIMVKKSLSTRTHTCKCGCVLQRDYAAAINILRKGKEKIATSGQGGSKVSSKKKSRNALGS

SEQ ID NO: 35769 - protein, 405 aa, unknown
  TnpB Polypeptide
VHLVHKIKLDPTQEQAIYFARACGVARFAFNWALAAWKEEYEAGGKPNEAALRKRLNAIKGEQFPWMSEVTKVAPQNAIKNVGIAFKNFFNRVKKGGKPGYPRFKRKGLHDAFRADNGPANATSNAFECVGKTIKLPKCGVVRMREALRFEGRTLAATVSKMADGWYVAILVETNDCLSGPLDRGTVGVDLGIKEFATLSSGPPVPPLKPHRAAHARLVRLSRSLSRKQNGSANRAKAKTKLAKLHQRIGNVRKDALHKLTTRLATEFDTIGIEDLNVAGMLRNRCLARSIADAGFGEFRRQLEYKAAMTGAKVVVVDRFFPSSKTCSVCGTIHPTKLSDRMMVCDCGNVMDRDLNAAMNLKNKAASSAVSACGEESSGQGRKTVTKLASVKQEIAGLHRKVQTL

SEQ ID NO: 35770 - protein, 418 aa, Anaerovibrio sp.
MYLTQSNVIRKLSKEEYAMLREMCQYSNNLYNVALYNIRQYYFKEKKFLNYEENYHACKENENYGLLQAGVSQQTLKVADRSFKSFFNLIKKAKKGDYRFQDIKIPHYREKGGLFNLILSTNAINIKNGFLIIPMSRCFSRLHDGRQIKIPFPARLEGKRIKEVRICPVYNGRYFKIQYCYLQEEEKQNLTPDKVLAIDIGLENLATCVTNIGTSFIMDGRKLKSINQYWNKQKAHYQSIADKQGIKKTHRLYRLARKRNNRIQDYIRKTTRYIINYCIDHQIGTVVCGYNPDFTRSMNLGKKVNQQFTQISFGNLREAMQNLCERYGIKYIEQEESYTSKASCLDLDDIPVYNAENPYTGTFSGKRVQRGLYRFADGRIANADVNGAANILRKSKQNFGFEELCRGLLDSPLRIRVS

SEQ ID NO: 35771 - protein, 381 aa, Halomonas sp.
MTTCAYKYRFYPTPEQAKLLARTFGCVRFVYNAVLRFRTDAFYERREKIGYVAANAELSRMKKAEETAFLNEVSSVPLQQCLRHQQAAFKNFFDGRARYPRFKSKRHHQSAEFTRSAFKYRDGQLFLAKSKTPLPIRWSRPLPSEPTTITVSKDSAGRYFVSCLCEFSPDALPSTPKMVGIDLGLKDLFVTSDGDRIGNPRHTATYAPRLAKAQRRLSRKKLGSKNSAKARQKVARLHAKISDCRMDSLHKLSRQIVNENQVICVESLKVKNMVRNRSLAKSISDAGWGEFVRQLAYKAAWAGRQLSTIDQWYPSSKRCSGCGYVMPEMPLQIRAWSCPECAAEHDRDVNAAVNIKAAGLAVLALGENVSGMGQASISGSR

SEQ ID NO: 35772 - protein, 358 aa, Escherichia sp.
  misc_feature (112)..(123): Xaa can be any naturally occurring amino acid
VKRLQAFKFQLRPGGQQECEMRRFAGACRFVFNRALARQNENHEAGNKYIPYGKMASWLVEWKNATETQWLKDSPSQPLQQSLKDLERAYKNFFRKRAAFPRFKKRGQNDAXXXXXXXXXXXXEVSTPVHPSASMVGLDAGVAKLATLSDGTVFEPVNSFQKNQKTLARLQRQLSRKVKFSNNWQKQKRKIQRLHSCIANIRRDYLHKVTTAVSKNHAMIVIEDLKVSNMSKSAAGTVSQPGRNVRAKSGLNRSILDQGWYEMRRQLEYKQLWRGGQVLAVPPAYTSQRCACCGHTAKENRLSQSKFRCQVCGYTANADVNGARNILAAGHAVLACGEMVQSGRPLKQEPTEMIQATA

SEQ ID NO: 35773 - protein, 369 aa, Clostridium sp.
VEIKPTLEQKMKIDQSIGICRYLYNFYLGKNKELYQQFKDGLLDKKHSFMSANDFDKYINNEIKVLEEYQWINKCGSKARKKAICDAELAYKKFFKGESKFPRFKKKNKSDVKLYFPKNNKGDWKVYRHKIMIPSLKNVRLKEYGYIPTSAKVKSGTVSKNADRYYVSVLVETDIVNLNISTNHGIGIDLGLTDFAVISNRTFKKNINKTVIVKKLEKKLKREQRKLSRKYENLKLRNENKKEEATRQNIQKQIVKVHRLHQRLSNVRTDYINKVVSDIVKQNPSFITIEDLNVRGMMKNKHLSKAVAGQKFFEFRTKLTNKCNWMGIELRIVDRFYPSSKLCHKCGYEEDRDVNASFNLRDAKIYKTA

SEQ ID NO: 35774 - protein, 569 aa, Mycobacterium sp.
MSQRVKITRARLHGSAVYLGDVTGPDGAQAPVWSADPDEVLAWLCDGFRFRFNQRRSTRCRYLTCEDRNGDRVIVVDPAGEPVLVPIGRTVTDITDAQARRRHSFLAAIPGYVLEATLKTEATDWFSAGKRRKTNKAAGRRPGAMPGFRRKNCDQRFVCWFNGGRNAVFIKTGRRSGMVTISGANPRTHRTPGRAANGKPHKLGWKVTLHVRLSQPIRPYTSVRVNWTRRELVFVNEPLPVTDRARTGEVIGLDRGVVHTAADDRGRFYDAPDTAGLHKQRKFHQRRMAKSKVIAARQGRRFSESKRYQAHKRAAAALAARQARIRDDFAHKLSTELVREHDFIGIETLHLDRMTRRGKGKGAAAKRGLNRSMRNAALGRLATCIEYKANLAGVAVVEVPAAYTSQRCHQCGHTAAENRESQAAFRCKACAWRGNADTNAAVNVREEALTRWAAQTEQLAGTSGENPGGHHSRQPGGEQERDRPPHGSGPWAGGICDEPQTTQRRLTAKGIHRFQAVEDVKVCTPVAAAVHDAAGAVRRADQGPAGPELAAATPAVPRWDFFVASPRPT

SEQ ID NO: 35775 - protein, 427 aa, unknown
  TnpB Polypeptide
MCIKQKEYNLTKTSLCKFVSKEQKKYKNYINSHQSQAEAEAVYKGVEKVLFEDGHHLHYRRYNSFDCIKQKCAATGVRLSRWDTICFMKHYYKVRVPKNEYIQNILSSVDLKEDVVYSFLKRIEFNSGFKYYVVITLRGDAPKRIKLSEDGGHRTGVDFGTSTIATVSNNEVHLEELAPESAKYEKEIRHKQNLVDASMRKHNPENYNKNGTVKKGKHKWETTRRCRRLKRQIRVLYRKQSAYIKTSHHTFINRVVQNTSEFILEPMNFKALQKKSKKTERKDEATTIKQKDGSLKMVRKYKRKKRYGHSIKNRSPGLMQADLKTKATQYGIPYYEIDIHQYRASQLHHDTGEYIKPTLSERFKTIEGCKVQRDLYSAFLICHTDDTLTAPDFIACHFNFPHFVEMQDTLILNKKKCGHTMKSCFGF

SEQ ID NO: 35776 - protein, 413 aa, Kocuria sp.
VFKRYRYRAYPTGDQVKRLARVFGCTRVVYNDVIAARKTAWRNGEQFPTAGELSRRLLTEAKRTPQRAWLAEVSSVALQQSLRDADKAYRNYFAALAKKQKNKKVGAPRFKTRRGKQSARFTGNALLKLQQSSDGVGHINLQKVGRVRFASSRPLPSAPSSVTVILEADGRYFLSFVVQTPRSAPLTPNERVAGVDVGLTDLAAITCSDGSREKVGNPKWLRLKERRLAQAQRALCRKQKGSHNREKARHRVAVLHRKVRETRLDHHHKLALRLVRENQTVALETLSIVALVRTRMGKSIHDAGWGTLQRLVEEKAIAHGRTVVRVDRWEPTSQVCSVCGVKDGIKPLHIRIWTCEACGARLDRDYNAAVNIMVAAGLAETLNACGGDVRRTLACANPGEAGTHRTDRTLAAA

SEQ ID NO: 35777 - protein, 376 aa, unknown
  TnpB Polypeptide
LALENALKKYVPNLLDADTYNAKQLADTHPIRYANTAAVFDVGRRTTPQNLLGSPTSRSWNEFWIPLQLNPEQEDWWAALIDDEDESVWAGEIRLQRDSDRWVLHVAANYEVEPDHSCSCESDEVTPVGFDVGESKLLVGCAFRTNTPIDPLFVDGGRVRHLRQRQESAEDRLKQRYASNLLDNLVWSRWQDAIEDEIEKASAQAVEYASQFENPVIVLEYLDGITDEDIGKYWNRRLGKWLFSRLQSRIEEKATERGIPVEYVYPHYTSKTCHACQHLGYRPHQGTFKCTNEACWVSEYQADLNAAANIANRLNPWGESLPWKSAGDDSLRSGGQWQAHEDTSPSEGLPSEKRASDDKVSSQLTNGGSGGEARDR

SEQ ID NO: 35778 - protein, 375 aa, Microcoleus sp.
MTYNMPMTQSLSVKCKLIVPVEYRPKIDETLQGFADACNSVLEVAKREKCWNTTKLHHKVYKPVRESTGLKANHVCQAIRRVISNAKAVKEIHKFRPTSISLDIRTFKYIESEQTVGVTLKSGRVNFKLSIGGYQMALLKGQSLTSAVLKKTKQGDYYINFVVEIDTPPTGKTPKVIGVDLGQKDIAHTSTGKSWSGGQVQATRDHFAKVRASLQRKCSKGAKRLLRRLSGREQRFQKWVNHNISKQLVEQAKLNYAALAFEDLTGIRKTAKVRKSQRRNLHTWACYQLRMFTTYKAAIAGVPVLLIPAPYTSQTHYVCLRIGQRRGKDFWCECCQVHEDADSNASKVIELWGCVVSQPERSALLSCSLLSLIAS

SEQ ID NO: 35779 - protein, 350 aa, Archaeon sp.
MIFAYKIRHHTDFSEYLQKAKRIAQFTVNQRNRDITYDNVKHIGLNAVLAQQLIKVYKRNKTLKRVKKVNLVVPGRAVLLNRARKEICIPSLGFSFYYSFPNTFEKVSLVEINNKYAYVSVTLPEDERDVRSWIGIDLNTTGHVAVAASPETGKVAKFGKEIPHRYKKYENIKAHMRARRDREGSMALERKKRRALLNLTNDVANKIVDIASETNNGICLERVGGRSKHRTCVSDASGQDSLNSWIFYQLATTIELKAKLRGVPVAFIDPYNTSKLCSVCGHAGKRYQKKFECPVCGHVEHADVNAAFNIGLRYPGNAQSHADRGVCEGSDGAPEELLITALSASERALA

SEQ ID NO: 35780 - protein, 374 aa, unknown
  TnpB Polypeptide
MEIRATAKIKISATPEIIKTIKTYTKALQFCVDTAWKRRIRNNVKLHPFVYKHLRKTLPAQLAVACIRQSCGIVKKAKSKPIINNASVRYNFPRSANLKGDILVLRLLKKRQEFKLNVPKCYKEYFNWKVCESLLRIDKQSRAFFLFTFSKEVNISSSCLQNRVLGIDLGVNNLAVTSDGRFYNSAKVKQAKRKFKYLRSVLQAKGTRSAKRLLKKISGRETRYMAWVNHNISKDIVSKFDGNKIVMENLKGIRKVRRGKKLNYWISNWSFFQLQSFVEYKAEMKGIEVVKVKPNYTSQICHRCGRLGSRSSGCFCCSHCGLTSYSADLNAAKNLAHPMLAERQALVNVPHLTCNDTKASFDELRLSIVKSPAS

SEQ ID NO: 35781 - protein, 437 aa, unknown
  TnpB Polypeptide
MKINKAYKFRLEPNAEQGVMLSQLVGSARLVWNQILAMSFEMFAKGEFINATNLVNKITGLKNDPDFAYLKTCSNAVSLQQKIRDLASAWARFFDPKVHARHKENKKKPRKPKFFKLADGTELQLRPLMPQWKRKSDGRDSIRLVQFDKYCRVEGNRVKLPNGVGFVKFRKSQDIIGTIKNVTISKKSGRWYVSFGTERELAQKPIHPSKSAIGIDLGISKLITTSNSEVIKPKNSFKANQIKLAKLQRQLSRKVLFSQNWKKQNSKIQKLHHHIANIRHDYLHKITTTISKNHAMIACEDLKVANMSKSASGTVENKGRQVKAKSGLNKSILDQGWGMMVNMLEYKQQWRGGLLVKVNPRFTSQTCSECQHIAKENRQTQSKFECVKCMYVANADFNAARNILAAGHAVLSAEGGRSKGRPMKQKTSDTVRMSPKS

SEQ ID NO: 35782 - protein, 417 aa, unknown
  TnpB Polypeptide
  misc_feature (399)..(402): Xaa can be any naturally occurring amino acid
MKINKAYKFRLEPNAEQQIILNNLVGSARFVWNQMLAISFEMFAKNEFINATNLVNKIMDLKNNPDFDFLRTHANAVSLQQKVRDLASAWSRFFDPKVHARLKENKKKPRKPKFFKLANGMEIPLRPLMPRFKRKSDGCDSIRLVQFDKYCRVEGNRVKLPNGVGFVKFRKSQDIIGTIKNITISKKSGHWYVSFGCERELDQNPIHPSTSAIGIDLGVTKLITTSDGQHIKPKNSFKANQIKLAALQRQLSRKVLFSQNWKKQNRKIQKLHNHIANIRHDYLHKITTTISKNHAMIACEDLKVANMSRSASGTMEKRGRHVKAKSALNKSILDQGWGMMVNMFEYKQQWQGGLLIKVNPRYTSQTCFECKHIAKENRQTQAKFECVQCGHKANADVNXXXXRPLKQKTCDIREKVA

SEQ ID NO: 35783 - protein, 419 aa, unknown
  TnpB Polypeptide
MYLTIKQQVKHLTKEEYNILRELCHTAKNLTNQAIYNVRQHYFQEKQYLRYEANCFEMKNYENYKLLNANMAQQTLKNVDTMFKSFFALIKLAKQGKYSFKYIKLPNYLPKNGYANLIIAQFKIKKDDTLTIPYSYTFRKKYEGIKRIQIKVPNILKDKKIKQIQIIPKFNARFFEIQYTYEIQEENIQLNTNNALAIDLGVNNLCTCVTNTGKSFIVDGRKLKSINQFFNKQNAKLRSVKDKQNIKKQTKQQYMISRKRKNRVDDYINKTCRYIINYCLVNDIGTLVIGYNQSFQCKSNLGKRNNQIFTQLPFGRIREKLEYLCKRYNINYILQEESYTSKASFFDNDELPTYNMDNPQIYEFSGKRVKRGLYQTKDGYCFNADCNGALNILRKSSVVDISVLYGRGELDTPKRIRIA

SEQ ID NO: 35784 - protein, 459 aa, unknown
  TnpB Polypeptide
MIVTRTLIADTPFALHAICKTMGFVRADIWRRYGALGSVGKSASDIRSEITEKDLYSCLPVDGTIRAETTKDIVNDVLLYKAAAVTKVRKSVAARTINNLERKQFYTELRKDEWLSNPFLHRQMRKHFRHGVSHTDNQFIVRSDRHNSEIVNGQLVITLKVARKYGEDIRLETRSNGKNVLLDKSNLRIVVKDGFTEIHYATEKDAGRVHGEVVIGIDKGYTEAFTDSDGVAHGVQFGRVLTAYSDKASVTGKQRNKLYALEKKHRKEGRTAKADAILRNNLGRKKIDARHGRAQKQLRTIAYQSAHTIVDKASVVVSEDLTSPIASKLNWKRFNRRMSGWAKGVLAQALEEVTTQRCAKHVLVNAAYTSQMDSTNGLLEGKRVGDRFYRICGDVLQADHNAARNVLARLGDSEIGRYTPFKEVKRILLMRSPAQLSVKRLELGAQACQPSADKSVNTF

SEQ ID NO: 35785 - protein, 459 aa, unknown; identical to SEQ ID NO: 35784
  TnpB Polypeptide

SEQ ID NO: 35786 - protein, 408 aa, unknown
  TnpB Polypeptide
MTKNEQIRQTLLATREKRQNQVLKVYELKVNVHSTSKEDFALFDYLFIQTKWIQNDMIASKDIFNYDYKNHRVIQNFDKDDNLVERNLTINTGIHQTIIKYLKQDIITLSKAKKRGRKIGKLKFRRTCNSIPLRTGQLKVINSKTISIPHFRKLKVYGLEQFITFPEYDIADAKIIKKASGIYIKVSVCIPKNSIKRAPTGKTVGLDFGIKDNITTSDGEKFNCSVQESDYLKFLQRKLSKKQKESKRYYKCLNQLQKEYEHLTNKKNDDSNKLIAYLLKNYDVIYFQDEQISSWRKFSKGFARNIQHSYLGRVKAKLIELQKSERSFEISKWSPSTKFCPCCGSLNTGITLSDRVYRCDCGYQFDRDVHAAKNVKKFGSTKKDECLEQASVETLASAALEVNSNIVS

SEQ ID NO: 35787 - protein, 413 aa, unknown
  TnpB Polypeptide
VEGLFLEPELLSADNRRSSDRSDKEVYRKPGPERQEKEVSKVANKAYKFRIYPNDEQIVLFAKTFGCVRLVYNHWLDRKIKQYEQDKTAVGYTACAKEMAEMKKSEEYAFLKEVDSVSLQQSLRHLDTAFQNFFKQPKTGFPRFKSKKHNRNSYSTVCINGNIAISEGYLKLPKIGQVRLKQHRTVPSEYKLKSVTVSQTPSGKYYASVLFEYESNNEEKELHSFLGLDYSMHELYKDSNGNEPQYPRYYRRSEMKLKKEQRKLSLMQKGSKNRDKQRIKVAKLHEKVSNQRKDFLHKQSRQITNAYDCVCIEDLDMKAMSQALNFGKSVSDNGWGMFVAFLKYKLEAQGKKLVKVDKFFASSQICSCCGYVNKGTKDLAVRAWDCPECGMHHDRDINAAVNIRNEGMRIAFA

SEQ ID NO: 35788 - protein, 412 aa, unknown
  TnpB Polypeptide
MVENSWFSIELNQAPNKNFYRISRQSLQSFRAECTDSEDILTKSKRIRIYPTKKQKVIFSRWFGTVRYTYNKTVELLRQPGSYAAWKSIKEELLNSLPEWAKEIPYQIKSIAIRDCCKSVSNAKIKFKKTGIPQTVHFKKRKNPFKSCYIPKSAISESGLYYTLTKELKWSENLPEEFCDARLIKYNGRYYVSVPYKAAIYNSENQGRIVALDPGIRNFISFYSDQFCGKIGAGDFKRIFRLCRVLDKLQSILSKPLSFYKRARIKTACGRIRWKIWDLVSELHHKTALFFVKNFDVILLPTFEVSQMVRKELRKIKSKTARQMLTLGHFRFKQFLKHKAFEFGKLVVDVSEAFTSKTVSWTGEIIEDLGGRRIIQSKIDGEIMDRDYNGARGIFFRALVDSPISRLVFEIN

SEQ ID NO: 35789 - protein, 297 aa, Gammaproteobacteria sp.
IVVESGVYTQFKGKDGCTWLKVPSLVRGKRIAIPLNTNADLQGTLRLILKNDVVEVHTLVNNKKQASCGTEIIGVDKGYTEVLADSEGEFHGEGFGKLLTPISNSRVEKNKKRNKLLQIAKKAKPAKAARIIKNNLGIKKRQKQNRKTKQQIRSHCFKAVHSLVDKAKEVIAEDLTTPIPKKNNWRQFNRLMNQWTKGLITEALETVVKARGSRLHYVNAAYTSQMDSNTHLLQGNRVGDKFHHANGEVSHSDINAARNIKQRFNDPDISRYMPYKKVKQILLDRLRASKELFFTEH

SEQ ID NO: 35790 - protein, 406 aa, unknown
  TnpB Polypeptide
MIKTINKAFSFRLYPTAEQERILASCFGQVRFVYNYFLHQQIDYYATNKGKEKQSLNYHDTAKMLTELKRQPEYVWLNESNSQALQQSLRHLDNAYNNFFNRSFKFPNFKKKSRKQSFSVPQHFDIDNEAKQLRIPKLSPIRIVLHRKIEGVMKSVTISKTPSGKYFASVLCEVEKVIKPKKKGGKIGIDLGLKSFMVTSNNERVDAPKYLRKSENKLTKLQRHLSRKVKGSNRRNKARIKVARIHEKISNQRNDFLHKLSCRLVSENQAIFAEDLHVKGMMANHRLAKSVVDSGWSEFIRQVKYKSEWNGVYFGQIDRFFPSSKRHFGCGWINESLTLKDREWTCQCGQVVARDFNAAQNILLFGQKSVGQGLPKLKRSGRGGASMPLKELRSPIQSLIGGGVFI

SEQ ID NO: 35791 - protein, 154 aa, unknown
  TnpB Polypeptide
VPLQGLHYHISNIRKDTLHKITSELTKTKSTIVIEDLNVSGMMKNHCLAQAISDVGLFEFRRQLSYKSDWYGCIIVVADRFYPSSKTCNVCGCINNKLTLSDRTWTCSCGEVHDRDYNAACNLENLATSSLDSKNACGEISSGDSDEIVVKLAS

SEQ ID NO: 35792 - protein, 401 aa, unknown
  TnpB Polypeptide
MIRSTQTTLKFSHKQKRRQLNEFIREYKTVTSTFIDMLWKETEILQLIPKKLTSKINTWLSARAIQCAGKQASGIVRGARKKQEKRQFMINKFNELGMYKKARKLQRIYNEKKVSKPDLKEVNPELDSRFIKIDLNNETSFDGWLTISSIGNKQKLILPFKKSWHFNEMLSQGTIKGGIRINKKDVTFTFEIEDVEKKEIGNILGIDIGKVNVISCSNNHISKPNNDRHDLNSILKIMSRKKKGSKGFKRCEDHRTNYINWSINQLNLVNTKQVNLENIKYLRKGKRNSRMLSHWTYTNIFDKLISKCEEQGVLVKRISPTYTSQRCSKCGWVRKSNRKQKEFKCKKCSFDCDSDLNASVNLSLNLRAISKKKRLLQKNRTGFYWNEVGQEHIVPVALKTG

SEQ ID NO: 35793 - protein, 162 aa, Moraxella sp.
CITVKDYPKTQCGTGSVGIDLGLKDSATASNGDKLTIKQTLKYAKQLAIAQRAKNKQRVKAIHAKIKNTRQDLIHKFTTQLVKDNALIVVGDIQSNQFNSKKSKLAKSVYDAGWFELKRQLTYKCENAGCRFEIVSERYTTQRCSCCGQMTAIVRKVEQACE

SEQ ID NO: 35794 - protein, 297 aa, Moraxella sp.
  misc_feature (102)..(135): Xaa can be any naturally occurring amino acid
MKTLKLRIRDKHINQLNRLSGSVNFVWNYVNALSYEHLKRTGKFFSAYDLNEYTKGSGELLGLHSQTIQAINETHAKSRRQFKKAKLNWRTNNPNSKRKSLXXXXXXXXXXXXXXXXXXXXXXXXXXXXXXXXXXCITVKDYPKTQCGTGSVGIDLGLKDSATASNGDKLTIKQTLKYAKQLAIAQRAKNKQRVKAIHAKIKNTRQDLIHKFTTQLVKDNALIVVGDIQSNQFNSKKSKLAKSVYDAGWFELKRQLTYKCENAGCRFEIVSERYTTQRCSCCGQMTAIVRKVEQACE

SEQ ID NO: 35795 - protein, 293 aa, Bacterium sp.
MEKNEAPDNTVGLDIGPSTIAYVSNNNVHLEQFCNELKNKQKEIRRLQRKLERQRRANNPQNYNFDGTIKQGKKTWHESTRYKKTKRKLAELQRKLAAHRKTLHGNLANRILRQGKHIKTEKLSYRAFQKNFGKSVKNRAPGMFMEILRRKAENAGGSVDEFSTKTTKLSQYCHKCGKYTKKPLSQRVHTCCNLNIQRDIYSAFLAVSVVENQMDTADVKQRWRSMEAILQRAVSGFKQVANVRHLPSSFGMVNPLVDHIRDRATRLRSSDVPEKGIPDAKDRDVVAIQLELF

SEQ ID NO: 35796 - protein, 430 aa, Lysinibacillus sp.
  misc_feature (72)..(155): Xaa can be any naturally occurring amino acid
MIVATKIRLKPTKEQEVLFWKSAGTARWAYNYFLAESERIYNDEKRTVKESEIRKKINNELKPTTHKWLKEXXXXXXXXXXXXXXXXXXXXXXXXXXXXXXXXXXXXXXXXXXXXXXXXXXXXXXXXXXXXXXXXXXXXXXXXXXXXXXXXXXXXSFYVNYESLKRTNEGFRGEKIGSVKTCNALPKLKKGQKYSNPRISFDGRNWFLSIGYEQEFEQYDLTGKRLGIDVGINKLAVCSDGEFKENINKTKEVKRLEQKLKREQRKQARKLEANTKEYTKNNRKPIYKTPLKNMKNIQKQNIAIRNLYKRLNDIRINHLHQCSNEIVKTKPSRIVMEHLHVKGMMKNKHLAKAVAGQKLYEFKRQIQYKCQKYGIEFIEADRWFPSSKTCSSCGQIKFDLKLKDRLFICSCGLKLDRDLNASINLANYSI

SEQ ID NO: 35797 - protein, 331 aa, Paenibacillus sp.
MGHAYIRTVNELTEQAEASGTFPKLTSKTLHANLPSAVKNQLIRDAKSIFQKSKKEKKRPILKKRVYYVNNQNYTIGDNTVSFPVCIDGKVQRLVVPAIIADREKALLSNSKHGLLRVVQKSSKWFVQVSIQRPTEQATGDIVMGIDLGLKVPAVVVTSSQKTKFVGNGRKNKYIRRKYNASRRKLGKLKKLSAIRKQRDRESRYMKDQNHKISRQIVNMAIQENVTNIKLEKLADIRKTTRTSRKNAKNLHNWSFYQLQMFIAYKAALAGIKVVEVNPAYTSQTCPSCGQRNKANDRMYQCSCGYKAHRDRVGAINIMRQSLADGNSLSA

SEQ ID NO: 35798 - protein, 446 aa, Mycobacterium sp.
  misc_feature (325)..(445): Xaa can be any naturally occurring amino acid
MARLKVPEGWCVQAFRFTLNPTQTQAASLARHFGARRKAFNWTVTALKADIKAWRADGTESAKPSLRVLRKRWNTVKDQVCVNAQTGQVWWPECSKEAYADGIAGAVDAYWNWQSCRAGKRAGKTVGVPRFKKKGRDADRVCFTTGAMRVEPDRRHLTLPVIGTIRTYENTRRVERLIAKGRARVLAITVRRNGTRLDASVRVLVQRPQQRRVALPDSRVGVDVGVRRLATVADAEGTVLEQVPNPRPLDAALRGLRRVSRARSRCTKGSRRYCERTTELSRLHRRVNDVRTHHLHVLTTRLAKTHGRIVVEGLDAAGMLRQKGXXXXXXXXXXXXXXXXXXXXXXXXXXXXXXXXXXXXXXXXXXXXXXXXXXXXXXXXXXXXXXXXXXXXXXXXXXXXXXXXXXXXXXXXXXXXXXXXXXXXXXXXXXXXXXXXXXXXXXXXXK

SEQ ID NO: 35799 - protein, 372 aa, unknown
  TnpB Polypeptide
MTIIKGYKIRLLPTLEQEILIRKSIGVSRFVYNWCLDKQLKSDKFIRDAELRKELTKLKRTNDYHWLNEVGCNVIKQSAKDLCNAYKRFFNKLSNKPRFKKKGVHNSFYVNYESMRKTKHGVRCEKIGDIKTSERLPKLIRNNHYMNPHIVFDGKYYYITFGIEISIEPKENTSKIIGIDLGIKSFAVCSDGTIYKNINKTHTVKKLNKKLERLQRCTSKKYLKNKAGNKFIKTRNIIKLEHKIKLIHRRIKNIRENYIHQITTSLVKTKPSRIVIEDLNINGMLKNKHLSKAIAEQCFYKFISVLRYKCDWNSIELLKADRFYPSSKLCSCCGSIKKDLKLKDRTYKCNVCGLVIDRDFNASLNLASYKLA

SEQ ID NO: 35800 - protein, 449 aa, unknown
  TnpB Polypeptide
MITQKYTTVTQLHKTNNKEIIEYFENASVYFCKLQRKAFHIFKNETIKGNRIDLNIMYKKFMVDYNISTRTANSIIRCVQGRIKALIELKKYEISQKEYKIKTLKESIEKLDGKILKLQEKMTNNIKVNHSTYWNLKKSRAFKKMKLNKFKMRLEQLKWEIKTGHYKLCFGTKKLLKSNKKEFLLQRDSQMSYIGRLDETGRNQMFQLSYNNRNNQFEIKVRKDFGFDTEGKYVFGKCYFNNHKNKLIEALKNKNSTPLTYSIIRKNNRYYLHCTFEYRIENKSSFLTRKTYGTIGLDFNKGFIALSETDRNSNLIGTDILKYRFGKGNKTQSDIEKCISKILKRALETGKDICIENLNFETKKSKTEKAKSDKGRKYNNMLHSLAYALYDKLITNMAFRNKVDAIKVNPDWTSWIAKNKFCNRMKLNIHIGASFVIARRGIGIDDEVK

SEQ ID NO: 35801 - protein, 448 aa, unknown
  TnpB Polypeptide
MALPEIPRPVVTFNLPNLINAYEHSPMLETTRTFRAKIVNHQQVSDVLDDCGYSASKLWNVARYHIQQEWGDMGEIPSEADLKRELKDHERYSDLHSQSSQRVLEELAESFNGWFKKRKNGDADANPPGYRKRGDNHPRSTVTWKQNGIKHDSKHNKLRLSKGFNLKDHRSDFILVEYETRPDVTVETIQQVRAVWNGDRWELHLVCKVEIPVEDAPGDNTAGIDLGIKNYLAIAYDDGDAEEYPGNVLKQDKHYFTRDEYDTEGDNGPSKRALRARQKLSRRTDHFRHALAKHIVEQCINHEVGRIAVGDLSRIREDENGDSRNWGKRGNKKLHGWEFDRFTTLLEYKAEEHGILVDRTSERDTSKTCSCCGRKRDANRVERGLYVCESCGATMNADVNGAVNIRRKITQSPPTEDMSNGRLARPAVRLFNQTSGRFAPREQVGCKP

SEQ ID NO: 35802 - protein, 637 aa, Glycomyces sp.
  misc_feature (517)..(575): Xaa can be any naturally occurring amino acid
MIHEFSERSSASAARLASSCRSSGSLRFTCFMVSILCYYGTMSRFRMYPTPAQEQQMLRHCAHARYVWNLAVEQRSYRARHKGPTPQYVELTRQLTEARAEFTWLREGNAEIQQQALRDFDQAVSRRFASGFGEPTWRKRYRHEGFRVIGTERVPAFESDGSPKLNAKGRQVMSRSVRVERLNRRWARVSIPGCGPVRFRIGRKQRLPEAKTFRVTYRRGQWHTAFAIIPDPKPAPGTGAVVGVDRGVRITAALSDGRTLNCPQLSPKELARYRKHQRRAAKAPKDSVRKAAEYAKAAKIKTAEVNRRKDWVEKTSTMLAESFDVIRFEKLNITNMTASAKGTAKQPGRNIAQKSGLNRAILAQGWGALRQRTAQKALSRVEDVPAPYTSLRCSVCGWIDKHSRKSQAEFVCSSCGFTCNADTNASLNVAAGHVGGATPRQRSSVREPQLTASWNPRILDRGGCQSNMLRIESPPLSAAAGAACGAVWGAVWSPCAVGPAAAKAAAKAAAKAAAAAXXXXXXXXXXXXXXXXXXXXXXXXXXXXXXXXXXXXXXXXXXXXXXXXXXXXXXXXXXXGEGRGEGRGGGREEDGADGGRRSAARCVSVGRDVRHRCSLGRSCGRSRKILPIEQERNIITS

SEQ ID NO: 35803 - protein, 412 aa, unknown
  TnpB Polypeptide
MRSQKIRLKPTKDQERLMRWYSKVSRNYWNLLVDIDRRNNQGEFDEILSKNGNETYHSKFYNREVYKLNQTDYRNLAKIIITKSSEVDKEGWSWYYQSNQSFIYTFIARELVKIRRRNKGKLNFRSVDKIQPSFNVRCDSFPNNKRPSRIYLKEDGKLQIPTLGSIKFGSVRVDFDLSCKKQVANISFDGKYWYLSYVEDVKTKVTDSPEYRDGIGVDLGIKTLATFSDGTRVPNIKNFRRVRILEKRLKRLQRKVSRKYLINKCNKHNKTKNIIKLEKQIKLIHRSIRNIRINHIHKFVSVLVKKQPKYIALEDLNVKGMMRNKYLAKDIVNCSFYTIREHLIRKATERNIVVRLVDRFYPSSKTCSNCGSYKKDLKLSQRIYSCDTCQEEIDRDLNAALNIAKTDKYILA

SEQ ID NO: 35804 - protein, 412 aa, unknown
  TnpB Polypeptide
MRSQKIRLKPTRDQESLMRWYSKVSRNYWNLLVDIDRRNNQGEFDEILSQNGNKTYYSNFYNREIYSLSQTDYLKLAKIVVTKGSDVDKELWSWYDQPNQSFIFAFIARELVKIRRRNEGKLKFRRFDEIQPNFNVRCDTSANKKRPSRIYLKDNGKLQIPTLGDIDFGSVRADFDLSCKKQVANISFDGKYWYLSYTEDVETQVVNLPEHTDGVGVDLGIKNLATFSDGTRVPNIKTFRRVRILEKRLRRLQRKVSRKYLINKCNKYNKTKNIIKLEKQIKLIHRSIRNIRINHIRKFVSVLVKKQPKYIAVEDLNVKGMMRNKYLAKDIANCSFYTIREYLIRKATERDIVVRLVDRFYPSSKTCSNCDGYKKDLKLSQRIYNCNHCQEKIDRDLNAALNIAKTDKYTLA

SEQ ID NO: 35805 - protein, 471 aa, unknown
  TnpB Polypeptide
LEKEKTKNPHAQICQRLRKLFPDLPTKYIDSAIYKAKQYPTDKSVIFGGKRLFEKLCKNHISGKLRERLKKQWKEQRQGTLISIGSKSDRGNRLARFEDLNGQLHLRITTGNREFIYAKVLRESSNNKDKWITFMIILLESWQTKNYFTYTLELKLRDGEIYGSVSFELPTPEVRYTKEKGVIAIDTNASPIHLAIAEVSKSGELLSYQTISLHHLLGLSQNTKDHQEWILAHQLLDLAIQKGKAIAVENLKKLRKGKRGDGKAKLRKILHNWNAKKFLQKLKRVAMLKGVEVIEVNPAYTSVIGMLKYAPQLSIDKDVAGAYVIERRALGFKEDMPENYERLLKDKAYLEFALKRYEERGKELRELVEKESNEYKRNAIKSELRSVENSKKLLTNLVQSLQSEPSSCEGAYGRNPAWQVLRVALLFPILGRVLPRDLSPLKPILVEGVWDRVRSRLVPLEVGGTVPIRDF

SEQ ID NO: 35806 - protein, 418 aa, unknown
  TnpB Polypeptide
MPITYRNVTYRLLPVTRSRGKQLEALASSCRWVWNYFLAKNRADYQFDQCFEDTYGIKPTPLQNPTSFFSLGKAFTQLRRELPWLHEHSFDIIRYTLKHQADAWHRYFNDPTSGRPRFKSREADRDGSTIPDKVRIQARSIYIPKIGWCNLRRKGGNPYPDGKPKQARVFRRHGKWFAVIAYDILAPEQVDNGREIGVDMNVVQVATSNHELICSGRDELERARLRLLAIKRRRYQRQVARRQLGCNRRRKAKRRLAKVSRRICHKRDRWAHDAARLITDQAYTVAVEALRVKQMTKSAKGSVDVPGRHVKQKAGLNRVILDTGWGQLRTMLAYKAGSFIEVEPRYTSQTCHVCGHVDPKSRRTQAEFKCVHCGHESNTDINAALNIKASAIGASARGRVEPLGYPMIREMGTHIALV

SEQ ID NO: 35807 - protein, 378 aa, unknown
  TnpB Polypeptide
MVGGELEGGVQRRSRRARPGVEGLLRCAFGKRKGGRLGWPKFKKRGGRRSFRVTTGSFGVVDGRHVRLPRIGVIRTKEPTGKLSGRLAAGPARVLSASVSERAGRWFVSFTCEAERPKVEAPAGRPVGVDIGVKCLAVLSTGEQVPNPKHLSRWQRRQARLQTELARRQGPAGGKAPSTRWKAAKARLGKTHAKVAQARSDGLHKLTSRLARAHAVVVVEDLNVAGMTAKGAGRAKRGKAGLNRAVLDVAPGELRRQLSYKTGWSGSGLVVADRWYPSSKTCSACGAVKTKLPLAERTYNCEQCGLVIDRDHNASINLATLAARTGTASGAGTGQSDLATGRGEDKSMPSGRWSSQNRQDSTAPAGQTATAAEQSTAA

SEQ ID NO: 35808 - protein, 400 aa, unknown
  TnpB Polypeptide
LCQHHKKIHTGAKRQVRVQKGFKYRLKPTEEQKQLLLQQGGNARFLWNHLLANNIQHHKTTGKFKFAHEMVVSIPKIKEEHDFLKLSFSQSLQTVARDLDKAMKSCFKQQTRFPRFKRKALQRDSFTIPQKWRLSKGYVFIPKVGEVKWIKHRPLQGEPKKITITQDGDHWYCSVLCELQLPDRPKDTSNLVGIDVGLKSFATLSDGGVIDNPKHLNKSEKRLAEAQRSLSKKVKNSQNRKRQRKQVQKLYRKIRNQRLDFLHKTSASVIAKHAVVLEDLDVQGMMKNRSLSKAISDAGWFEFKRQLEYKAQWKGKLFITIERKEPTSKRCSSCGNIQDMPLGKTIYSCPACGMTMGRDLNAARNILEIGLNTAGRAGINACGVGTGVPTMKQEKECLVN

SEQ ID NO: 35809 - protein, 403 aa, unknown
  TnpB Polypeptide
MREAVILKFRQPTARKLAWLENTASLFLQGSRIGLDFALANKTTNRSAIHKTAYRKCRNTGLPSDYSRMAVNNAVQHAASYLGPRKSRRRVGKPVLSGSTIGLGVASYAVVDNVLRVSTGKRGTYIWLPLCVPKKWRNRLQYVKGDAKLFKRNDTWFVMLPLRTPDSPTVRDGDPTVLGVDLGIVRLMTVRTPDGIKVWNGKEIRSRREHFAAVRKRYQQHGRMDRVKITKNKERRWMANVNHKASRELVDLAAQFPNPVIAFERLDGIRNRVSGSKRFNRMISNWAFRDLINKTEYKAAKAGIRVVFINPKGTSRTCPRCGHSTRSNRPTQTDFRCVACGYRGNADAVASINISARAIDLLSHGPPDTARPARVQDGKTVSCPDGASGCSPLVHLNSNLVSS

SEQ ID NO: 35810 - protein, 212 aa, Okeania sp.
VPQGQALRDLDRAFKNFLTIPSRGFPTFKKKGRKDSFYLEGSIKIIQGNYIQLPRIGIVKTYEILPSYRVKNVTIASFRGASLTKKADSWYISFKYNFEPYPTEKIGETIGVDIGINTLATCSEGSKFTNVKAYKQAKKQLVRHQRAVSKKVIGSQNRRKAVKKLAKLHKKVADIRADALHKLTTWLAKNHSTIVIEDLNVSGMLKNHNPPL

SEQ ID NO: 35811 - protein, 430 aa, Campylobacter sp.
MSKTNQSNLISISHKIELKPNNKAITHFKKAFGCSRLAYNWGLAKWQEYYKQGVKKSYLDLKKEFNAIKKDQFPFVYDVSKYATQQPFLNLNLAFNKFFRDLKQGKLSYPKFKKKKENFGSYYIGGDQIIIKNEKYLKIPNFGLVKIREKLRFNGKINSVTISQKANKFYASFSMQISHDEYNKTHKIKNLNNQSIGIDLGIKEFVCLSNGLMIKAPKPLNKLTRLLVKRQRRLSKKQHAKTKQEAINGVKKSNNYLKESKKLAKLHSKIANIRSDFLHKLSSIIIKNYDYIGLENLNTQGMMKNHKLAKSLVDVSFYEFNRQLEYKANYMQKEIHRVDKFYPSSKTCCVCGNIKQDLTLKDRIYKCKSCGNIIDRDLNASINLHKFVNETVGIVNSEFTPMDLTALLDDLAINQIVTSKVEVGIQQKFY

SEQ ID NO: 35812 - protein, 337 aa, Anaerostipes sp.
  misc_feature (229)..(324): Xaa can be any naturally occurring amino acid
LNIAYRFRIYPTEEQKILLGKTFGCCRFLYNQMLDDKIREYEKTKKMLKNTPAMYKREYPFLKEVDSLALANVQLHLEKAYKNFFRDPKTGFPRFKSKHHSRNSYTTNVVNGNILVESKRIRLPKLKWIAMKKHREPAEGLRLKSVTVSMEPSGKYFASLLYEGYSCENQAAEPDYSTAKILGIDYAMQGMAVFSEKIEKEEAGFFRKNEKRLAREQRKLSRCVRGSHXXXXXXXXXXXXXXXXXXXXXXXXXXXXXXXXXXXXXXXXXXXXXXXXXXXXXXXXXXXXXXXXXXXXXXXXXXXXXXXXXXXXXXXXXXXXXXXXKENDKGRPFLSFQ

SEQ ID NO: 35813 - protein, 376 aa, Paludifilum sp.
MYKAFQFRLYPTKEQATLINQSIGCSRFIFNSFLAKWNEQYEQTGKGLTYNACSKLLTELKKEREWLREVDSTSLQNALKNLGDAFSRFFKKQNDRPRFKSRKNPVQSYTSQCNYPKNGKPTIEVAGNKMKLPKLGWVKFAKSREVEGRILSAIIRRNPSGKYFVSLLCEMNACPYVPVNREKAVGVDLGLKDFAILSDGTKVNAPKYFRKYEKKLAHWQRILSRRQKGGSNWHKARVKVAKIHEKIVNVRRDFLHKLSTKLIHENQGICLEDLQVKSLVKNHKLAKSITDASWSEFAAMLEYKATWFGRTLVKVGRTFPSSQLCSCCGNRNRDVKNLNLRYWTCPECGAHHDRDINAAKNILQEGLRVIAVGLTV

SEQ ID NO: 35814 - protein, 493 aa, Actinophytocola sp.
MARFEVAEGWVAQAYKYALDPSPAQVRAFRSHAGGARRAHNTMLAVVRAVLDQRQAERSYGIADADLTPSLNWSLAGLRREWNARKNDVAPWWGENSKEAYNTGLDALARGLDAWDKSRKGDRAGLSVGFPRFKSARSRRSVRFTTGAIRVEADRHHVTLPRVGRIKTHESTGKLARRVEAGTARVLSATLSEDSAGRWHVSFQTIVQRTVAVPGHVGAGDDVVGVDVGVKADSLLVVASPDGREIDRVPAPKSLSKAQERLRALQRKAARQHGPHDPTTQRKQQPSKRWIRQQRRISRTHARAGAVRRDVLHKHTTSLAQCHQVIAVERLNASGMRAAGGSRKKGLNRALADAALAEIRRMLTYKTTWYGSTLVEAGRYYPSSKSCSACGGRKPNLTLAERTYMCEHCGAMIDRDLNAAINLARLGDTHHTGGTRTGTGSSPAATASSGDGRGATQETATTPVVNAAGREASTPHQQQSGKTGTASPQGEAA

SEQ ID NO: 35815 - protein, 353 aa, Clostridium sp.
LWVNHYINYILKFNDYYYKVLKNKSFEIPKIFKDKDLNYKYLNSLIKRYTRRYKGQIPYSKSGRVFSIDTGLYRYKDGCINITSTKKGKRLSIKLTDNNQYDRTMTVKRIDNKIEIHCPLKIKTKVNHNKENIIGIDKGYRYLFAVSSDEFYGENLNNYLNKETERLNKVNENRNRFWALYNQYLEQNNIEKANTIKENNLGKVKYNHNKKKHDQTVKSYINYSLNGLINREKPTEIVMENLDFVNWNDRYPKSVKRKLSRWIKGYIRERLEYKCDYNSIKYTYINPAYTSKVCNVCGSFGKRDGDVFTCPKCGEIHSDTNASKNILKRKYDKEITLYTNYKKVKEILENRVS

SEQ ID NO: 35816 - protein, 162 aa, Helicobacter sp.
MRACSKSLSKKKRGSHRRLKARLKLARLHRKIKNLRTDFFYKLANSLAKQCTTIFTKDLNMRAMVRLWGRKVSDLAFSEFVSILERKTQVVKIGFIKSNALVPSAKTCSSCGALKEDLSLKDRVFHCHSCGFSLDRDLNASINIHRGRAHSWRRGHKTRLAG

SEQ ID NO: 35817 - protein, 416 aa, unknown
  TnpB Polypeptide
MYLTVKQQVKHLSKEEYKTIKELCHIAKNLTNEAIYNVRQYYFTEGKFLKYEKNYALLKSSENYKLLNSNMAQQILKEVDGSFKSFFGLLKLTKQGKYAFKDCKLPYYLPKDGYTTLVIGFVRLNGNKLLLPFSNSFKKTHKSIEITIPPVLLDKKVKEIRILPKANARFFEIQYIYEAECIQRNLNKQNALALDLGVNNLVTAVSNTGRSFIIDGRRLKSINQWFNKENARLQSIKDKQHFGKKVTNRQKAIARARNNKVNDYMNKAACKVIDYCITNEIGTLVVGYNVTFQRNSRIGKQNNQNFVNIPYGRLRDKLLYLCELNGIAYIEQEESYTSKASFWDKDNIPVYNNDNPKEYQFSGMRVHRGLYKTANGITFNADVNGALNIMRKSSVVDMTILYGRGDVDTPVRIRIA

SEQ ID NO: 35818 - protein, 369 aa, Mycobacterium sp.
VWNLAVEQQRHWQPGRCAPQYNEQCAQLTSARAEYDWLAAGSQTVQQQALRDFAQAMRNFFGGTHRRPTWRKAGVHEGFRQVAVKSHHVERLNHRLGRVWVPKVGWVRFRLSRAVPEDVKSYRVTQDRAGRWHIAFAHIPDPVAGPGEGSIVGIDRGIAVSAALSTGELLHAPGLTPGEVRRIRALQQRLARARPGSNRRARTKRAIAKLRARETDRRKDWVEKTTTDIARRFDTIRIEALDVRAMMSSARGTVEKPGRRVNQKRGLNRGISRSGWGLLASRLQDKAAGRVEQIPAAYTSQRCAACGHIASRNRKSQAVFECEACNGESCNADVNAARNIAAGRAVTVRGDLGTSRSMNREPQLCPSAA

SEQ ID NO: 35819 - protein, 363 aa, Blautia sp.
MLLSKRTSIKVSREYANLIGHMCYAASKLWNVCNYERQHYKETGMEQYPDWYYQKKAHKEDLWYKQLPSQTAQEVCKLLDKAWKSFYALKRSGGIETPRPPRFKQESIPITYMQMGIVHERDTDRVRYAASKLWNVCNYERQHYKETGMAQYPDWYYQKKAHKKDLWYKQLPSQTAQEVCRLLDKAWKSFYALKRSGGIEAPRPPRFKQESIPITYMQMGIVHERDTDRVRLSLPKALKKYMEETYQIHENFLYLENKIFRGMDQIKQLRIYPPEKGNCKIIVVYEVPDQEELPQNGHELSIDLGLHNLMTCYDSENGKTFILGRKYLELERYFHKEIARVQAQWYGQQSGKGVDLSAGEGKL

SEQ ID NO: 35820 - protein, 412 aa, unknown
  TnpB Polypeptide
VIAKHRQRSGRKTELGINETQKIATRVFQAVNRYKLGLGGRPRFKSLSRGLRSIEGKSNKTGLKFNIEKSVLSWCKHDYCVFIDPQDDFLQRALRSEGRSGFKKVKYCRLVRKTIKGKNRFYLQVVLEGQAPIKHIYASTSERLSIDPGPQTIAVFSDVWAGKIKVSPSAQVDEKRLRCIQRSMDRSLRKSNPDCYESDGTLRKGCVLKKTKGYEKRIQRLQECHRKAAATRRCEHGQLINLLLSMAGDIRVEKNQWKAFQRGHFGKSLGKSGISGFIERLKSKAESAGLKVTEVKPYKLKLSQYDPYTDQYRKKSLNERWHSLGESSEWIQLDVMSALLLQCADLEEEKHIPTEVIKTLEGVKQLLRDAGYVILKPSSNGESNPTFASEPKAVTPEKVRLEIFCGASDSYL

SEQ ID NO: 35821 - protein, 439 aa, unknown
  TnpB Polypeptide
MIRAYKYKMKPTSDQEAYFAKCFGCMRFAYNYALSMKIKAYTDEKKSMSFFDLCTIIRELRKGDEHKWLNDVPATSLNYSLLNLNNAYNHFFKTKAGFPKYKSKKHCRDSVKFDAQKTKYDFSSFQVRIPKIGWVKLCHNRTFDPSTVKVNSTTVSRDACGTYWCTVSIEDGILSEPKAKVTKETAVGIDVGLSVFAVLSSGEIIPNLRFSEREEQRIAKAQRCLARKNRGTKDEVPSSRYVRYRTKLARIHRSVENRRTDFLQKLSTELIQCFETICVEDLNVNGMMRNHSLAGSIASASWSSFVRMLEYKSEWYGVNLLRVGRFDPTSQLCSACGHRNPGTKDLSVREWTCPVCGTRHDRDVNAAVNIMNTAIEKHFNKQSPAVTGITDADGADSESNIGTGSRICDYASVETSMRRVKKMKIQPQIAVTLHKHTAE

SEQ ID NO: 35822 - protein, 474 aa, unknown
  TnpB Polypeptide
VAGVAARRAVSAGRSFHSVRTDPRLPRSPTRLLPARRPAARHPRSGTRSLEARHTDAELIRNGSPPHLLRNVGGTRYHIRMSRYRLLPSASQEAPLRDHCAHARFVWNLAVEQHSHWHLGKAGAPSYLEQCRQLTEARAEYPWLAAGAQMVQQQALRDFRQAMVAFFDPHNPARRPTWRKAGCAEGFRIVAVKPHEIRRLSRHVGAVRVPKVGWVRFRWSRMVPHDVKSYRVTLDRAGRWHIAFATLPAQVPSPGNGEVVGIDRGVAVSAALSTGELLHVPGLTPGERKRKVRLQRRLSRAKQGSNRRSRAKLALARLTARETDRRKDWAEKASTDIARRFDVIRLENLALRQMTQSAKGNVANPGRNVRAKAGLNREILRSGWGLLARRLEEKAPGRVQKVGAAFTSQRCSACGHVDEKSRKSQADFSCTVCSFVCNADVNAARNIAAGHAVTARGGVGDARPVNREPQLLLQ

SEQ ID NO: 35823 - protein, 152 aa, Enterococcus sp.
  misc_feature (152)..(152): Xaa can be any naturally occurring amino acid
MEQLKAYKFRIYPTEEQEIFFAKSFGCVRKVYNLMLDDRKKAYEEVKNDSSKKMTFPTPAKYKKEFPFLKEIDSLALANAQLNLDKAYKNFFRDKSVGFPRFKSKKNPVQSYTTNNQNGTVALIDSKFIKVPKLKSLVRIKLHRQPKGIIKX

SEQ ID NO: 35824 - protein, 443 aa, unknown
  TnpB Polypeptide
MEKSSQPLRIISREARRKSVTKTQAQSKKERKPKNPNLRNKAYKFRISPTKKQIGKMEWTLRRCKELYNAALEERREAYRMNGVSVSYTMQAIQLPAIKELREEYHDIHSQIQQDVLKRLDKAMQAFFRRVRNGEKPGYPRFKSGDRYNSFTYPQGGYEIINKRLHLSKIGHIKIKLHREMKGTIRTCTVKREGEQWYAVFTTEYEFDSSMTFHPSEEEVGIDLGINSFAALSDGTFIENPRVYRHAEEEIKEAHKKIARRKKGSHRRNRAKKELSRLYRKARNKRRDFLHKQSHKLTKQYGTLVFEDLQIDNMTKAPEPKQDENGKYLPNGAAAKGGLNKSILDAGWGAFVTICSHKAAEAGGKVIKVAPHGTSQACSGCGCVVPKDLSVRWHACPHCGCELDRDHNAARNILHRYHLQKQNGAGSVPQRSPRGRTVEVPGL

SEQ ID NO: 35825 - protein, 522 aa, Thermus sp.
MRSSHFQGVQAKLNFPRKEDKGAVLNLMRRFSSARRYAYNRLVEGVSPKELWSVEGPLGRLFGLGSYYIQGVLLKAEMALRSAKERGIDPKKVVFGGRKLFLDLRKKHDLKAWKKRKQEWKERRQGLLYCRGKKRAGGNPCLRLEVKGGVLQLRISLGNGTYAYALVQTTHPNLGQLLQRVYARESYNVELTLKEGEVYANFTWEEKAPPLVHTRDKGVLALDVNAEPYHLALALVGPDGSLRYHFTLPLDQVDRAPNRGAKETLLWMVAHEVTDFAVANGVAIATERLKHLRKSRRGDGSGRSFRRIQHRFAYASLLSKIHTLAKRKGVEVVQVNPQDTSTIGMLKYAPQLSLSKDVAAAYVIGRRALGFGERLPKNYRALLDDPRFREEAETFYRERVEELKEGVKAERNPYLKRRLSREKAKAEKALVLLSPRSSSGSRKGSTDGRNSYGAHPWRVLRVGLFLPFLGLEVPRDLSRLKPVLVQGPPLCRDRGRGKEGGPRSLLPGRADGARSGAVRDLA

SEQ ID NO: 35826 - protein, 384 aa, Thermus sp.
MLKAFKYRLYPTKPQARDLERTLELCRQLYNAALQERREAYRKAGKTVGFYEQKRHLPEIRAELPEYKSVHSQVLQNVVERVDRAFRGFFRRVKEGKKPGYPRFKGKNRYDSFTFPQAGTTGVKLQESGKRVLLYGIGSVKVKLHRPLEGRIKTATVKREGEHWYIVFTCEVEPKPLPKNENAVGIDLGTNPNFLITSDGEMVQAPRYFQKAQDKLAAAQRNLARKKRGSNRYKQARRRVAKLHRKIANQRKDFHHKLAKKLVNRYGTIVHEDLNVLGLARSHTAKGIHDAGWAQFLQILAYKAAEAGRRVVKVDPRYTSQDCPVCGHREKRPLWVREYTCSRCGVLLHRDVAAAQNILARAWTEPSGTGTVLTVSVGPRSPGI

SEQ ID NO: 35827 - protein, 382 aa, unknown
  TnpB Polypeptide
VRRTFKYRTYPTPTQCAALHGQVNEACRLYNAALDERRSAWRMNGISLGYYDQANQLKEIRATGGVGIANFSACQDVLRRVDKTFAAFFRRLKAGEKQPGYPRFRSRLRYDSLTLPSWGDGCAVRPSGRLYLQGVGDLKLKWHRPLPADAKIKTVTAKRAAGRWYVCFSVETPKPEPLSPCDLGVGIDVGLTTFAVLSDGTEVANPRHFRAAERRLRLAQRKLARRKKRSRRRLKVRQEVARVHSHVANQRRDFHHKTAHTLVHGYGLIAVEDLNVKGLVGSMLAKSVHDAGWSQFISILSCKAEEAGRTLVKVNPAGTTQDCSACGRHVPKTLSERWHSCVCGLSISRDLNAARNILQRALAQGLGWSLQAQTVGVARAVA

SEQ ID NO: 35828 - protein, 398 aa, Streptomyces sp.
VATNCVKRAFKYRFYPTDGQAAELLRTFGCVRKVYNLALEARTEAWARQERVNYNQTSAMLTAWKKTEELAYLGEVSSVPLQQALRHLQVAFTGFFGKRARYPRFKSKKKSRKSAEYTTSGFRLREGRLTLAKMTEPLRIVWSRPLPEGATPSTVTVSQDAAGRWFVSMLCDDPILPAPATTNAVGIDAGITSLLTLSTGEKITNPRHERKDRARLARAQRELSRKARGDGANRAKARLAVARVHARIADRRRDFLHKLTTRLVRENQTVVIEDLTVRNMVKNHRLARAVSDAAWSDMRAMLEYKSAWYGRELVVVDRWFPSSKLCGACGAIRAKLPLDVRTWTCECGAIHDRDVNAAKNLLAAGLAVSVCGAGVRPQRESSRTGQAAMKQKPPRREP

SEQ ID NO: 35829 - protein, 431 aa, unknown
  TnpB Polypeptide
MKVATKIRNNRRTTCPEGWVPAGAKAPLRLTKKQEQYCRRAIGINRFCYNLAVATHRFCRNNRLSWPSWQDIYKEFNACKRQDYPFATEAASRVAEGAFMDFGKALANWRNPNIKARAPKFRKRKATGSGSFRAASGTAQLRYNGKRRIQLPGLGSVKLDCTLPKGIYHEAHIKGENGRWYICLKRWKAPEPVPQLDPRTDGAVDTGINPHATDSDGQTYENPKAYYRTRRRLTRWQRAQSRRTPKSRGWWEAQRRIDKCHRRINGLRRNAVHQMTNTLTRKYNQLVIEDLNIAGMMRGRTPAAQADAAMGEIVGQIAYKAQWRHTSLTKASRTFASSKTCSTCQYKNAKLKRERYWTCPNCGASHERNINAALNLKNLLTPPGRGEELRDGKALANGIDVGETGPHDRRTATPLHEEAKLTVCELNVHTP

SEQ ID NO: 35830 - protein, 160 aa, unknown
  TnpB Polypeptide
MRKLVREQRRLSRREKGSHNRDKQRIRVAKVHEKVTNQRNDFLQKQSTMLVRENQTICIEDLLVKGMIRNHKLAKSIASVSRAKFFEMLEYKAVWYGNEIRKVPTMYPSSQTCSSCGYRNPLVKNLRIRIWECPGCHAVHDRDTNAGINILKKGLQLQSA

SEQ ID NO: 35831 - protein, 391 aa, Bacteroidetes sp.
MQSYKIRLDLNNKQATFAKKHAGVARHAYNWGLAQCKLAYDNKQKHPTAIDLHKRLVAEVKKVHAWYYEVSKCAPQEALRNVEKAYKRFFQKKSAFPKFKKKGRQDSFYLDGVIEVRANKIKLPHFGWLRLSETIEKDKNDKYPVIKNVTISCRAGHWFVSFKVDATPSLPTKHTKKPAVGVDLGIKTLATLSTGEVFPNLRPYKQYKRKLKLAQRKASKKYKKGAKEQSKNYKKAQARVAKLHYKIACIRQDALHKLTTHLAQNHREVVIEDLNVQGMSKNHNLASAILDGGFYEFRRQLTYKCDWYKTTLTVAPRFYASSKLCSGCGEKKQDLTLKDRVYHCEKCGLETDRDLNASLNLEKLAVSYTVSACGASRKPVPNGAGGQRNKK

SEQ ID NO: 35832 - protein, 397 aa, unknown
  TnpB Polypeptide
MILQKTITAKLFSLTRIKEAKITSEYWNFQKALKGEDVSLYSATKQQAQRNRKRWNGCREFPLIIRRDSFKIKENMLKLSRWWAKIPVFGGSIYCPIQLPYVQEPLLKEDVRETKLLRRGHEWFLHITVQQNIKLNVPSASVIAVDFGERHIATSVEYADGKMQNPHFYGTEVRGIRRHYAWLRKRLGNKKALATIRKIGHKENRGVNAVLHNISRAIVDRAKELNAVILLGSPNGKSMRRKARGRRFRRIVYSMPYYRLTQFIEYKALQEGLTVVQANEEWTSKTCSKCGEISQRPRQDLIVCPHGHMLNADINACQNLIKRFLDHWLRDGAVLAQPMNFSNDLREESHDLNRGSVKSSILHYFALPPTMVIRVSAFIHTLKDGDFSPLELNLLIG

SEQ ID NO: 35833 - protein, 377 aa, unknown
  TnpB Polypeptide
MTSQPLPTAATVGQLDRQPIHRTLPKIGTVRTCERTRRRERLVRLGRVRILAATLRRVGERWWSCGSSSSGRRGAPRGLPIGARSDGVPRPASWGAPHRGHPDPASRVGVDVGVRWLATMATAEGVIERVPNPAPLARNLTVLRRRSRSLSRSQCGSNRCRRKERRRARLQAHLAALRRHGIPRLTTRLATPHGRIVGEGLDAAGRLRQKGIPGARARRRGPAEAALAELRRQLRYQTPWYGSEVVEADRCFASSRTCTAGGCLQDLGWAERWMCSECSGGWRQDESAATNPDARWLGGLEWDLHEAWKREPMGEPRGGVSPGSEGLGLGEPARVTPPGGLRRWVARGAPRQWRDPRHVLASQGRLAIPRATSPPPC

SEQ ID NO: 35834 - protein, 461 aa, Moorea sp.
VYKTIPVKANFSDVEKVFWEFQCQQSNSLFNCAVYYAKQKHYQWLEGQKAYTTFWRGDELRCGWKTYKCATKYPELDKALKLSPHYKGMAAQSAQQTLKTVGEAISSYNKLVGLYYQGKVDRPRFPRYRKSGGMASVTFPKQALTYKEGLFYPSVSKESKPELLTQITLEPPDFIDPDWVKEVTIRPCYGQLWLDWLIDDGKPPVTTNPNLNYSQAIGIDHGGDNWLTCVSTLGKSFIIDGKKLKAMNQNYCRLVAKYKSGKSEKYWDSNLDRIQLKRNNQMRDAINKAARFIINRCLSDGIGNLVIGWNEGQKNRSNMGKQGNQKFVVIPNKRLIERLKQLCSEYGINLIITEESYTSKASFLDGDSLPNYGAKPKGWRPSGKRVRRGLYRTASGKLINADTNGAANILQKVTTQSFDLTKVAREALTLPHRYDLFTSLSRSYRISCEASAGSPSCSTSL

SEQ ID NO: 35835 - protein, 423 aa, unknown
  TnpB Polypeptide
MTDKKPKKKRIYKDRSNILSLTERHVISEHHPFFQECDALCFLSKNLYNATLYAQRQSFFDDDFKNYYEVNARFTQEDQVDYRNLPAKVSKQVQMLVDKAFKSFFALTKKKEEGDYDKPVRLPKYLKKDGRQMINYEKGALSIKDHEDFRLIKLSKTDIVVKSAVPKGQITNVRIVPCGNHYVIEVVYDIVKPSITPSFSRGAFADPGMNNLLTVTSNVFQPLLYNGRQVKAVNQLYNKEIAHALSKLPEGQTWSKRASLITHKRNMRIHDLFHKITTDLVNYLVENDIDTFIIGHNVGQKQNINLGRKTNQNFVSIPFGKLRSMLAYKCERVGIHYVETEEAHTSKCSFTDRETIEHHDAYLGRRVKRGLFVDASGKEINADVNGSLNIGRKYMEAMGIYTDDLHEGLLSHRHNPKMKTIRP

SEQ ID NO: 35836 - protein, 278 aa, unknown
  TnpB Polypeptide
LSTLEKGKPIYLPLNRNPYLDECLMKGDKKRFVQLRLDGKKCVISAIVEYDKAPLRPSDSSLGLDFGMVSMFTTSDGEQHGLTSFAKLKIWDEELIALTKKLQEKGVKLTSNARYVQLQNRIQSYFKNEICRILNKLAKKNVGVFVVEQLDFRASGLSRKMNRLIGRTYRSIVKAKLARLEEQFGIQIVSVNPAYTSQECSRCHYVSKNNRKSQKQFICLYCYLHCNADVNAGRVINQRRSLISEFPVYSKKGTSSAIRCQVREASEECHRRYCFNNE

SEQ ID NO: 35837 - protein, 433 aa, unknown
  TnpB Polypeptide
MPLKAFKYRLYPNKETTSKLYWTLNRCRELYNAALSKYKDAYKQHIRTRRYQNEQGHWIVADASFGEGAMMQANRRVNTVTYQQQQNDLPEMKHEIREEYQDIAAHVLQDVLRRLDKGMKAFYRRVIRGMNDRIREGQTPGFPRFKGRDRYDSFTYPDGAGWKVEGNTLHLSKISTLKVKMHREMQGKIKTVTMKKEVDQWYVTCSCEVADAPKLPVSYEDVGIDLGVSHLATLSNGSMIEHPRYYRRAKKKLEVAHQKVSRGKKGSHRRNKAKKQLGKAHRKIANQRKDFLHKESRKLVNQYQVIVFEDIKVSNLVRKPKAKQDEEGKYLPNGAAAKGGLNKSILDAGWGMFVSMCKVKAEEARRCMIQVSPKFTSQICSTCGTVRKKELSERWHSCECGAELDRDVNAAMNILTRGYKALSGGTRPTPLQA

SEQ ID NO: 35838 - protein, 387 aa, Firmicutes sp.
VSYIVSVIRGYVYRIKPSNYQKELIEKTFGCTRQMWNVLLSERETIYEMYREYPELLHSHTYTNPAALKHFYEYMYEVDSQALTTSWLNQKNAFTNFFNGTHDKPRMKSRHNPVQSYTTHTISNNIRLDGKKLKLPKLGWIKIKLHRDLPNDSIIKAATIKREAGKYYVSLRIQYEQETPTIKRNSIIGLDFSLRHLYVGSDSTYGEYPMYFKNSLDKLARAQRVLSRRKKGSHRWEKQKRQVQRIHQHIKNQRNDFLHKASRYLVSNYDMICIEDLDLKEIAKNKHFRKSISDTSYGTFTRYLEYKTKDEGKTLIKINKYYPSSKTCSICDELHDISLSQREYTCDCGNEMDRDLNAAINIATEGLSKYLYKEYGTDSIARSSCAH

SEQ ID NO: 35839 - protein, 377 aa, Salinivibrio sp.
MKKKAYKFRFYPTDDQALLLAKTFGCVRFVYNRILKIRTDAYYQNGTSINYSAASKILTDLKKDPEFVWLKEVASVALQQGLRHQQTAFTNFWDGRAKYPTFKKKNARQSFSLVGTAFRYRDGNIYIPKSKDPLDIRWSQALPCEPSTITISKDSAGRYFISCLCEVDIKPMPICAKQVGIDLGLTDLYITSNGFKSGNPRHLKKYEAKLAYLQRMLSRKKKGSKNRNKMRLKVARIHAKIADCRMDATHKATRKLINENQVVYVENLAVKNMMKLPTLAKAIADAHWGEFVRQLHYKGDWAGRNVIELDRWFPSSKRCSTEGCGFVNESLPLNVRKWTCPKCGTRHDRDVNAAKNIKAVGQTVLASGATGSGLKAA

SEQ ID NO: 35840 - protein, 380 aa, unknown
  TnpB Polypeptide
MFMETVAYKYRVYSQNRNHQKRLSELLRTAAWIYNHCIALIKRYYRLYHKSLAKPKLQAHIAKMKKRCYTQWEQLNSMAIQQIADRIYEGYKRFFDRQAKRPPTFRNWRKYRSVTFKSSGWTLNGNVFTINKLKLRLKFHLSRLVDGKIQTVCLGRDAAGDWWLSFTFRKGKKAQNKPMTGKTAGFDFGLKHFLTGADGMKIDSPLYLSHAVAQLRMKSRKLSRKVKGSHRRAKAKLELARLYHHVANLRKEFHWKLALQLVSDYDAICLETLNMRVMQRMWGRKVSDLGFSDFVNILNKQCAKYGKKLIQISRWAATSKTCSVCGHHESEMPLNIRKWVCPKCGAYHDRDVNAAQNILRVGASTLGRGNRRPAVAGSSR

SEQ ID NO: 35841 - protein, 387 aa, unknown
  TnpB Polypeptide
MLWYNCHIRTRGGGNMRTVVKTYKFKLYQSKKNRHLDRGINIAASVWNYCIAMHRRYYRLYGKHLSAKKLKIHITKVKKTLHPEWQALGSQAIQDVVERIDRSYKAFFDHVKQKRHGRKSPPHFCKRERYKSFTLKQAGYAFHEDSNCVTIMGRKYKYFKSRSIEGKIKTLTVKRNTLGEFYLIVVTKQECNDVLPRAGKAVGMDFGLKHFLNLDDGSVIDSPQWYKASLNELRAAHRAVSRCQKGSNNHKRAIRNLERVYQRISNRRRDWFFKLANQLVSEYAIICIEDLNLDGMKRLWGRKVSDLSFAKFVSILEWVASNAGSTVVKIDRWAPSSKACHACGTVNTGLALKQRSWTCECCHTTLDRDTNAAINIKRLGLGQLKSA

SEQ ID NO: 35842 - protein, 423 aa, unknown
  TnpB Polypeptide
MSRHVRTLKIPVHYLTTKRKLCILDRLTARLTYAVRLFCEEAEKAGCVPKTRREIRQFSNHVAEKTGLSAGFIQQAEDTALWMWRSYRELHKKWEFMLKRAEKGTRWHKKLLKREPSPSCTSKRSKLRKIPTLFDNRTGEIQRASVKLTEWVAHISTLKKGETTDILLNPSEWHRKMLREAEKIKSFQIVKKNGKYYVHVLCVYRVSSPEPKGIAGVDLGLNRPLSAVLVDEGFRFSIFRNGKQERLKELSNRVSHLRRLEKWNVLKKLRHRRLNIAKEHDRKLAKEYAEASKGYYTFIGYPRYIIYQKFRGNGEKLGRKMLHGWSFLRQAYYIVHEKAKAGDEAEIVNEWWTSSRCWKCGAKVERPKQSRIICENGHQYDADFNGCMNILQRGYASLRSKTLASIPTLNRAGATVDIAQNRR

SEQ ID NO: 35843 - protein, 548 aa, Cupriavidus sp.
MKPRISPLPLALALGVPHLTLGTPVFAQSGPVVQDLRGADGGHCAGSNGCAGADGRSDLVLTQSGLNIKAAGTAVTLDVRGSNGGDCDDVDSQNHWGGKSGMGRIIELSAVANMRGSSMSRRCVDAFRYLVTKTKCTCRRKTQCLPCPMSLSSLIGQEYDWAMQRLQAFKYELMPNGEQQRNMRRYAGSCRFVYNKALALQKQRYDQGEKKLSYAGLCKQLTEWRNSTETAWLADAPVHPLQQTLKDLERAYTNFFAKRADFPRFKKKGLGDSFRYPDQKQIKLDQTNSRIYLPKLGWLRYRNSRDVLGEVRNACVSLSGGKWFVSIQTERKVERPVPKATSAIGIDMGIARFATMSDGTFLAPLNSFRKHEARLRRAQRAMSRKTKFSNNWKKSKARIQRIHARIGNARLDYLHKATTTISENQAMVCIEDLKVRNMSKSAAGSSGQPGKNVRAKSGLNKAILDQGWYEFGRQLEYKLAWNGGWLIAVPPQHTSRTCPCCGHVSAENRQSQASFACVACGYANHADVVGAINILARGHRVAACGESA

SEQ ID NO: 35844 - protein, 443 aa, Cupriavidus sp.
VNVIVLPIELHQFSFEICANAGKYVAQVLCRMSLSSLVGQEYDWAMQRLQAFKYELMPNGEQQRNMRRYAGSCRFVYNKALALQKQRYDQGEKKLSYAGLCKQLTEWRNSTETAWLADAPVHPLQQTLKDLERAYTNFFAKRADFPRFKKKGLGDSFRYPDQKQIKLDQTNSRIYLPKLGWLRYRNSRDVLGEVRNACVSLSGGKWFVSIQTERKVERPVPKATSAIGIDMGIARFATMSDGTFLAPLNSFRKHEARLRRAQRAMSRKTKFSNNWKKSKARIQRIHARIGNARLDYLHKATTTISENQAMVCIEDLKVRNMSKSAAGSSGQPGKNVRAKSGLNKAILDQGWYEFGRQLEYKLAWNGGWLIAVPPQHTSRTCPCCGHVSAETGRARRASPVWHAAMRITPTWSARSTFWRGGTALQPVESRRSQAALRSRNPPK

SEQ ID NO: 35845 - protein, 433 aa, unknown
  TnpB Polypeptide
MLEAVMVALDPTPAQERLLLSHAGAARFAYNAGLAHVRAAIEAKEKPEWSLYGLRRWWNANKDTLAVNADGTPWWRENSKEAYSSGLESLANALSNWSKSRKGERKGRRVGFPTFKAKDRQRPRFAYTTGSFGLIEGDLKALRLPRIGRVHCMENVTGRVRGAKVVRMTVSRRAGRWYASLTVERDAPTVKQAPKAGAVGIDLGVKTLATLSDGTVIENPRCLAASERRLKRAHKALSRKTRGSKRRLKARNKVARIHARIASRRRDLLDKLTTWLAGTYSDISIEDLNVAGMVRNHRLAKAVNDASFAELRRQLEYKTARTGAALRVVDRWYPSSKTCSRCGRVKAKLSLTERTYRCEHCGVTMDRDLNAAINIKVAGSAPETLNAHRGTARRNDPSGRATLDPVKCEPSRGDNRVRLGADGRKTVLQATTN

SEQ ID NO: 35846 - protein, 249 aa, unknown
  TnpB Polypeptide
MFASLVVDDGEPTPEPPAQPERCVGIDVGILKYVHDSDGFAVGSLDLSDEQERLEREQRNLSRKERGSNNWQRQRREVAKCHLRMKRKRRDFLHRLSNYYATEYDLVAVEDLNIAGMMQFGSNSRNRASAAWGTFLRMLGYKCEHEGTHFVPVNPMGTTKECAQCGVETSKPIWVHEHSCPVCGFEADRNANAAYNVLARGLEDVGVVHPEGTPVETALPTSIHSVDAKRVIDPGSPALNGASAQARAE

SEQ ID NO: 35847 - protein, 619 aa, unknown
  TnpB Polypeptide
VVRRSVNSSTGLPARISSSSQVTKLRFSETRFHPYSRDTRATVLRWSASSVSRSASSFVCAYMPRGSGVSNSKYRSPFSPLNTASVETYIIGTPAFWHAEATLKVPSALTSQASWGLFSQRSRSVIPAVWTTRLGAAERTTSPTSASSRTSMCTSVLVPILASLSWYVAVTSHPRWDASSTRYCPRRPVPPMISSLIGARLSPGRYNGDIQSGGKSASSGMIEMAARAAHGVHRTIRLKLDTTREQEEVLFRTMDLYKKAFDISAQWGFGNRNCNKIDNHKATYRAVRELYPELQSYLVEGARDLACEALKQLRCKKLPQRDSWSSIRYHRKAAGVYLRSGFAKLSTADGRLKVTFRLAEYHKRYMDWTVRSSNLAFDRGLRTFFLCVVVESASPPSMASGPVLGIDRGVTNIAVTSANQFFSVKRINAIRGRYAYLRGQLQSKGTRSAKRKLREMSGRERRFKADVNHCIAKEIVETSYGTFALEDLKGINQNKMRKGRGSEWTRRLNGKLASWNYNQLERFICYKAEEVGKGVAIVPGRFTSITCSRCGHRAKSNRHGHEFQCAKCGFQLHADLNAARNIARLGTSELSRLSVNQPNVTSHESENAQGQLQAPRWSG

SEQ ID NO: 35848 - protein, 417 aa, Gammaproteobacteria sp.
MLIHMSAPSGQSAAAIRAVRYRVLPGTAAKAHQLNRLAGACRYVWNWALGRQNAAWLGWWFSSARRPPAPTFFTLGKAFTTLRNSRGREWLRELPFAEVRYTLKRQADAWQGFFKGQRARPKFKGRGCCMGFTIPGKVRIRNGFIAVPKIGEVRLRRRGGNPWPGGKPKQAVFKREGSKWFCTVFYEVAIYRRSDDGTVVGVDRNVGQCALSTGEIIRLPDLSRLEARKRRYQRRMARQAKTSGRRKRTKSKLARTHARIRGIRSNWCHQTSKRIADAAHTVAIEDLNTKGMTKSAKGTEEEAGKNVKAKAVLNRKILASGWYGLERNLDYKAGKVVRINPARTSQTCHECGFADSANRPSQSTFRCQACGHEANADVNAARNIRRQGLAQLDGEGRGCCKARPMTRQTGGGLRQAA

SEQ ID NO: 35849 - protein, 378 aa, unknown
  TnpB Polypeptide
MKTYKFKLYRSKKNRHLHRQIDISGLIWNHCIALHRRYYRLFGKSLNAYALMKHITKLKKLPKYSHWGLVDAQAAQDIVQRIDKAYKLFFGNLKRKVKTSPPSFKKVKKYSSFTLKQTGWKLLDGNKIKIRGSVYKFSKSRDIPADIKTVTIKRDSLGNFWLYFVVEEDTDPSNRILTGNSAGFDFGLKTFLTSSDGQEIVSPLYYREAMAELKQASRKVSSKVKLSNNWRKAKANVTRIYQTVVNKRRDWFFKLAHDLTDRYDHLFFEDLSMKGMQALWGRKVGDLARSEFMDILKYVASVKGKTIGLVDRFYPSSKTCFDCGHVHKDLKLSDRRWACPDCGTIHNRDENAALNIHREGASSLGLGDVRPSLTAVAA

SEQ ID NO: 35850 - protein, 319 aa, unknown
  TnpB Polypeptide
VYNRFVAVRETMFKVGGRMPTFTQLARDLTQSKNDPDTSWLKTVSAVPLQQSLRHARTAYDNYFAWKKGDRKGPEVGKPTFKTRRGTQSAEFTLNSRFKLEHEPGCKWAFLTLPKVGRVKLRWTRDLPTVPKTVTVIRRPCGRYEASFTTITTSRITPKALHAEAGVDIGLLSLGVVRRSDGTCEAIENPRFLKNSERRLRHLDRELARKRKGSRNYEKACTRRARACQKVKDTRLDYLTKTARRLIDENQAIALETLSITGLAKTRLGKSVLDADGAPSSGLSPRWAGRRVVTSAGSAAGMPARRPAVYATSRTSPNR

SEQ ID NO: 35851 - protein, 364 aa, unknown
  TnpB Polypeptide
MNMMEAIKTIVCKLRAMEEEAEKIRETAIAFRDACNYISEVAFTKRCFNSVALHHFTYRTVRERYKLPANLAVRARDRVAKSYKQNRHRQHKFRQLSMDLDKKLFTLLRNNGDFRISIATLHGRVKLALDIGDYQRQLLNNPVRDAKITFRDDDIYVHITVRYELPDPEGSNYVGVDIGERNILVASNGFKRKGGDIKAKREHYRKQRQTLQKIGTSSAKRKLKRLSGKENRWANTVLHQISREFVDSLKEGDVVVLEDLTGIRDRVKRRKNDRANFHSWAFRKLSTMIEYKCSERGIPVIRVDPAYTSQHCPRCGVIDKRNRRTQALFRCINCGFQDNVDLVASMNLSELGAGSNSQGCCQPA

SEQ ID NO: 35852 - protein, 364 aa, unknown
  TnpB Polypeptide
MQEIRTIKLRIKDKHAKAMLAMARDVNMVWNFCNETQYLSLKHYCNRPKIWLSGYDLQKLTSGLVKCDGVEAGSSTIQQTCEEFATRLRQFRLSRLNWRVSSKKSPKYSLGWVPFKKHALTYKNGQLLFNGIFLGLWDSYGLSNYELGAGSFNEDTRGRWHLNVSVKVDVEEKRIPDGTAALGIDLGLKTMASYSNGDKFDMPKWYRLSEQALGIAQRARKKRRVKAIHAKVANQRKDAIHKETSRLVKENAAIFVGKVSAKAMAKMGMGKSVHDAAWTAFRTQLKYKAISQGVVFGEVNEAYSTQTCSCCGSIPPSSPKGRTGLGIRRWTCSDCGAEHDRDTNAARNIARLGLQSLAGGIPAH

SEQ ID NO: 35853 - protein, 400 aa, unknown
  TnpB Polypeptide
LYSRGDKSRAGNLNLRLVNLNNQWCLRVNLGNGEYVWARVIRSAKRKTDKWLDFISSIEHAEKTGDWFPYTVRIKLRNGKIYAQFSREEKLPEVSITKDNGVIGIDINAYPFHMALVHTTKDGNLEKYERINLDKLLEGSSEKREYLSWQVAHQVVEIAKRERKAIVVENLEKLPKGRRGDGLPKLRQKLQKWIYKGVLQKIEIVARRNGIQVSKVNPAYTSIIGKLKYAPLYNIDKDTAGAYVIARRGLGFKERLPKNYKALLRDSEFLSYAIAKIEDKIAKLKQEIRNERNEYKRNRLKSALWKTRKELDGLLRYLRGSEGSESAAQHTGNRKLERVRGLTHVRQKSWRVLSVALAFSCLESLRDFSPLKRVILARDWVGTAKRNGIVPPYLVRGRMH

SEQ ID NO: 35854 - protein, 377 aa, Lactobacillus sp.
MVLAGMKLRIYPNQTQQLQIKLNFGYNRFVWNQMLNMLIKRHENNPQAPLPSAFALNNLLPGLKAEYPWLKSAESTSLQATNHDLIATYQRFFQSRHGFPKFKSRKFPKQSYQSRMGIKLVDERHLKLPKLGIVRFRGCRVTGKIKNVTIRLSATGKFHAILLVDTGIEQLSKTGKKVGIDLGVADLVITSDGIKHPTIRFDKQLSQRKRYWEKRLARRRRQAQQVIAWEKHNHVLVPRELGDFKNYQQAKHMVAKYAEKIANQRQNYLHHITKQLVTQYDVIKMEDLKTKNLLKNHKLARAIANQAWRTLRLYLEYKCAWYGKQLVTVNPRRISQICSNCHYDDGKHPLDIRQWICPNCGINHDRDINAAKNILSA

SEQ ID NO: 35855 - protein, 433 aa, Acidobacteria sp.
MCGRNCQPCQRCQQPNTSSRISASGVKDADFVESFLRRWHSRSCFRIDGQKIYREPKGKIVLKTFKYRLYPTRPQTEALMVQLSEACRLYNAALQERIEAYRTHHKSINYCDQAAQLTEIRKAGDLGLPNCHCAQDVLRRLEKAFKAFFQRIKRGQKPGFPRFKSSRRYDSITFPSHGDGNKLLSSGHLFVQGVGNIKVKLHRPLHGKIKTVSVKRECEHWYVCFSVETSVQPLPETKAAVGIDLGLSSFATLSDDAEIENPRLYRQAQKKLRRAQRRVARRKKGSKRRRKAVVLLRKIHQHIFNQRNDHHHKLARKLVQQFGKIFVEDLNIQGLSRGMLSKAVHDASWASFIAKLAYKAEEAGRQLVKVDPRGTSQRCPCGARVPKKLSDREHVCTACGLIGKRDHVSAMEILRLGLSLQDVTKPDVRVCVS

SEQ ID NO: 35856 - protein, 383 aa, unknown
  TnpB Polypeptide
MQRTYKFRLYLSKLQDKEIQRHLWISKELWNKLLDATIKKYDGEKKFPTKSEFQVMVKDSGLYSQTAQGIAQRLYRALRAKVKAKKEGKKWGFPRFKSFDRMKSLYYPQNEIGFSLNKKLKVTPFGEINIKKHREIKGIIKTLTLKRESSGRWFAVFCAEQEPEQPKINNGGQIGIDLGLMTFATLSNGEIVKKPNHMRIYEDKLADTQRELSKKKKGSYNRKTAKKEVAKLHEKIANIRLDFLHKTANKLLSVYSLVAMEKLASQEMAMQGHGKGINDASWGLFTNILAYKAENAGSKVVFVNPRNTSKECSRCHQLVEKTLWKRQHNCPFCGLSMDRDVNAAINILNRAAVGTTGSNACGDVAIATPMNQEAITLPSGRLG

SEQ ID NO: 35857 - protein, 843 aa, unknown
  TnpB Polypeptide
MYNTTDSYKSKIYNVNHFLKVYINDVEIESKYILDCRPSSTLFTNGEIELGSTPSQTIELKLYKSVVPATINKVEIKSGITGEIVPVGVYNVDKAPTSDDYTVTLSLADNMIKFEFNYDGSKLVNGNNGKVKIIQVLQDMCSKAGVELGTTSFLNMNKEIAVYDNTVSARTYLSYISEQAGGFAFIGRDGKLYIRSLGQDMSNISLKLFQNFEWGEKYKITKVRFDDGIRVFEKGNTTGNTMYINPNNMFIVDQEQVDNIYEQVKDLELYSFKGNSIIDPAIDIGDILVIDGKQVLYQGSSQYSGRWKASISSEIKSKERQETTVIKKPSQKTINRRVQSSINQIDGKITQLAQETTENTEKIAEHEVSIDKISDKVSNIADLTKDTNSIKTVVLNNCLEGEILEFHIYGNNAIFKPLVLSNDLYLSDELYLTDAGSFITVTDEDGNVTDYYLKITDVLRQNGEVKDEYILENGQAKVIRRINEDGTIKDVEEIEDLGELHIVLAKGKNIIEIKEFSANIYAKWAVQNEYTDIFATKVEMSSNIEQTSQQITSSVDKKLENYSTTTEMNSVITQTAESINSEVRKKVGNNEVISKINQSSEAIQILANKLGLTANDILDIIAGNSINLSSKNITINSNNFNVDKDGKMTCNNATVKGKITSSEIDGSTIKLGGDADHPEFIADTDDGYRTTIFPLGLINEYDMSGTYVAVEKGGIGLGLFTDSSMEETASIEYNEIRIPIVSQTSLKEYKKNFEKIQYKAIDVIKDIDIYEYNLKHEKDTDKKHIGFVIGNDFNYSRKVTSSDNKGVDSYSFISLCCKAIQEQQEQIESLQRKIKEMEEDKCD

SEQ ID NO: 35858 - protein, 365 aa, unknown
  TnpB Polypeptide
LTILAHKITLDPNNVQRTHLAKAAGTARFAYNWALAEWQRQYQAWKSDNSLERPSQMALRRQLNAIKRESFPWMAEVTKNAPQMAIVQLGEAFKNFWAGRSKYPQFRRKGLDDRFSPTNDQFDVMVDDVSHLPKAENQGAVGVDVGLTAFATLSTGEKVEGPKPHRKLLNRLKKLSRSLSRKVKGSNNRNKAKRKLAKLQMRISDIRRDAIHKLTTDVTRRFHTIGVEGLNVKGMLNNRRLARAVADMGLYETRRQFQYKADMRGGIVVVADQWFPSSKLCNCCGWQNDALTLKDRAWTCEGCGTLHDRDVNAAVNLENYAVGHIAASSAVTACGGEGAGLRRKTAVKPSPAKQETNRENAHEYS

SEQ ID NO: 35859 - protein, 517 aa, unknown
  TnpB Polypeptide
MNEIRTYQPRLALSSEQAALLDAYAALYGKAERSLFARLAAGESLNVLKREFLGGLGITARQFNALAAGVRGKIASVKAVRDRLIEFAKRRIKRAEEVLAEIPDKWKRHQKRRRVATLKARLANLESERDAGKMGICFGSRKLFREQFALEKNDFASHEEWLAAWRQARSSQFFAMGSRDETAGCQSCVAAVQDDGSVTLRLRLPDALGAGKHLAIARVRFAYGHDAIVAAIGRNLSEDQAEWQAISYRFVHDARGWRVFVSIAIPEVAVISHRQAGVIGVDINADRLAVTETDRFGNPVGSWVIPCVTYGRTSERRAAIVGDAVKQVVAIAVDRRKPIAIEKLDFWKKRATLEAASGKHARMLCAFAYRRIQAVIRARSYEAGIEVLDTNPAYSSLIGKYKFASRYGLSAHNAAACVLARRVDDLGERLPSQFQVTPQLLAKNRSGHVWSLWAIVSRRDRVAHAARRRPGCSTTRSPAAPALASPARPVIPPPPAGAIPAREPSSALFGGRLGQWG

SEQ ID NO: 35860 - protein, 665 aa, unknown
  TnpB Polypeptide
MASSMTARAAPSASAAVALSTSSTTAAIAPAGGAASGCAATSSNATRKCLRVWSIPRSGVTETPGESDFTAKSSVPPPPSANTSKTSAAAASGKAISPRSTPPSTAGIEASSSGPTVAVVVPSAIPVKIEAAAASAPMRVNVRGAATAVDNHGPGCSAAPSSSATMPASTIVMPAPPHSTGTNSPVVPRSARPRQTASVVPVSSSSRARTCPEIGAFSARKRRAVSRSATCSSVSSRFIRFAAWRPPVLVRGASAVPSFRRIVGGASYVAAVCRFRLLPSPEQAAALAEHCRHVRFVWNLAVEQQQHWQPGRQAPPYHEQCAQLTAARAEYDWLAAGSQTVQQQALRDFAQAMRNFFNSTHRRPTWRKAGTHEGFRQVGVKPCRIKRLTRRHGQVWILKIGWVRFRWTRNIPGTVKSYRVTLDRSGLWHIAFAVIPESIPGPNDGSVVGVDRGVAVSVALSSGELLRVAGLSVGEAERLRRLQRRLPRARCGSNRRARTKLAIARLRAREADRRRDWVEKTTTELARRFDTIRVEDLNVRAMTRSARGSRECPGTHVAQKQGLNREISRQGWGLLIARLKRKALGRLELVPAAYTSQRCSRCGHVAPENRKSQAVFQCVACGARPCNADVNAARNIAAGRAVTARGDLGTSQSVNREPQPCSPPA

SEQ ID NO: 35861 - protein, 301 aa, Escherichia sp.
  misc_feature (256)..(295): Xaa can be any naturally occurring amino acid
VKRLQAFKFQLRPGGQQECEMRRFAGACRFVFNRALARQNENHEAGNKYIPYGKMASWLVEWKNATETQWLKDSPSQPLQQSLKDLERAYKNFFRKRAAFPRFKKRGQNDAFRYPQGVKLDQENSRIFLPKLGWMRYRNSRQVTGVVKNVTVSQSCGKWYISIQTESEVSTPVHPSASMIGLDAGVAKLATLSDGTVFGPVNSFQKNQKTLARLQRQLSRKVKFSNNWQKQKRKIQRLHSRIANIRRDYLHKVTTXXXXXXXXXXXXXXXXXXXXXXXXXXXXXXXXXXXXXXXXSGQNQV

SEQ ID NO: 35862 - protein, 207 aa, unknown
  TnpB Polypeptide
MKGVHMEQITVTAKIQIVPSDDDKTLLNTTMSAYTDACNHVSNYVFRTHNLKQFALNKVLYSDLRNRFGLKSQMAQSVLKTVIARYKTILGNQNEWIKPNFTKPQYDLVWNRDYSLTNHCFSVNTLDGRVKLPYFDKGMSKYFDHSIYSFGTAKLVNKHGKYFLHIPVTYEVEECEDAEICNVVGIDRGINFVIATYDSKHNTFVCL

SEQ ID NO: 35863 - protein, 392 aa, unknown
  TnpB Polypeptide
MLLVERHQIQATQQIVELCKQSKELYNKCNYHMRHQWFQNLKNDNWDVSLPDISVLIQLVQHEHSFKNLHNTKTAKQTVRKCLSDWNNFRKALKAYNKNSTGFISKPKPPNYKEQLAQVIFYNETIKKKPLKQGIITPTNGCFLIKSQRDFKQVVITPKKFGFVVDVQYEKESPHKVKGKGICCIDIGLNTLAAITSDQFSPILVNGRIVKSINQWYNKCPSKRNGRKRYFRLENYFHHVSNFIIEKCLHNNCGTIVIGKNDGWKQEMNLGKKTNQNFQSVPFCNLMQKINYKAAMVGIRVIFTEEAYTSKASFLDRDPLPKYVYGEESPVFSGKRVKRGLYRTANGRLINADVNGSCNIGRKVIQNEEVIQGLDRSVAATPVRVNPLKISA

SEQ ID NO: 35864 - protein, 390 aa, unknown
  TnpB Polypeptide
  misc_feature (280)..(280): Xaa can be any naturally occurring amino acid
MKQKRAYQYRFYPTSEQEQLLARTFGCVRYIYNWALRLRTDAYYKNQQRIGYHETSAQLTLLKKQTPWLHEVSSVPLQQALSHLDRAFRNFFEGRADYPTFKKRHGHQSASYVASAFKWDSKHLTLAKMDTPLDIHWSCPLPQGCKPTTVTVHKDTANRYFVSILIEEDIKPYEVIASQVGLDLGLKSIVITSDGHTYGNPKFFHQDEKKLAHAQRNLSKKKKGSKNRAKARVKVARIHARIAERRRDYQHKLSTQIIRENQTICIESLQVKNMLKNHCXAKSMSDVGWGELVRQVEYKAAWYGRRLIKIDTFYPSSKRCSNCGHVLESLSLDVREWICPECGAHHDRDINAAKNVLAAGLAVAACGESVRPGRVKVQSGTTRRSRNASR

SEQ ID NO: 35865 - protein, 412 aa, Meiothermus sp.
VPTQTLTLKLPFLNLNQVKSVEWSRLREANTALANRILAMSRAERRKLTTASFKDSELSSAWVNQTIRNVNKSKKVKVFKRLPLETNNQNWTLHKVGDTYSIAFGLLRGVKKRVPLVVHQANHRAVLEGILAGTHRKGSIKLVQSKKGVWYACISVTWEVPRPAETTRFVGVDRGQHHLAVAATPEGRSLFLSFGWIRHVRRHYATKRRRLQRASKHKTVKRLEQKEQRIIRHINHILSKKLVAFAKEHNCGIRMEDLTGIRNSKQRKATKSRADQNRDLWPYYDLETKTAYKALSAGVPFEKVPAAYTSKTCCRCGAIGVRNRHSFRCERCGYQGHTDHNAARNIGAWLGLSCLWVNRPVRALSQQGIVPVVLQVPQGGVHGTPHGCRPPGSPKGNLPPSWVSETSPKGLA

SEQ ID NO: 35866 - protein, 376 aa, unknown
  TnpB Polypeptide
  misc_feature (303)..(348): Xaa can be any naturally occurring amino acid
MPLQSVTGAVSRYLPISKARRKKKRESPEYRGHSGNVWFLRERWKKMRTVSSYGVEIRKQNIPARQTMEIYRQAVGYLTEIYAQVWEELRKIPETKKRFNTAEHMVHMTKKNTARFDFDLRFPKMPSYLRRSAIQHALGSVSSYETRLGQWKETGVLSGRPKLTCRNHAMPVFYRDVMYREGAEGKDEAYLKLYDGHDWKWFRVYLKRTDMEYLPRNWKGKKTSAPALEKRHRRYFLRFSCTEEVTLTKTPVKEQIICSVDLGINTDAVCTIMRSDGTVLGRRFIDHPSEKDRMYRTLGRIRXXXXXXXXXXXXXXXXXXXXXXXXXXXXXXXXXXXXXXXXXXXXXXVSGDAGEDIGKEKTETAPVEKAGYPKTL

SEQ ID NO: 35867 - protein, 403 aa, Kribbella sp.
MMGLVPLAVTQSDVTIAFVKVVVQVKLIPDAAQAPALEATLRTVNDRANWVSGVAFERGVPREYELRKHTYAELKVAGLGAQAAQHTIKKVRDAYTTLQANIRAGNLGKPGSRRRARAESRPIVFRPDAAHPYDDRCLSWQYDAQTVSIWTVAGRLKNLRFACSADQLKTLREYRQGESDLLERGGVFFLIAVCEVPEAEQYTPEGFVGVDLGIVNIATTSTGYRAAGRGLNRHRKRQLELRKKLQAKHTKSAKRRLKNRRRKERRHAANVNHIIAKQIVTEAERTSSGIALEDLGGIRQRVRLRKPQRVTLHSWAFHQLGAFIEYKARRAGVPLEYVDPAYTSQECAECHHIDKKNRATQALFICRACGVVAHADRNASRNIAARGETAWTAGRESRVPATP

SEQ ID NO: 35868 - protein, 435 aa, unknown
  TnpB Polypeptide
MTAMQLVEQHLIRRGDPRFATIDKAAFASKNLYNQATYQIRQAFIHEGKYLPYAEIFHRVKHLECYQALPRKVANSILILIDKNWKSFRKSLKEWKKHPEKFTGKPKILGYKHKEQGRNILIYDKQAIGKRAFKKTGKIVPSGLGIEIETKVSWEALDQVRMIPRGSCYVVEVVYHKAEKQAAVDPNVIAAIDLGVNQLAAITSTKAGFVPLLVNGRPLKDLNHYYNQQRARYQSRLAKENRKTSRQLDRITTKRNRRVTHYLHTASRRIVDTLVSEGIGTLVIGKNRYWKQEVEMGKKNNQQFVQLPHARFIDMLTYKAQLVGINVLVQEESYTSKASFLDLDPIPTYDPKRKEKPTFSGKRESRGVYRAKNGRRIQADVNGSYNTLRKAFPNAFPESLLGEQGIVGPAVAPCRLVGKSREDTGSSVSTSCLNG

SEQ ID NO: 35869 - protein, 380 aa, unknown
  TnpB Polypeptide
MRSYKIEIKPTQEQISKINQTIGVCRYLYNLYLATNQEKYDQGLPFISGMDFDKWINNVHSKVAGFEWIKDVSSKARKKSIMNGEAAYKKFFKKLSRFPKFKKKRNQDVTIYFPKNNDTAWTVERHRIKIPTLGWMRLKEFGYLPSNAQIKSGTVSFKAGRYYVSVLVDKQSISTNEVTYSQGVGIDLGVKDLAIVSNGQVFKNINKTGKVKKLKKLLKHAQRQLSRKYEMRKRNGGTAANINKQCLRVQKLYQRITNIRYDHINKVIAEQVKNKPSYITIEDLNIRGMMKNRHLSRAIGEQCLSMLVDKLITKAKYYGIELRQADRFFPSSKTCSCCGNIKSDLKLKDRTYNCTSCGLSIDRDVNAAINLRDVKKYKIA

SEQ ID NO: 35870 - protein, 514 aa, unknown
  TnpB Polypeptide
MERVRRAIAVEVENPPPELYAVEEPYRKIVEEVAAYVAERGRLEKEKYNELYRRFREQYPLPAQLIQQAMNQGVEIGRSFLELKKDGRVYKPRPEVGQVSIRFAKDSWSYRKTAASAAPVKIAVSLPGGRREIWIKPHRRLWLYWWKVLRKEAGLASTLVLKWRRGRWYAVFVFDVAPKREPPAEVVAFDVNENTVAVAKVSLLSTVDAVARWNRQYVDPAVYSIKTDFGRLAKRYEAVRNAKLEELKQKYPYAGRDDEEKVQNVTDTREFRKFARRLRERRRKEGRVRQIAREVTKSPAVIITEELGKNPQEEMIGVEEKRVKKRELRHRIKQTPFRKILRAVEDKAAEGGSVVVYVSPYRNSKVCPIHFAKLENGDGWHVLRSPHGHVVDRDAAAVLNMLWKITPEGVVKAVWWDVKEVGKRLNKGIVPKEAVRKTNPIIPRPIIHAVWASLNRLKASSQWPAVLARAAPMTPAQGADEDGTRAPPQGAPAPGEEVRSVSVYLGNVCTPRPW

SEQ ID NO: 35871 - protein, 613 aa, Mycolicibacter sp.
MSTSCRGPMPCSLLMSRHTTFKFCLDPAAEQSVVLARHAGAARFGFNQCLRLVKSALSDRRADPGIKVPWTGFDLINAFNSWKKTEAAGRVFAGAATGMTELIVTGLAWRGEVCQQVFEEAAVDCGKGLRAWSDSRAGKRRGKRVGFPRFKKKTASTPSFRLRNNHPKGKTAAIRVGDNNRPRSVTLPGIGQIAVYDDTRRLRRMLAAGRAKILFATVSQYAGRWWVALNVEAADLHPAMQHQSRLASDATGWVGVDRGLSAFAVAATGDGVEVVRITDAPKPLATRMARQRRIAKSLSRKQKGSHNRRDAARKLARHHHRTANIRKHFLHRISNQLIKTHDRLVIEDLNTAGMLANRRLARAIADASWAEFARQLHYKQAWRSGQIAVADRWYPSSQLCSTCGERRRDLSLADRVFSCPNGHRLDRDLNAAINLARWGQSHHDHPRTPDPKQEAGPPTPADRTALASTPRVPVKPAWTKREPTFTPHQRHEPRNAREGRCRTTTTVVRHALALNGAREDCETEGARGGCVGGPGRPGPEAAVWSSAWVTASTPPACPPNSVLSTTCCTAGRPIPVPARGSWVWSCSTPPRTGTASGACSRTSRGRCCGCARR

SEQ ID NO: 35872 - protein, 167 aa, Lactobacillus sp.
LVRLPSKKDSYNKYTISLQLASDTPFVEKLAKTDSQVGIDLNTDNFLTVSDKAHTVIDNPRYYRTIKTKLAKAQRKLSRKQRRAIKEHRNLKLSKNYQKQRLLIARLHEKIRHQRNNFLNIISTRLINNHDLIVAENLKSSNMLKNHALAMSIADVGWRTFLEKNDL

SEQ ID NO: 35873 - protein, 530 aa, unknown
  TnpB Polypeptide
LDLNGVLLDSDPILSQLAAEIQGISAYATFIARNDTELEDGLARATAVQAATAGRQAGITMPEFLAADKKDENGEPVKDEHGEPIKSKTGRSRKEWLVRHNAVTAYRSWQERVKAVNGESSKHVSQGWKRTMNASPPSYGEDYVNLSSTDRSYALIENDPFVDGEIILKMVIQGKWYRLFFPFDSTRFLEGKVTLPIIKIEDNLPVFIFTVATDNPVVQFSGDYVIGVDVGINNYASVAVINSSTGRIVYSTTLSQRVHSLRNSVRASEKQVKQLREKAKPILYNRPARRAALEEAQLHREAASRKKRELAILAAQEIAYLSHFFDNAVVAVEDLSWIKNTMQNGRWNRGELVKWPTHYVAQNGGWVVSVNAANTSQVCHVCGEKVTHPEHKVSLCPKCGVKDRDVNAAANIAARAVPKVEKAREKRGNNSKLQEQAPLKTPMARASLKYPGQDRTKNKPTPKRKNQTVREVNLPHSPARVQQISTPVTTAPVFTSMTTVLADCLTYGVAGTSAAIKQGTITKHRLCSPI

SEQ ID NO: 35874 - protein, 398 aa, unknown
  TnpB Polypeptide
MTVTKTFRYRCYPTKEQQVLLAKHFGSKRFVYNYFLNERKSLYLKNKETLNYYDNAKSLTALKKDEQYEWLNEINSQTLQSALRDLDTAYNRFFRKQARFPRFKAKRNQQSFRVPQFVKYTDGELKIPKFKQTIKVNEDRPLTGKILFATLVKKPSGKYFVSITVETEHIPYASSNKEVGVDLGIKDLAICSDRTKHSNIKTTYKHKKKLTYNQRQLSKKTKGSNSKWKQRVRVARVHERISNIRHNHLHQISSNIVRDNQTICMESLGVVNMMKNHCLAKSIADASWGELIRQIQYKSEWNERTFVQIDRFFPSSKTCNKCKYIKDDLTLKDRKWVCPSCSIALDRDVNAAQNILEQGLKIHYSGLGTKSEYKQKREEASSLEESVSHETQGSLALG

SEQ ID NO: 35875 - protein, 330 aa, Blastococcus sp.
VRVRLDVTDVQAGMLLRAAGARRFAWNWAVAKIKTNADQRAAEATYGVERADRVRPLTFFTLATLWTAEKPSAAPWSVEHSTWTFRYALREAANAHAAFLAGRRRFPRFKARRRDRARFTVRDGLALEVGRVRLAKYGWVRIAAACQAQAKLRRLMRRGQATLQHVTVTKHSDGHWYATLTFDRAARPGTGEHTASAGPVVGVDRGVKTAAVVASANGQVTAILPASRVLRDRLRQLKHLQRAVSRSSKGSATRRRAVARLGRAHARAAAVRAEALHRCPRASARRRRGRGPSHRRTLCATGTWPPRSETRAGAKSPGSCSTRPSATAGN

SEQ ID NO: 35876 - protein, 318 aa, Escherichia sp.
  misc_feature (318)..(318): Xaa can be any naturally occurring amino acid
VKRLQAFKFQLRPGGQQECEMRRFAGACRFVFNRALALQNENHEAGNKYIPYGKMASWLVEWKNATETQWLKDSPSQPLQQSLKDLERAYKNFFQNRAAFPRFKKRGQNDAFRYPQGVKLDQENSRIFLPKLGWMRYRNSRQVTGVVKNVTVSQSCGKWYISIQTESEVSTPVHPSASMVGLDAGVAKLATLSDGTVFEPVNSFQKNQKKLARLQRQLSRRVKFSNNWQKQKRKIQRLHSRIANIRRDYLHKVTTTVSKNHAMIVIEDLKVSNMSKSAAGTLSQPGRNVRAKSGLNRSILDQGWYEMRRQLEYKQLWX

SEQ ID NO: 35877 - protein, 365 aa, unknown
  TnpB Polypeptide
MQKGVKFRIYPNKEQQIIINQTFGCCRLIYNKGLVMRNEAYQNGNKIGYLQTSAMLTELKKQDDFVFLKAVDSVALQQSLRDLDRGFVNFFQKRARHPRFKSKHNRHQSYRTINRGGNIRIVGKHIKLPKLGYVKVRQSMKIGKINNVTIEHTPTGKYFAVLNVDFEPQQMLNQGSSIGVDVGIKEFYSDSNGNTVSNPKYLEKSMRKLVREQRKLSRKEKDSSNRNKQRIKVALIHEKITNQRNDFLQKQSTMLIRENQTICIEDLKVKNMMRNHKLAQHIGSASWSKFFDMLSYKATWYGNDIVKIPTMYPSSQICSCCGYKNPLVKNLAIRNWVCPQCQTKHDRDTNASINILNKGLQMQST

SEQ ID NO: 35878 - protein, 386 aa, unknown
  TnpB Polypeptide
MKKLLKSFKTEINPTAEQKAKINKTIGVCRYIYNFYIAHNKALYDKGEKFMTGKSFSVWLNNEYIPNNSEKIWIKEVYSKAVKKSIEDGYTAFTRFFKHQSDFPNFKKKGKSDVKMYFVKNSPKDCRCERHRLKIPTLGWVRIKEKGYIPTTKDGWTIKSGTVSIKAGRYYVSVLVEIPDIKIANNGNDGIGIDLGLKDFAIVSNGKIYKNINKSARIKKLEKRLRREQRCLSRKYENLKKGESAQKNIQKQKLKVQILHHKIDNIRTDYINKAIAEIVKAKPSYITIEDLNVSGMMKNRHLAKAVASQKFYEFRTKIKAKCSENGIELRVVDRWFPSSKICHRCGAIKKDLKLSDRIYRCDCGYVEDRDLNAALNLRDALTYEVA

SEQ ID NO: 35879 - protein, 570 aa, unknown
  TnpB Polypeptide
MTLQARTFQARIASHPALDATAELLSRAERCLWAEVAKGRKPGDCKSEFLKRFGITARQFNALMVNVKGKTESLREISKTRLRDLDGRIKATMRTIKKLETRMPTNPEKRQKAKFTLHQKKRRHALLRDRKTAIRAERKRAAPSLCFGSAKLFNAQHHLEANGFADHEAWLEAWRADRASQFFCLGSKDETSGNQTCTASVDEDGTIALRLRLPDVIWRELGTPKHLAIGLIRFGYGHEVIVAAIKAHADGRGEALSWRFVKDAKGWRVFVSTFQPLDDTAIDFANGCLAVDMNAGFLAVAFVDAAGNLKGRLTVPMLIQHRRTDQVEATIGDAVARIVAVAKKHGVPVAIEDLDFEAKKTRLREECSPGMARMLSAFVHKAFRAMLERRAARDGVAVVAVNPAYTSLQGRVRFMDRYGLSVHHAAALTIGRRAMNYSERLPASLSVPVGDISAAARRDVSRVALARPDRIGRRHVRDAWAKVDGSWRAALRGLRSASRLKTAGPSGVRAAQVVPTPDRSLGDDAAFLQETASSLRAHDGAIPSPESPAKLFGGRGCAITISDDQLCAAC

SEQ ID NO: 35880 - protein, 570 aa, unknown; identical to SEQ ID NO: 35879
  TnpB Polypeptide

SEQ ID NO: 35881 - protein, 375 aa, unknown
  TnpB Polypeptide
MEKSLTKTLVFQLQSDNERLLSEAYHEARWVYNQTIQLAKNGMDWDDISPRLEDKAGLVKNTTQRIVAKALDALEQSYDRDDYNTPSHEKTGPYPLRMNFTEGHNLSLEDGEIHYRVSAKPYNPVKGTLRGSPDNLELLEYALESGEWRVGTAEAMSRNGNHELHINVTHLEATVQDKTDAQTVIGVDINEDCVALSALREDDIVGSVIIDYPEVKKERHRYFTMRKRMQNAGQRAFGQVFEDKEERYVHDQLHKVSRRIVEWVQQLESPLVVFEDLKHMRDSIDYGTRMNRRLHSLPFHKLRSFVAYKAAFEEIPSDDIDPAYTSQTCSFTGCGHTARSNRRKKRFKCNACGRQDHADRNAAVNIAKKGLESLN

SEQ ID NO: 35882 - protein, 479 aa, Arcobacter sp.
MKEEKIVNLGYKYKLYLNKDQMNILNHQMYIYNQAYNICLNLWQKENSKNKDLPKENRVFRNAVSYDTVIKRALRLRKLSFSTVVTQQARINFLKAVKKAFSKETIALRLKAIENATTPKEKAKAFKLGMPTFKSSRDIFQSFNWNNQGYQILDDINSNSRYKTLRLLKTNLRFRYHREFPNNYKLSSITISKDSTGYYVSFGIEFKNKIDLVVSKDNLDISKSIGIDLNSYNFAVSANVNFIQDSNISKVTLNHLIDNGATNRKGLKYAKYVKLLERKQSRRVLKELKNSKVNKTKIKLGSNHKKTQKKLNKLTKRIANQKIDLYHKITTQLTNKFDLIVVEDLKTKNMSKSSKGNEITHGKRVKQKSGLNRTILNASFYQFVSMIQYKTIMLNDKLFVKVNPQYTSQECSHCGNIDKNNRSKQDKFKCIACGFETNPDIQASQTILKRGLESFGLGTSLVDLNKHKAFRSTSLEVAS

SEQ ID NO: 35883 - protein, 419 aa, Scytonema sp.
MITLTHHYRIYPDATQEQRLIEWMEICRGAFNYALREIKDWCNSRKCLVDRCSIEKEYILSADLKFPNEVNQLNGLPKAKKDFPKLSEVPSQVLQQAIKQLHRGWEYFQRIGFGFPRFKHYGQFKSLLFPQFQENPVTNLHIKLPKIGMIPINLHRPIPNGFVVKQVRIMRKADRWYASLNIQCNVSIPDPVPHGHPIGVDIGLSKFLATSDGIFVKPPKFFKKLQSKLKLLQRRLSRKQRRSKNYDKQRLVVARLHHQIDNTRKDFHFKQAHALCDAGDMVFMEDLDYRTSAKGMFGKHMLDAGFGQFRTIVKYVCWKRGKFFAEVDARGTSQMCPECGGEVKKDLSVRTHCCSHCGYTTDRDVAAGQNIRNRGIALISTTGLVGMETACADGLPGVEVTQSRQVSKPRKGKTRKSQK

SEQ ID NO: 35884 - protein, 391 aa, unknown
  TnpB Polypeptide
MSFHDVQVQTLSVKCKLQVLQELRSEIDVTLEKFAVACNQILETAKEHKQWNTTKLHHLVYKPVRAATGLKANHVCQAIRRVIGNAKAVKQVHKFRPTSLNLDSRTFAYNEEKQTVGVTLISGRKQFKLLIGNYQMALLRGQTPTAATLNKTKKGDYYINICVEIPTEPTGKTPKVIGVDLGRKDIATTSTGESWSGEKIQAVRDRFSKVRSNVQPKRTRSSRRLLRRLKGKEQRFQKWLNHNISKQLVSDAKSDNAALAFEDLTGIRDNLNEKPRSKTERRRTNSWAFYQLRLFVQYKALIAGVPVVFVPPAYTSQTCSRCGHLHPVKGKSYRNGKRFKCGHCGFEHDADVNAAKNIAALGASVSSPQSPGMSCQLEGQMPLFPTIQICG

SEQ ID NO: 35885 - protein, 541 aa, unknown
  TnpB Polypeptide
MRESERLMGTKARGERTSPKKKTPTFLLELPLAVEAGQAARVGAHLEAGRQFYNAVLSAGQRRLRRMRADPAWQEARAIPRTHTQERRAAFSALRERYGFSEYAFHELAKALRVSWLVEHLDAVLAQTLATRAYRALNRVCVGEARRVRFKSRGRGLSSIENKRNDTGLRFVLQKPEEGNQGIVLWKGDALLALIDWNDPVVKHGLAHNIKYVRLIRRRASSRRAAGADSQGNRYSVQLVLEGRPYHKPKHLVGSDTIGLDLGPSSIAVVPHDGEASLSVFCEALQPDAKAIRRLQRKMDRQRRVGNPEHYDAQGRIKKRGKQKLVWKSSRSYQKTRQRKATRERTLAAHRQSLHGRKVHEIVAVGNTILLEKISYKAWQKRYGRSVGLRAPGMFVEHLRRTVASTGGTLTEVPTRSTRLSQWCHGCGKAVKKPLSQRWHTCPCGVGPVQRDLYSAFLAAYLDPAEPIPSCAQYVIPWEGAEARLRAAHERVHQRANEGHILPRSFGCARAGARLPRSRSEPTPEPAFLLRRGKLEAWTER

SEQ ID NO: 35886 - protein, 397 aa, unknown
  TnpB Polypeptide
VQQHLDRGTVSVTRGGKALLRKRNNLAAARLTQAQWRRQWESSRLFLTADGEKDKAWGNETLRWNPDAGWLEVKLPAPQARLANRPHGRYRLSCPVGFSYRGDEVAAQAATGAVRYDISYDPARGRWYLDASWKAAPAPVASLDRLRQHPVVAVDVNHGHLAAAVVAPDGNILGTPATHWLDLAGRPSATRDGHLRAAISNLIATARACGARAIVIEDLDFAQARAEGRERAASRPSRGRQGRAFRRAVAGIPTGKLRNRLVQMAGNAGLSVIVVDPAYTSRWAAQHWLRPLREHHPEATGHHAAALVIGRRGLGHRARRRATGNQTAPAEAARSTQARPRTTPAARTAPRKPATPRGPRQPPGSKTRRPHRTTAGNQATHDRSGPSPAQDNILQGQ

SEQ ID NO: 35887 - protein, 412 aa, Streptomyces sp.
VKLIVQVKLLPTPVQAAALEATLHACNEAATWVSEVAFVKGVKRNFALREHTYAEVKQRWGLGAQAAQHVIKKTCDAYRTLAANLKAGNLGRPWSKRYRRATGKPVAFRPEGAQPYDDRMLSWQIPERTISIWTLSGRVKGVAFTASPEQLARLALYRKGESDLLYRDGMWFLQATCEIPETEPNTDPDGFLGIDLGIVNIATTSDGQIMAGRALNRGRLRERTLRTKLQRKNTPSARRRLKKRRRKEARRTKDINHKIAKHVVAEAERTGRGIALEDLTGIRERVRLRKPQRATLHGWAFAQLGAFIAYKARQAGVPVVYVDPAYTSRTCAECGHIDRANRVSQAWFVCRNCGFVDHADRNGSRNIRARAEALWRRGAQSTAPEPPPTARGGTGRKRSTTPSGARSASPSL

SEQ ID NO: 35888 - protein, 381 aa, unknown
  TnpB Polypeptide
VNLSMAEKAFKFRLYPDEKQKIQLAKTFGSCRFVYNHYLAKRIELYKSEQKSMNYNACSADLTILKKEKEWLSEIDKFALQNSLKDLEQAYQNFFREIKKGNKDQGFPKFKSKHDHECSYRASFTKTTAGGNIRIDRNKIQLPKLGLVKFAKSRDIQGRILNCTITKTCSEKYFVSICCTDVEIERFENNKNIVGIDLGLKEFAITSYGEIIDNPKYLSKLENKLKKEQRKLSKKKKGSKNRNKQRIKLNIVHEKITNQRTDFLQQLSTRLIKENQIICLEDLAVKNMVKNHKLAKAINDVSWSEFVRMLNYKGIWHDRIIQKVDRYFPSSQLCSNCGYKNVKVKDPSIREWNCPECDSHHHRDINAAINIRNEGLRLLSV

SEQ ID NO: 35889 - protein, 374 aa, Lysinibacillus sp.
MSKIVYKAHRFRLYPNKTQCVQMAKTFGSVRFVYNHFLDAWNTSYTSTGKGLSESSCKKALPPLKVVFSFLKEVDAIALQSACEDLAEAFQNFFAGRANKPVFKSKKRKKFSYTTKCTNHNIALFDKAIKLPKLGLVRAKVSCVPTGRILRATVSMRPNGHYYVSLLVEEELQPFAKTKQAVGLDMGVAHLVTTSDGVHIAHPHAFSKYEQQLARSQRVLSRRMERAKKDGRDIKTAKNIQKARVKVANIHERINNIRRDYLHKLTTSLVRDYDIIAVENLTVSTMLAHKPLAKSIADASWRMIREQLAYKCEWYGKTFIAIEPAYTSQTCANCLAVDKASRKGQWFTCTACGHTDHADVNASKNIKQLALASL

SEQ ID NO: 35890 - protein, 479 aa, Ktedonobacter sp.
MGVFIFSCGFWLFTGIICKGTDDRFARGVKEEGWKQVGNGRMLVRFPPDKKAAPMSIKAYKYRISANKTTTDNLDRVLNLCRELYNAGLQERRDAYETRVKRHPNYYDEASRKHLTKEHAISVYEQKRDLVEIKEVIRPEYLDIASHVLQDVLFRLEKAYKRFFQRVKNGEQPGYPRFQGRTRYTSFTYPDGASWKLDAVTRPPDKKGMVQVKLHLSKLGTVSLHLHRDITGAIKTLTMKREGEHWYAVLSCEIGNPDALPVSDEDVGIDLGVTHFAALSNGEFLEAPRHYRRTEKKLKKLQEALSRKKRGSHRRARAVKRVASAHRKIRHQRRDFAHKASRQLTNRYQVVVLEKLQTANLTRRPKPKQHEESGQYLPNGASAKSGLNKSINDAGWGLFTELLQVKAAWAGREVVFVNPYNTSQMCSGCGTEVKKDLSERWHPCECGCELDRDTNAAKNILTLGQKALLGGTRPTRATA

SEQ ID NO: 35891 - protein, 445 aa, unknown
  TnpB Polypeptide
VTIYSSYDIRIPTREFNKAFADTTEKYRAAVAFFIFVRLEEAAAFSELKTQHTQLRKMELLTNRTKDNPDPKYDFGKDFYKFPSYLRRSAIAEALGKVSSYESNLALWNRDHKGKEPGKPAAGYVYPALYRDNTYVRVDDYFAQIKVWIRNTWDWITVPLRKTDVSYIRKYCSGRIECVPTLRKKHNYWVLSFSFEEKVKLTAVPRKDQIILSVDLGINSACVCTAMRSDGTILGRKFLNLPKEEDSLMHALNRIKKAQQNGNRKTPSLWARAKGINDRISVLTAQFIVDTAVLFSAFTIVFESLDIRGKKKGSRSKRQRVHHWRAQYVQGIVTAKAHRLGIRISRVNAWNTSALAYDGSGKVIRGKEAGFKTNAICRFQNGKTYNCDLNASYNIGARYFIREILKSLPATERLRIEAKVPQCSKRSTSTYATFINLCAELHAVA

SEQ ID NO: 35892 - protein, 484 aa, unknown
  TnpB Polypeptide
MSSGGNPRGVSAEGPDPLEAFKKIVEKRKKSNKRAVRLRLLPEKHEEEILFNIGLTSVRLWNELNYEKRKLFFKNDLTPEKRIEINRKYYHKYKNFLGVNAGQIINKNEEAWNSFFELLKMKKHGRLPPHVRKISPPGYWKDRLTGKKKIRILIRNDRYYLEPTNEGEGRLVLKDFKLNIRYAGRIKWEGKQGRLEIIYEANRWFVYIPIEVGVDPPKSNPRGYIKPSYKDKKDKIFNPRSIKQRDPVRDKKAFIDVGLNNLFAVVVSDGSALLVKGGSIKSEYYWWKREISTYQAVRDLLKNAGISTWMKYHEKLLRALYKRNERLRHLYRTAIRFLAETLWSRGVEKIYVGYPIMLSQNNGNEYNNNIWWYRKIILWMIDVFIEYGIDVEIVPEDYTSVKCSIYGEIHRDGRIFRGLYICRKTGKKINADINASLNIARRIGYKIIVTRKIESYLVSHNGVKPLIPLQRANTRDPEIRNLAL

SEQ ID NO: 35893 - protein, 363 aa, unknown
  TnpB Polypeptide
MQMKGHLWIEKNLWNMLLAANQNCYNETKKFLTRNDMQKMVKDTGLFSQVAQTVSHRLQKALWRMVKLRKQGKECGYPRFKNIDRMKSLNYPQAGFKLDNKLKVTPFGEISIKKHREIEGKIKTLTLKRESSGKWFATFCVETEPRTPKINHGEYVGIDLGLTKFAVLSNKEVIKNPRHLKQYEDRLALLQQRLSKKKKGSKNRKRAKHKVALLHEKVANARIDFLHKTSTRLVNTYSLIALENLASQEMAEQNYGKQINDAGWNTFANMVSYKAESAGCRIVFVNPHNTTQECSNCHDIVKKELSDRIHDCPYCGLVMDRDLNAAKNILIRATAGLAECQASGDGDSLPSLKEEAHTIHGWE

SEQ ID NO: 35894 - protein, 405 aa, Streptomyces sp.
VKLVVQVKLTLDAVQAPAVERTVHAANEAATWVSAISFERFRLKGTVRELRTLCYGELKARGFGAQAAQHIIKRVADAYATLRANIKAGNLGPEGSKRRRTAESKPVTFRPDAAHTYDDRCLSWNYDAQTVSIWTLAGRIKNVRFACSPAALKQLTTHRKGESDLIQRDGRLFLIATLDIPEPDPYEPKGFLGVDRGITNLATTSDGDNHTGRRLGRYRRWQARKKAELQAKQTRSARQLLKKRARREARHATHLNHTISKTVVAVAQRTERGIALEALRGIRERVTVPRDQRARLSSWPFHQLGAFIAYKAKRAGVPFIEVDPAHTSQRCPRCGHTERANRRTRGSTSRSEGSRRGYSSTCPIRPPPSAETGDVTRDRPVVGGSREHKRSLSGLSRQARSFRAE

SEQ ID NO: 35895 - protein, 457 aa, Lentzea sp.
MSTVLQAYRFALDPTPQQQTDLRSHCGGQRFAYNWGLARIKENLDQRAAEKTYEIPDDQLTPARSWSAYSLRKDWNQAKHTVAPWWSENSKEAYSSGLANLATALRNWHTSRTGRRRGPKSRFPRFKGKRGTLSCRFTTGTFGLIESNRRHIVLPRIGTVRTHESTRKLARHVECGRARIRSATVSHRSGRWFCSFSVEITRADSAPPLPDTVVGVDLGVKSLATLSTGQVIPNPRHLEVALRELRRLQRQAARRTGPDRRTGQKPSNRWCKIKARIAKFNARIANARRDGLHKFTTGLVRRFGTVVLEDLNVAGMMRNHCLARHILGVGMGELRRQITYKTTWFGGRLVIADRWFPSSKTCSDCGAVKAKLPLRVRVFQCDECGLVLDRDLNAAHNLAALVDEAAGDTSSASCAGTPNKPDGNPRQTRTVRAAGTATGRPAPTGAGQRRHRKVTTT

SEQ ID NO: 35896 - protein, 421 aa, unknown
  TnpB Polypeptide
MKLTKKVVLYPNKTMTKVLDDLCDYRRYCWNQGLNLWNELYNQRVKMVPADLRKKSQLAIKDKTICFSNDEHKLLCKFPSPSHRTIQNLMVKDKAEWQYLLSSRVLQWAVKDLATAWSAFFESKKPKKKGSKKKRRKVGKPSFRSKKNPKQGFKTDRARIINGKLVLDKPRAYNDTWYGISFKGYDLPDGKIKHCAITKINNKYYAPLTVNCPEQSLPKTGKNTAIDANVNHFDYTDGSFAVCPKQLDRLYAQIKHYQRLLARKRQVNSKNATQSNQYFEVRTKLQKYYKRVTNIQNDLLHKFTTRIYQTYDTVVIEDLDVKAMQMSKKAKNLHRSLFGRFRLYMEYKAIKFNKTLILADQYYPSTQRCSHCGHVKTGDDKISLDGNKKHGTKHNEYICYECGFEADRDKNAVLNLLALAN

SEQ ID NO: 35897 - protein, 281 aa, Methanosarcinales sp.
VKNGEKKAGYPRFQGKNRYDSFTYPQTGFKIKDGKLHLSKIGAIRIFQHREIKGKIKTCTIKQEGDQWYVCFSVELLDAEKKEIKTSVGVDVGINTLATLSDGTEIENPKTLNKYDSKLRKAHRCLSRKKKGSSNRNKQKIVLAGIYRKVRNARKDYLHKASRILADTYDQIIFEDLQIKNMVKNHHLARSIHDASWGILISLTTYKAEEAGGIVELVNPRNTSKQCSVCGCIQSMPLSQRMYRCPDCGAVMGRDHNAAINIKNRYVRADCPELTPVEMVA

SEQ ID NO: 35898 - protein, 422 aa, Methanosarcinales sp.
VRGIARIHIEKFISYCVKYVIVKVTKTTVLKLTTDEDNMIEKTIDKFTEGMDYASTVVHANQKPMGAMKLQKLTYAHLRSEIGLKSQMSCNVARQTAGAYRTLQAQIRKGEAYWQLLKFEPTNIKFSYGRDFSINHDEISITTLDGRQKYGIMNYRYAEQFFNGSWKYQASELVKHKDGNYYFHLACEKETEEPDITQTSNFMGVDVGINHLAVIFTTKGRCKFFTGGEIKNIRNIYSKQRKRLQEKDTRSATRVLKHQSGREKRFMKDVNHVVSRQVIESAIEDNVSVIGLEDLTGIRKRTKVRKKQQYKHSSWAFRELQTFIEYKAHEAGIAVVYVDPRYTSQTCPTCSHISRNNRNGRSFLCEVCGYALNADLVGAMNIEVRTRAFRHDLEVQGLVVDSPDETNHLFRDESQAPSVREG

SEQ ID NO: 35899 - protein, 389 aa, Bacteroidetes sp.
MAYRFRLYPTDEQRTALAKTFGCARYVYNWALDLRTQSYCEEGKSVSYTDTSKALTKLKRDEDHEWLKEPSSVALQQSLRNLESAFQNFFDGRAGYPSFKRKHGKETARLASNAFTLYGKSLSAAKGPGALNVRWSRDLPDTCNVTSVTLTKDSAGRYFVSLTCTEEKDPLPETSKTVGVDLGITDVAVTSDGHKSGNPKHLENDLYRLKKAQRRLSRKMKGSENWKKQKRRVANIHARIADKRNDFLHKLSRKLVDENQTICLETLNVKGMQQNRSLAHSISGTGWSTLVRQIEYKAEWAGRTVVKIDRWFPSTKRCSACGHVRKTKPLSERHWRCEECGESHDRDVNAAKNIRTVGLTGAADAASDSGGHSKTRGAFVRTAHGPVNE

SEQ ID NO: 35900 - protein, 418 aa, Nocardiopsis sp.
MRTAYKCRAYPAPEQAAQLSRTFGCVRLVCNRTLAERHTAYHQRGEKTSYKQTDQALTEWKQTQDLAFLSEVSSVPLQQTLRHQHSAFANFFAGRAKYPRFKSRTGRQSAHYTRSAFRIRDGQLWLAKHRAPLRLAWSFDDVDLASLHPTTVIVSREADGRWYVTFVVEVEDPASAPEAASEVGVDLGVKDFATLSTGEKIANPRHLERKARNLARYQRRTARKQRGSANRRKAKRKVAVAHRKVRHTRADFLHRTTTRLVREHDLIAIEDLNIRGMTASARGTAQAPGTRVRQKAGLNRAVLDAGLGEFRRQLEYKAARAGRTVAVVDRWFPSSKTCSKCGYLLATLSLGTRWWTCPDCRTRHDRDVNAATNILAAGRVAARDASSGEACGAGVRRQGTSLPRSATKQETTAVRQSA

SEQ ID NO: 35901 - protein, 371 aa, unknown
  TnpB Polypeptide
VVLNRWFGACRYTYNECVALLNGVGCIPTKQGWFQWLRNRFVTNKNIQGGKVWLLNTPKHTREGAIKDFVTALKAAHTNKKNKNIEKFRMGFRKKSDSEQSILIQKGASGLRVDAQGVHVYKTFLNGPLETRHELQVPVNHDCRLLKSNGNFYLAIPVGVVSKEQVTNISNYCSIDPGVRTFASVWSPDGVSELGDSLATKLYPRLVSLDKLRSEIDTEKEHRKRKRKKAAFERLSSRFQSILKDFHYKAAHDLCSTYDNIVIPAFGSKGMSQRDGRRLRTKTVRHMMCLGHAKFRTILIQTAERMGKNVFVVSEEYTSKTCCNCGNLHEKLGGSKTFRCAGCGFHADRDIHAAFNIFLKFLKETSASICW

SEQ ID NO: 35902 - protein, 435 aa, unknown
  TnpB Polypeptide
MKRTVTIKLQLSKEAEKQLFELADIGAKVWNDVNYLRRQLFFNNEPVDFNKTEKIVYEKYKKEIGSATVQQICRKNGEAWKSFFALVRKKKSKELPKWLKPKPPNYQKENGKRKPLIVLRNDQYQIEGNKLILKGLGKFKRLEVQFKGRIHWKGKQGRLEITYDDVKRKWYAHISITVEERLVKGEWTKISRNPKGNLSAGIDLGVNNLMSVYVDNGESFLMNGRPLKSIAFYWQKKIAEHQSKLNKSSYKTSGKLKLMYQKVKLQAKHYINTAVRYTVEKLYNMGVSRIVVGYPKDIARNSDKGKKQNFILSHIWRFNYVIQRLKEVAEEYGIKVEVVDEAFTSQTCPLCGKPHKGARFVRGLYKCPVEGLVFNADLVGAFNILRKVVKTITPSLPALAGGRGNGGKALPEGSKTRFNLGLNETPQTSPPLVRG

SEQ ID NO: 35903 - protein, 410 aa, Sulfurisphaera sp.
MPNVGFRFRAYADDQTIRALKAQLRLACEMYNTLRWADIYFYQRDGKGLTQTELRQLALDLRKQDKEYQQLYSQVVQQIADRYYDARDRFFKGLAHFPKEKKPHKYYSLVYPQSGWKILESREIRTKSRKNKKKLVLLRLSNLGVFKVIVHRDFPLDKVKRVVVKLTRSERVYISFMVEGVGFSQLPKTGKVVAIDVGIEKLLTTSDGFYFPNLRPYERALEKIRKLHKVLSRKEFLSKNWFKGKVKLARGYEHFKNLREDLYMKLGKWFAQHYDVVVMEDIDVKQLVEESERKLRMRLHDVAFHELKRILEYQLEKYGKKLLLINPAYTSKMCAKCGYVKKELTLTDRVFSCPKCGWVTDRDYNACLNMLKRSGWEPSLVPVELYPLPVAKSYGQGGAMKQEAPPFRAG

SEQ ID NO: 35904 - protein, 390 aa, Sulfurisphaera sp.
MDSPLIESLNTSFFEILLMARRVKAIRATVSMKIALSEPLLALVNNYVKALRFALFWLKENVPNPNEKEVLEKVHEGLYERLKEEYSLPSKVAQDCYREALSVYKGWYNNLRRGRFPRVYKPTVWLTPKASYNVDLDNMIVRIASVGEFQILGYPRNLKEYLSWRMKEARLVVKGDKAFLKVVFEKPLEKAKPGESIAVDVNMSEIVVGKDDTHYVRIPTRLHEVHHWKSLAERLQKKYSKRWRENKRILHRIRSFHQKARRIMEDFARKVGKWVVEIAIDFGANVIKLENLENLIKNVDKLPKEFRDKLYLMQYRRIQYWVEWQARKHGILVQYVNPKYSSVSCPKCGKRMREVSHRWFKCSCGYENDRDVIAVVNLNRRGSLTLSSAH

SEQ ID NO: 35905 - protein, 437 aa, Sulfurisphaera sp.
LKRTVRLDSDYLNKWKYNVLKEIEEYQRNIVNEMINIILSEDLPTTRKKLHERFYSYYKEKYPFLPSRVIEGSYIVAGRIVKSFRERKKKGLTRKEKPEYKRVVITIPNTVNWKFNRVSVSVLTHKGWVEIPLKFTKQFIHYLYEGWRVSQELKLRLVGRRVLVWLTFEKDVEVETKEGNYVSIDVNENNITLAVFEGFKLKELRRYETGLGRIVINYSLRREEVTKGYSTKDELIKKKLRRLRERERKLDILRKSVKRVVELARDLKVKVVVGKFSSKAKERMGGNKNGKLRHRIHQWSVVKFIEMLKAQPIDVTEVSESYTSSINPFDGERLGKSKQVVEKVIKVFNPYLMTGSAHEGRGIKVIKVTARYLDGGEILLERDSIAPLNLVKKVDGRVLVFPSTSPNELRVTVYDPLRGVPVVELEIIKSKGKLRHG

SEQ ID NO: 35906 - protein, 412 aa, Sulfurisphaera sp.
VERTVKLRVKVDYKTYNKLKEVEEEYSEVLHDAIEYGLTRKTTSFTRIKAGIYKEEREKHKDLPSHYIYTACEDASERLDSFEKMKGRGRAYTDRPIIRRVTVHLDDHLWKFSLDKISIATKRGRVYLSPLFPKIFWRYYNQGWRIASEARFKLLKGNVVELYIIFKKDEPKPYEPKVFIPIDLNENSVSVLVDGKPILLETNTKKITLGYEYRRRKITTGRSTKDRDVKRKLRKLREGDKKVDVRRKFAKLVVMEAFESGSAIVLEDLPRNTPEHMVKDVRDSQLRLRIYRSAFSSMKNAVVEKAREFGVPVILVNPSYTSSTCPVHGSKIVYQPDGGNAPRVGVCEIGKERWHRDVVALYNLLRRAGDVSPVPLGSKESHDPLTVKLGRWLRAKSLHQIMIEDKMIEMKV

SEQ ID NO: 35907 - protein, 408 aa, Sulfurisphaera sp.
VKLRVRVDYATYSALKEVEEEYREVLEDAINYGLSNKTTSFTRIKAGIYKVEREKHKDLPSHYIYTACEDASERLDSFEKLKKRGRTYTDKPSVRKVTVHLDDHLWKFSLDRVSISTKKGRVFISPTFPKIFWEYYNKGWRIASEARFKLLKGNVVEFYIIFKKDEPKPYEPKGFIPVDINENSVSVLIDGKPILLETNTKKITLGYEYRRKSMTTGRSTKDREVRRKLKRLRERDKKADVRRKLAKLIVKEAFESKSAIVLEDLPKRTPEHMIKDVKDSQLRLRIYRSAFSSMKNAIIEKAREFGVPVILVNPAYTSTVCPIHGSKIIYQPDGGNAPRVGVCEKGKERWHRDVVALYNLLNRAGDVSPVPLGSKESHDPSTVKLGRWLRAKSLHSIMNEDKMIEMKV

SEQ ID NO: 35908 - protein, 355 aa, Microcoleus sp.
MAELTLTLKLPFHRLNACKASEFERLSAVNTQVANDLLAVDRKERKKLTSAAFRHIEIGSMWMNQTIRNCNAKTKVKHFKRMWLEVNNQGYEVLKSGDWFTVSFSLYRGRKRRIPLEIHAASHTEVLNKVIDGSAKLGSLKLWKSKKGIWYALISVSMDVPDACEVKGWIGVDRGQNNIAVAALPQSFGRFWNGRKVKALRRRFQKLRKSLQEAKKLQKVKQLESRERRIMTQINHEISKQLVQFAKDHSMGLRFEDLSGCRQTMKQRKKPSRMPLRTATHGLTINWKSSPAIKRFVLAFPLNLFLLRIRASRIIAMVLSVNELNISSKDSMGIGVMRIGTLLKTLGSGWDLLVR

SEQ ID NO: 35909 - protein, 282 aa, Paracandidimonas sp.
MPTSLLGWLRYRNSHRVLGTVKNVTVSLSDGKWFVSIQTEREVAQPLPQSTTAVGIDMGIARFATLSDGTFHAPLNSFKQHEMALRCAQQAMSRKMKFSSNWKRAKARVQRIHARIGNARRDYLHKATTAISKNHALVCIEDLQVRNMSRSAAGTTEQPGKQVRAKSGLNKAILDQGWFEFRRQLDYKLAWNGGYLIAVPPRNTSRTCPCCGHVSADSRLTQARFRCVGCGFEENADVVGAINVLRAGHARFACEVSDAVRSPAAGTHRSGSGAAQCRAWVP

SEQ ID NO: 35910 - protein, 201 aa, unknown
  TnpB Polypeptide
VKENLVTADDMGLDAFFTDSNKVKVYAPKPLKKALKKVRKASRTLSRRQKGSKNREKARLRLARINRRVKRVRQDFLHKVSRKQVNESQALVFETLKINNMVRNRRLARSIMDAAWGEYFRMASYKAEREGKRVVKIDQFFPSSKTCSACGHVLEELKLSTRRWTCPACGAHHDRDENAAFNLKRQGILHLRANGLVVLRG

SEQ ID NO: 35911 - protein, 381 aa, Erysipelotrichaceae sp.
VKRIKRTYRFRIYPNYSQKQLIEKTLGCSRQVYNDFLSMCIESFEKDHTFKIKKYDLIKLLPEYKETFPYLKEVDSISLQQTVIHLYDAYTKFFKHNASFPKFKKKKNDYGYITMNINNSIRIKENEIQIPKLGLVKVIIHRHLPESFKYSMVSISRKGRFYYISLIGEEEYFDYEAFIKESLDVNNSIGLDFSLSHLYVDSDGNHVDMPKYFEDSLEKLAKEQRKLSHMEKDSLNYQKQLMKIRNLHEHIANQRKDFLHKTSRTIANTYDYVFVEDLDLIEMSKRKEELKLGITIFDLGYNTFLNYLSYKLDWLNKKLIKVNRYYPSSQLCSCCGYRKSNLTLNQRSWTCPECKVKHNRDINAAINIKKEGIRMVLNSSK

SEQ ID NO: 35912 - protein, 250 aa, unknown
  TnpB Polypeptide
MIDGKSKRIKIKALASNPFIKDRLENGKLGTLRITKKSNKWIAQVAITTPSVLRDKEDGNILGIDLGIKVPAVGVTNTKKTKFFGNGKLNKHMRRKYQARRRSLGRAKKKKLLESSNHKEQRWMKNQDHKVSRDIINFAINNNVSLIRLEHLKGISKTTRTSRKNRKDLHNWSFYRLMDFIKYKAAMVGISVEMVNPVYTSQICPSCKEKNKANGRSYECSHCGFKTHRDRVGAINIITAPLIDGKASKA

SEQ ID NO: 35913 - protein, 510 aa, unknown
  TnpB Polypeptide
MVKAMKTIRQALQYPPQYAHYFAEHAALFNRVVAFYFAVIQAHEGILALKNKEALTALEKLTHATEKNLHPIMPLTTLAPDIPAMFRRAAINAALGSARAFFSSLKKWRLRKEQYEAKPTRKGKKKPCRERPPVPPRTWNKSVPFYAGLWRERAEHSIVLKVWTGACWSWLKVATLSRHLPEGFEMGSPSLVRKGNCWWLHTPIEQSFEAPAKVEQQITIKETRICAVDLNLDKHLAVCSVQTVDGTILATSFIGSGTAIAGCRKRLLGRIARNRSETGIIAEAEQDNTDLWSKIRNVDEHIAHLTSCRIVQFARRHGASMLVFEHLGNLTPEKGKYSRRGNAKRAYWMKGRIFRYSKYKAWNAGGIITCRVNPRNTSRECHRCHAPLIRYNQGQPEEGYTSGAALCFCEICQMRDHADRNASIRIGQRLIERYKEPLKEKPHALLRRAKREPKSSGVGISQAAKRIQGPSISRAKRGDHANGHGTAPRGLRRMGARPSDIAHQLRLHFE

SEQ ID NO: 35914 - protein, 416 aa, unknown
  TnpB Polypeptide
MQLVEQHVISRSDPRFAAIDAAAFQSKNLYNAALYEIWQAFIHHGTYLNYSEMDKRMQSHEAYRALPTKVSQQVLRLLDKNWTSFFEALEAYKEDSSKFTGRPRLPKYKHKTEGRNILVYTLQALRGGQSKKGIRGRIRPSGLPIEVKTRQKDINQVRIVPRHGYYVVEVVYSKEPVQAQVDPSFCIAIDLGVTNLAAITSNREGFVPRLVNGRMLKARNQWYNKRMKELQLCLPKAERERVTKQMQRITNKRNRQVDHYLHAASKAIIDLMVKEGAGTLIIGKNPLWKQEVENGRRNNQNFVNIPHARLIDMLTYKAALVGIQVEVQEESYTSKASFLDLDPIPTYHPNDETEYTFSGKRIGRRNRLYRAKGGRKICADVNGSYNILRKRKPDAFSKAKGVAAYVVQPLRLAITV

SEQ ID NO: 35915 - protein, 442 aa, unknown
  TnpB Polypeptide
MQTVSSYGVEIRKQNIPIRQTLEIYRQAVSYLTEIYEQVWAELKMIPEAKKRFNAAEHLIHTTKKNHAHFDFDIRFPKMPSYLRRAAIQHALGSVSSYESRMEQWEAAGELSGKPNFTCENHAMPVFYRDVMYREGTEGKDEAYLKLYDGHDWRWFRVCLSHTDMEYLRRNWYGKKASAPTLEKRHHKYFLRFSYTEEITLTKTPAKEQIICSVNLGINTDAVCTIMRADGTVLGRKFIDHPSEKDRMYRALGRIRRFQREHGSAQTQGRWAYTKRLNTELGKKTAGAIVRYAEENHADVIVFEYLEMQGKISGKKKQKLHLWRKRDIQKCCEHQAHRKGMRVSRICAWNTSRLAYDGSGAVTRDRENHSLCTFQTGKRYNCDLSASYNIGARYFIRELLKPLPATERSLLEAKVPAVKRRTSCVYADLRELSSEMGLLMAA

SEQ ID NO: 35916 - protein, 407 aa, unknown
  TnpB Polypeptide
LIKARHFILRVGPEQAALLKEFQEEAARCWNDIVIHARDHYAATRTWVSKGDLQKRLKGGYRLHSQTIQALTDKFVSNRQTAANLRRQGVNVRYPWREKKFLTIPFKQMAIRTGEKGTLVLSLAAGVSFDTGFVPPASINTCEILWRRGRYILSWASDYPEAKPLAGIRAGADIGEIHPVAVCDEQGSGLVVSGREVRSIKRLRNKSLAWFSNALSRCKKGSRRWRKLIAAKGRMKSTSDSRVRDLLHKATRKAIDFCVTNNISELVIGNPAGVEKDTKKKRRLSRKSRQKVSQMEFGTIKRYLRYKAHEAGIASCLTDEEGTSSDCPACGCKNHPTGRTYLCGQCGFTAHRDGKAGFMMLRKRHFDIALPDGFVFSHVQSIPKYRKRVLPACVDGPDVAPSSLAIA

SEQ ID NO: 35917 - protein, 366 aa, Lactobacillus sp.
MLYHSLFYVQSAQQTLKEANTIWSAWLKALKAYQANPGKFTGRPRMPKYLVKGQRHVFFVTNQNAKVKDDYLIIPKLGFKLKLTPHLKAIQRVAFKPVYGGYKAIVQYKTNRDIDYLPDNGRYMGIDPGVDNAFACVANIQKAPLLVNGRAIKSVNQYYNKERSRLKALQARYHQLESIVDTQQGKKPVYRETKAMRRITAWRNRKIRQLAHKASKRIVDYALSCGANTIVIGNNKSWKRSSDMGRKNNQNFIGIPHKVMIDMIQYKANLAGISVIRTNESYTSQTSALDHEKPCWENGSQSRKREGKTPINRRIHRGLFQSNNGRLVNADINGALQIIRKVFPKFSLDEGIEDAVLHPVKWSPLI

SEQ ID NO: 35918 - protein, 250 aa, Lactobacillus sp.
VTNQNTKLKGNYLIISKLQVKIKLDPKIKKIQRVSFKPTYGGYRLIVQYKTNKEISYLPDNGKYIGIDPGVDNAFACAGNTGTCPLLINGRSLKSVNQYYNKERSRLKSLQAKYHQLESTVQTKQGAKPVYQETKAMQRLTAWRNAKIRQFAHKASKRIVNYALSCEANTIIIGNNKSWKRSSDMGKRSNQNFIGIPHKTMIDLIQYKANLQGITVITTNESYTSQTSALDHEKPCWENGNRSRQKQDKP

SEQ ID NO: 35919 - protein, 267 aa, Lactobacillus sp.
LKIPKLGYVKTSKNGVLQDVKIKRYTVLLEPTGKYYLSLQVEISEPEKYSLTGKRVGIDVGMADLAILSNELKYPSFDSSYFEKKAKVWQRKYARRRHLAKLLVLQDRNKKVLCPRSLESFANWQKAQKSKAKCQAKAANQRRDYLHKLTTHLVKQYDVIAIEDLKTKNLQKNHHLAKSIANASWRMFRQMLEYKCEWYGKKLIAVDPKNTSRICSKCGYNSGAKPLEIREWTCSKCQTKHDRDINAAVNILHKATPTGQGLAMVTS

SEQ ID NO: 35920 - protein, 210 aa, Lactobacillus sp.
MSKPARLEFCKTLRLSATLFCLNHYLPLQVEISEPEKYSLTGKRVGIDVGVADLAILANGLKYPSFNSSYFEKKAKCQAKAANQRRDYLHKLTTYLVKQYDVIAIEDLKTKNLQKNHHLAKSIANASWRMFRQMLEYKCEWYGKKLIAVDPKNTSRICSKCGYNSGAKPLEIREWTCSKCQTKHDRDINAAVNILHKATPIGQGLAMVTS

SEQ ID NO: 35921 - protein, 324 aa, unknown
  TnpB Polypeptide
LIVHRVFPESQVCQVCVKLNPSGRIHVIFLVEEPEAQEEQSSKEPKKAFGVDLGIARLATLSDGRFLENPKPLERSLERIRVLQRTLSRKRFLSKNWLKTKRKLAKEHEHVGDFRRDLFFKLGFLLAQEYDVLVLEDLNAQGLIQKAETRKRRLRLYDFSFSELRRILEWEFRKREKLVLPVPSYNSSRECFRCGGINQNLTLEDRVFHCAHCGFTLDRDLSASLVLLKRAGWVPPFRCACGAPPNTSATLLRVGGGWARWSVEAGSPVREGGVAHRSHSMEMCLKPMMRSFSLVRFNHLEHLSVILFVMHVRAKYMGEEIQRV

SEQ ID NO: 35922 - protein, 426 aa, Haloplanus sp.
VAKETVNRTYVASIRNQRQVRDDLDALGFSASKLWNVGRWVCDRVWSEIGHIPRHNELTTYLKTHERYDDLHSQSSQRVLQELAEAFNGWYAKRRNGDTRARPPGYRKHGDDHPRSTVTFKTAGFKVDTKNSRVRLSKGENHKSYWTDFILCEIQTRPDVDLLAVESVQQVRAVWTGEEWTLHLVCRVTIDILESPGEKTAGIDLGIVNFAAIAFEDGRGELYPLNCLKQDDYYFSKRIARCDDSDSEQASRLNQTKSARRTHYFHTLSKHLVKRCVEEEVGTIAIGDLGRIRDDDETGEAKNWGRHGNLDLHSWAFDRFSGMLEYKAEAEGITVIRVSERDTSKSCSCCGRVRKANRVERGLYTCDECGLVANADVNGAENIRQKVSPSLACDGGDRSNGWLAQPSAYLFDTESGRFAPRDQATS

SEQ ID NO: 35923 - protein, 372 aa, unknown
  TnpB Polypeptide
MRTVVKTYKFKLYKNKKNKYLDDDINIAAAIWNYCIAMHRRYYRLYGKHLSANRLMKHITKVKRTLHPEWQSLGSQAIQDVVQRVDRSYKAFFEHVKQKRYGRKSPPSFKKRSRYSSFTLKQAGYAFHADNKVTIMGREYKYCKSRSVEGIIKTLTVKRNVLGEIYLIVVTKQECSDILPRAGKAAGMDFGLKHFLNLDNGSVIDSPLWYKASLKELRAAHRVVSRCKKGSRNRRRAIRNLERIYQRISNRRRDWFFKLANQLVSEYAVICIEDLNLDGMKRLWGRKVSDLAFAEFVSILEWVASNVGTTVVKIDRWGPSSKACHVCGTVNSDLALKQRSWECECCHTILERDMNAAINIKRMGLAQLGTPA

SEQ ID NO: 35924 - protein, 365 aa, Blastocatellia sp.
MKIIRSTKCSLKFATEAKRQQVWHVLEEYGRVVNFFIDLFWEQPVEKSALLRAVVNRPSTWLTSRLKKVAAREALDMIRAAHERDGEKATKPVHQGQRMCVSSTIATLEAPKTTTEFDAWLKLRCLGDGLALDLPIRFHKHYHKLALHPGSIRLNAYIITARHVQFSFQIETGRKRTEGESIGIDTGVNVLAALSTGLKFGLDIRALIEAINRCASGSKRQQRRRRALRQRIDEVAKEIMALAPALIVVEKLSHVTWGTKQRHRLGRRTRRLLSAWAYRYWLNRLCLACQWNRVSYRRVPPAYTSQRCSHCGHTEQRNRLNTEVFRCRACGYTDSADINAARNILSRFLTGAYGPGSKPRFMVRS

SEQ ID NO: 35925 - protein, 367 aa, unknown
  TnpB Polypeptide
MEVVYKFRIYPKKWQEEKINKIFGCTRYVYNHFIAESERQYKETGNLPRIAGQNSLDALIKGAAFLQKVADKDKFVLSMAMYEARNAINRCQLQKRNPKFPRYRKKRDNIQSYHGTKVKLSEQDKVVMLPLLGAVSCRISRPVKGRVQSVTVSKKPSGKYFVHLYCPNVEIEPLPVTGAQIGIDVGLKSYITTSDGDKYSKPGFYEQSEKKIQRLQQQLSRKPKGSNRWEKTRIKLARLEEHIANQRKDFLNKLSIKLIRENDIICVEKLDIVGMSANSPRAKAIYDASWANFLLQLRYKADWYGKKVIEVPRFYASSQICSECGQKNKAVANLNVRQWTCPKCGAIHDRDYNAAKNILKEGLRQLA

SEQ ID NO: 35926 - protein, 277 aa, Rhodococcus sp.
VSFSVEITLPARALPPTGTAAGDRGVVGVDVGVKHLAVLSTGEMIENPKHARKQAKQLRRLGRRASRRAGPDRRTGQQPSRRWLRTQEQIRAVHTRIANARRDHLHKLTTRLVRVFDTVVVEDLNIAAMTRSGGAYKRGLNRALHDAGLAEIRRQLAYKTEWTGTGLHVADRWYPSSKTCSNCQAVKAKLPLKIRVFTCETCGFRADRDHNAALNLAALAAVVDGGASSASCGRDVKDARQKPTIRPAARRADGIAAGTPHSGERGRGNPDTHAECT

SEQ ID NO: 35927 - protein, 380 aa, Herbaspirillum sp.
MIRTASIRLNIMPIQAAALFAVRAAYADACNRLVPVVRENRLWNRVALHQRAYTMLRETTPLGSQMCCNAIYSVCKAYKAQMERGRIRKDDMVPVIRFNRASVHYDKRTYSLKGDTVSLNTLNGRIVVPMILGDHQRRIVGSGKPKEAELVFCRGKWFFNLVVESGDKKQDASGLVMGVDVGENNLAATSTGKVFGGEQLRDWRDRHLALRRRLQSNGSQSAKQTLRQVSGKEARRVKHVNHETSKAIVAEAMKAGVAKILMEDLTHIRDRIKGGKRVRGRLHRWAFRQLQTFVEYKAKAEGIEVEYVSPAYTSQTCSCCGELGKRAKHRFVCEHCGLRAHSDLNASRNLARIGGTAVLPMAAVNTPDVGNMSRNVHVSP

SEQ ID NO: 35928 - protein, 312 aa, Chloroflexi sp.
  misc_feature (14)..(25): Xaa can be any naturally occurring amino acid
LSWGRADAQDIQVXXXXXXXXXXXXELYNAALSERKDAYKYAGKSISYSDQQNDLPEIKSEIREEYQDIAAHVLQDVLRRLSKAFDAFFRRCKNGEHPGYPRFQGRNRYVSFTYPDGAGWKFDGQCLHLAKLGKARVRLHRPLEGKIKTVTIKREVNEWYVAFSCEVDVPEKLPLSSEDVGIDLGVTHLATLSNGQMIEHPRYYRKAQKTLEKRRQALSRKKRGSHRRDKARQLVAKTHRTIARQRKDFRGHQERQSHQETEAEARRNRQVPAQWGKCKRRLKQVHFRRWLGNLCPTVFEQGSMGRENTHQS

SEQ ID NO: 35929 - protein, 413 aa, unknown
  TnpB Polypeptide
MLKAIKIRIYPSDEQKQFINKQLGCCRVVYNSCLAYRRDKYEKEGISITSSQAINYIVELKKDREWLKEVHSKVLQQSVMDMNSAYKNFFEKRTNFPRFKSKKDYEQKCRFPKDAFIGVRGNRIDLIKSLKDIHFKCSVKDERYLNKNQDKVHSLTLTRNKIGQYYLSVLVDKKIEPKPQTTLVIGIDLGIKDFVITSEGQVFENLHFKKSETNKLKRLQRQLSRKKEGSKNREKARIKLAKLNQKIRNKKLHYLHQVSNQLVSENQIICMEDLNIKGMMKNHNLAESISEMNFGEFKNLLTYKCLQYGRQLVFIDKFYPSSKTCHCCGYVNKSLKLSDRQWICPECNSVIDRDLNAAQNIKDEGLRKIIGWSSPEFTPVDCPTMDDKREISLKSSDRMKQEKNGSHKEYIKI

SEQ ID NO: 35930 - protein, 411 aa, unknown
  TnpB Polypeptide
MKLTQKIRIFPTPEQETVLWTLSEKCRLIYNFALAERREAYRHGIMGVNYRKQQNDLPLIKEQFPEYKWVYSKVLQFALRSLAADYESFFALRKNGYTDACPPRFKGKHYFTTMVYNQSGFRIEPGMITFSHNYNDIPLEFAIPDKFSFEDKQVKQVAISSYRSQYFVSITYELEDPPFVDNGQYQAIDLGITHIVTAVNSQGKFVVVKNQRPDKYWNPKIAEVQSRKDKCKKFSNRWKLLNKIKHKYERKRDDQTRDFQHKLSKKLVENTKAYTLIVGELDVRHMAQSKKVPPYMRAGLNRAIHNSGALGRFVHFLTYKSRRVGKRTIEIDERNSTKECWVCGKLHFMPIWKRVMNCDCGNVIQRDKNSAIILMKRYLSQNAKWTGYRVFLDNLRHTAKCKTTVSPPVGS

SEQ ID NO: 35931 - protein, 329 aa, unknown
  TnpB Polypeptide
MAFWKNEVAPELPEWCDPISFQVKKIAVRDAINALKEGKKRVKKGIIPYFKLHFRSRKSPVQSCFIPSSAIKESGIYPRVSGKGLRYAEPLPESPMDSRLIFRGGKFYLALPRKEVCAVAENQGRRIVSIDPGIRSFHTFYSPIGVAGSIGRDDFSRIVRLAQHLDDLLSRTSKAGKQRRRRMYRAADRMREKIRNLIDELHHKTARFYVDNFDVILLPAFETSEMARKATRKIRSKSVRSMMTFAHYRFAQFLKHKAFETGKVVLTVTEEYTSKTNPYTGELMTIGSRRRVRIGDDWVDRDHLGAFGIFLKALGDFPDHFRVVAVNES

SEQ ID NO: 35932 - protein, 395 aa, Cyanobacteria sp.
MSYNTFMTQSLSVKCKLIVPVGFRSKIDETLRGFADACNQILAVAKRDNCWNTTRLHHKVYKPVREATGLKANHVCQAIRRVIGNAKAVKQIHKFRPTSISLDVRTFRYVEETQTVGVTLKCGRVDFKLSIGGYQMALLRGQNLTSATLCKSKKGDYYINFVVEVDTPPTGKTPKVIGVDLGRRDIATTSTGKSWSGEQIQWVRDRFSRTWANVAFGNGFAEQRKRTRNSRRLLRRLSGRERRFQEWLNHNISKQLVQEAKSRDAALAFEDLTGIRDSLNQKPRSKMSRRQANNWAFYQLRNFVGYKAALAGVLVVFVPPAYTSQTCSRCRHVHPEKGKSYRNGKKFKCGHCGFEHDADINAACNIADLGKSVSLPESPGIVCLLEGQLPLFRFA

SEQ ID NO: 35933 - protein, 383 aa, Haloferax sp.
LSSVGPTAPTPSASRSTRLHGTRSTTNSVWKLISPQTSFRKPSDAALKPSKGCVERWKNGKRVSQPEFTSWSMLYDKRSATFYRNKVSLSTVNGRVVCEFELPSDSPTPYEQYVLSEEFEFRASTLQYDAVDDEFYFHITTRKYDSERDGEPSEVSADTEHQTVLGIDLGVSSLAVSSTGRFWQGDDYDHWCREFEKRRGEMQQRGTQAAHNALLRLGKREEAWRKQYIHTVANEIITEAVEHDCDVIVFEELTDIRERLPQAKWHHIWAFRRLYEYVSYKAPERGVSVEQVGSNHTSQRCSRTDCGFTHEDNRHGEYFECLKCGYEVNADYNAAKNIGVRYVRKETHKLRSSPKSGSGDAPVDVRVNGGMLNGESHQPLAGD

SEQ ID NO: 35934 - protein, 343 aa, Microcystis sp.
MKARYQYRIYPTDQQKRLLSQLFGCVRVVWNDTLAYCQELYRQGEKKPKYTELSKRLTQVKKTEERRWLTEVSSIPLQQSLRDLETAYSNFFTSCKGERKGKKVKPPKFKKRKSKQSARFTDNGFTVNQHCVTLAKIGDLRIVWSRPLPSKPSSVTVIKDASDRYFLSFVVEVQPEILPDNGESVGIDLGIATFATLSTGEKIDAPKPLKKRLKRLRKAQKNLSRKQKGSNRREKARKRVAKIHAKIKDTRTDFLQKLSTRVVRENQTIILEDLNTSGMVKNRKLSRAISDLGWRSFRDMLSAKSDKYGRNFRIISRWEPTSQRCSCCGNIGGKKALNIRDWR

SEQ ID NO: 35935 - protein, 434 aa, unknown
  TnpB Polypeptide
MFRNKYLYDPSKKTMTSLVSFDFQKWKKSHYFLIIYSYTKKKFCVIMLKAFKYRIYPNQEQKELLSKIFGQVRFVYNLGLETKIQVYVGNKKHLKCFDLNKQITELKNTDATWLKESPSQALQMSMRNLDNAYTNFFRGAGFPKFKSKYKKQSFQLPQGVFLSENKKQIFIPKLKFTDIDLHREFKGDIKTITISKSVTNKYYISILVDNKKELPEKQPIMLNTTVGVDLGIKDFAIISDGKKFKNHDFFKSAMNELRIQQRSLSRKQKGSNHYIQQKLKVALLYEHIRNQREDYLHKISKYLVDNYDTICIENLGVSNMMKNHKLSRAIGDMGWYKFKSMLEYKCEWYGKNLSVIGRFDPSSKTCSSCGSINKELTLKDREWKCNSCGTEHDRDVNAALNIRNFGLRNQPSVTQSEWLHCACDVETQKSLDFV

SEQ ID NO: 35936 - protein, 695 aa, unknown
  TnpB Polypeptide
MDDKFKCVTSSGTPKTGLEYLVESFSLNSEDRVVSRKGKNRRPHPSFSKMQKNSTIQQSFSIFQSSGKKIRTLDLKVLESYFRQYVMTVNLVLDRVYKNPDYAERLAKQLSEFRGRAYNLLRGEHEIRYLGNQEFQQLAFERLHRNALEQAGRIILTDWTRRSLVLSAIEHFNSSPDELFSLLEERRIPSFLIRKVRDGCEVTKNNGAGYHYTLGVLRQLRFVLDTHILDSLGIKISHRGRQRAKVISLLEQSSPKKEQVFHLLKTQVQNWKTEGYPFVTPQLRSYSVDFSASTENTPNQGYWFTIDPEREGEILLHLKLPSGINGVAHKNSPYKSTTFTFRFLNWLSRASSRDRRKADDAEKNGNVHRSERLRFRSAMFQDMHEQLMNTIEFQHSAHKRTKMIGQKDHDSETFVSLDNKVDQSRKSRRSAPPRILLRGSKAILQIPFLSPNGAVSSKIFGEREYSTQAGVDRGIRAPVAISVEKEGSFEDFLITVGPLVEKRERLRFRASELTSQLDRKKNNWDKKRSGQSYPAPILKRERHVEALWEKFRRLDREIAHQVGSQTIWFCEEHRVKKLFFEDLRSFQARAGMKNLSWFLGVNLWGRIIETVRYMRESLGHSKYSVWTVNPSYTSQTCHQCGERGIRVAVDGSTSETKGGAFFYCSNCDAHYHADINAARNIIHVQQSSVVPGRTQ

SEQ ID NO: 35937 - protein, 375 aa, Shimazuella sp.
MHKAFLFRLRPTKEQTTLINKSIGCSRFIFNHFLGQWNEAYQGTGKGLTYANCSKLLTEQKRELIWLKEVDSTSLQNTLKHFAAAFSRFFQKQNDAPRFKSRKNRVQAYTSQCNYPKNSRPTIEINGNKIKLPKLGWVKFVKSREISGRILSATIRCTSTGKYKVSILCEGSYIRAVPARKEEIGVDLGLKDFAIFDDGSKVNPSHFFRRYEQKLAQAGQVLSRRKKDGSNWHKARIKVARIHEKITNARHDFLHKLSTKLVNENQVISIENLQVKNMVQNHNLAKSITDASWSEFISMLEYKAKEYGRTLVRVGKSFPSSQRCSSCGYKNKEVKKLHLREWTCPNCKEHHDRDINAAKNIVQEGRRLIAAGLAV

SEQ ID NO: 35938 - protein, 388 aa, Rhodothermaceae sp.
MRKAFKYRLYPNRAQTEALAQQLQTHRRLYNAALEERRTAWENEQRSVRYAEQSARFTEERRTNPYYARLNFSSAQATLRTLNRAFEAFFRRIKAGETPGYPRFKGRSRFKSIYFPSYGDGCKLRQDEQGRTLLYLQNIGEIKVKLHRPWEGKIKTVTVKCEPGPNTGPDTWYVILSCDLGEVATPCRKGPAVGIDLGLKAFLVTSDGWRVDPPRYYREAQARLRRLQRRVARRKKGSGRWRKACRDVARLHGHIANQRRDFHHKTARALVQQYGTIYVEDLNIKGIARTRLAKSTHDVGWAQFARILSSKAEEAGAQVQRVDPAYTTQACSRCGAIPEEKLTLKDRTYSCGSCGFTADRDENAALNVLAKGLGYSLQSTSTPSGVLL

SEQ ID NO: 35939 - protein, 123 aa, Clostridioides sp.
DFLQKLSTKLIKENDIICIEDLQVKNMIKNHKLSRSISDVSWSEFIRQLEYKANWHGRQIVKVGKFFASSQICNKCGYKNEEVKDLNIREWICPSCNETHDRDINASINILKEGLRLITIQNK

SEQ ID NO: 35940 - protein, 403 aa, unknown
  TnpB Polypeptide
VDLTEKEIIYPTDERFDLIKTLCHLSKNLYNASLYDVRQHYFETKAYRTWQSQRPIFTKNHNPDYYALQSHLAGEVLMQVGRQFIAFFNKSGKKRIPRYKGKHDYNVVTFPRITISRRVAFDDDKQLYTYTLCRMSYNLKIQSTKPNVKMVRFVYDKVNNIIKCFKMYEVEQPELKKDNSRYFSIDPGLNNIVAIYNNIGIRPLLYNGRPIKSINQYYHKTTAKLRTKLPAKVKSSKRLKRLSFKRHNKIDYELHKISTHIINEAEKNNISKIFIGNNTDWKNGIDMGKRNNQNFVNIPYTKLFHQLQYKGALKGIEIVFTEESYTSKASFFDKDELPVYGTSDDYKFSGVRIKRGLYRDSKGNTWNADLNGAANIMRKCSDKAYKGIRKTKELIKRPILMTL

SEQ ID NO: 35941 - protein, 377 aa, unknown
  TnpB Polypeptide
VVKRAYKYRCYPTSEQAGLLNRTFGSVRYVYNRALAERSRAWTQEQKRVTFAQTCRMLTAWKNDPDTAWLYEVSNVALQQCLQHLQNAYVNFWAKRARHPGFKSKRKSRASATFTTSGFRYRDGQITLAKTSAPLAIVWSRPLPEGAEPSMVTVSRDAAGRWHISILVECPIEALPPAGAVVGIDAGITSLVTLSTGEKVTNPRHERRDRARLAKAQRRMAKKQKTSANRAKARVKVARAHARITDRRRDVLHKLSTRLVRENQTVVIEDLSVRNMVRNHTLARAISDASWSELRRLLQYKADWYGRTVIAVDRFYPSSKTCSACGVITAKMPLNVREWTCAACGVRHDRDVNAAKVLCAAGLAVQACGDGVRPPRT

SEQ ID NO: 35942 - protein, 405 aa, unknown
  TnpB Polypeptide
MKLNYQVRLYPNKTMKRVLDSLCDYRRYCWNEAIVCWDEQHEARSIGLPENLRNKLRNKTETLTNEETDLVNQYPSPSRYSVLNELVANKADWQYTLSSRVLQLAVKDVATAWRLFLNNQDTAGRPTFKTRKEPKQGFKTDSARIRNGRLLLDKPHRHQGEWQTIRFKGLTIPDGKLTLCSVTRVGGRYTATFTLEVEPIPLQHTGQKTAVDANVDHFDTTDGRTTLKPEVLNPLYERVRHYQRTLACKRHRNPRATQSNGYQATRTKLQRTHERIANVQKDLLHKFTTDLYRRFDTIVIEDLDVKKMQMSKRAKNLHRSLFGQFRQMMKYKSKKFGKTLIIADRYYPSTQRCSSCGFIKTGDDKITLSGNHKHGTRHNQYICYQCGYEDDRDHNAVLNLLALAK

SEQ ID NO: 35943 - protein, 397 aa, Methylosinus sp.
MIKRGFRYRLDPTDEQELMFRKFAGVCRAVYNAALHQREVFWRQHLRTEGRHVSYVGQAAELTALRAEFDWIREVSQACEQQALRDLDNAFQRFFDGVSGYPTPRRKGKNDGFRFQGRNVEVEKLNRNWSRVKLPKIGWVRFRDTRPMVGKLKNVTVSLDSLGWHVSFAREIEHEAPANIAPAVGIDRGVANSIAMSTGEMDSIGKERLAVLDRRRRKHQRDLSRRKRGSQRYGKTRKRVAAVAAKGARVREHFNHVRTTRIVRNFGTVCIEDLNIANMTASAKGTVEEPGKNVAQKAGLNRSILEQGWGQFEEFLTYKLAASGGVLVKVDPRNTSRKCSNCGHIDARNRESQASFRCVECGHEAHADVNAAINILQAGTRPSEEAKAPRRKSRKAA

SEQ ID NO: 35944 - protein, 401 aa, Methylosinus sp.
MILHRANIYRLYPTDEQAQRLTEWVGSCRFMYNVALEQRRDWWRPGRRFNFATQCREVTAVREEVDWIKDVPVHALQQAMRDLDRAFVNFWEGRAEYPKPRRKFENDSMRFPDPSAFGFRRISKHWGEVKLPKLGWVKLRWDKAIPGTVKNITVSLKTGIWTVAAQYETEIADPQPSELPPVGIDRGVAVFAAMSDGTKVEPGNFGKKARKKLCKAQRNLSRKKKGSNNWKKQKARVGKIQGKIARQRKDYLHKLSTDIAKSHGVVAMENLKVRNMTASAAGTVEEPGKNVRQKAGLNRSILDQGWGMFRTMLNYKLAERGGRLVEVNPAFTSQTCSECGVVDARSRASQARFVCVACGHEENADVNAAKNILSRAGCSVLPVEGQRGRRPDEAGTIRRAA

SEQ ID NO: 35945 - protein, 401 aa, Methylosinus sp.
MINRGFRYRLDPTDEQELMFRKFAGVCRTVYNAALYQREAFWKQHLRTEGKHVSYAGQCLELTDLRAEFDWIREVSATCEQQALRDLDKAFQRFFDGISGYPTPRRKGENDSFRFQGRDIEVEKLNRNWSRVWLPKIGWVRFRDTRPMIGKLKNVTVSLDPLGWHVSFAREIEHEAPANIAPAVGIDRGVANSIAMSSPLEGEQFFSVGKERLAVLDRRRRKHQRDLSRRRRGSKRCGNARKRIAAVAAKGARVREHFNHVQTTRIVRRFGTVCIEDLNIASMTASAKGTVEEPGKNVAQKAGLNRSILEQGWGQFEEFLTYKLAASGGVLVKVDPRNTSRKCSNCGHIDARNRESQASFRCVECGHEAHADVNAAINILQAGTRPSVRAPARRRESRKAA

SEQ ID NO: 35946 - protein, 424 aa, Nostoc sp.
MTFRLYPNEQIEQSLRYHRKLHKDLYNAAVNNRFYQYQNFNHSVDYMEQQNSLPAFKDVWIEYKEINSQALQATLKRVDFAFERWLKGLGKRPRFKSIRHYSGWTYPAKTGYSVESDGENGYLNLSKIGRIQMRGQAKYWGKPTTCTIIFRNGKWYASITVEVLDQVLKPEILPVGAVGIDLGCNAALSITDGENHQQVEAPKFLRNAEHLIKKASKEKRRKRQPNRKKKILASRRWKKAAIKVSKLKRKVANQRQNWVHQVATQITSSNSMVATEKLEVKNMTAKAKKGKRKKQKAGLNKSILDVGFGMLRSTIKYKVEQIGGVFIEVPTRLVKPSQTCPKCGNQHKKTLDIRVHECSCGYVQDRDIAAAEVMLYWSKGTLPGLGTSLADAESSSSTSRTRKTAGDLEATRGIEASKIYRNLR

SEQ ID NO: 35947 - protein, 331 aa, Nostoc sp.
LQCVAINLDKAYKNFFEGRAKFPKFKSKFDKQSIQYPQSITVVGDKLKIPKIGEVKAVFHRKVSGIIKTVTISKTATDKYFASILCEVEVELNPTCGDKILGIDLGLKDFAIVHDGEAFTKYSNPKHLKRHEKNLARKQKKFARKVKGSKARHKHKKLVAKVHERVSNSRQDFLHKLSRKLVNESQVIVVENLNVKGMIRNRKLSKSISDVGWGMFVNFIDYKLEATDGQLVEIGRFFPSSKTCSCCGHVVDELPLDIREWDCPKCESHHDRDGNASQNIRAEGIRILSLDGGNPVLAESRRSKTTNPQGGKAFVNETGSPHPICTQMGVG

SEQ ID NO: 35948 - protein, 353 aa, Nostoc sp.
LLKQWFGVSRFVYNTTMKYLQEPGTKANWMAIKTCILNDLPDWAKSVPFQVKSIAIKDACNAVKAAKRGFKEDGQIRKCRFRSRKDTKQSIFVPKSAIKDCGIYHSILGKCWLKESLPTAFSDGRLTLAYGEYYLIVSEEVQPVLTDNQGRLVALDPGVRTFMTYFSEQSYGWLGNDSNLFIQKLCFRLDRLVSRISSSPSQQKIRLRKAASRLRCKIKNLVKELHHKTARFLVDNFDVILLPTFETSQMVSKSRRKLRNKSVRQMLTLSHYEFKTFLKWKAWEQSKTVIDCNEAYTSKTVSWTGEIVKNLGGARKILSLSTGLKMNRDLNGARGIFLRALVDTPWLKSQLAL

SEQ ID NO: 35949 - protein, 414 aa, Nostoc sp.
MILSDNKEVIKVLKAVKVRLYPTIEQQESLARSFGCARWYWNYALNACIQHYGQTGKSLKMSEYKGLLPQLKVEYPWLKQDCYSSVLQCVAINLDKAYKNFFDGRAKFPKFKSKFDKQSIQYPQSVTVVGEKLKIPKIGEVKAVFHRKISGIIKTVTISKTATDKYFASILCEVEIELNPTCGDKILGIDLGLKDFAIVHDGEEFTKYSNPKHLKRHERNLARKQKKFARKVKGSKSRQKHKKLVAKVYELVSNSRQDFLHKLSRKLVNESQIIVVENLHIKGMVRNRKLSKSISDVGWGMFINFLDYKLKDSLGQLVEIDRFFPSSKTCSCCGHVVDELPLDIREWDCPKCKSHHDRDGNASQNIRTEGIRILSMDGGNPVLAELRRSKTMKPQGGKAFVDETGSLHRPVRAV

SEQ ID NO: 35950 - protein, 263 aa, Nostoc sp.
VEAPGFIRGGKAQANLFAFQKIFVTCDIIVLMEQVLTLVCKLNPTSEQIAQIETTLKAFADACNYANQQVKPQITSKTTIQNMVYQDLRSMFGLSANLAVRACARVGANRKTAKQKNKPVLIFKPTSADYDARIFAFREKDWTVSLTLSEGREHIKLDVGNYQQGKLKGRKPTSAQLCKHRDGSYYIHIQTKDEVPEPLKPTNVIGVDFGRRDIAVTSNGDKWDGKQIDEVRDRYAKTRASLQQKAFDENSKSQRRDKSPSRQ

SEQ ID NO: 35951 - protein, 491 aa, Nostoc sp.
MSEWLVTLRKHRNYCLAERQRAFETNNQKSDEQVMYQYGAFCDLNSRSEYGSYCPLTCPVVKHGVMSAELTKSSKKHGLAWGNASDIQSKRTTELRAESEWYGRVNSDVLQGNLAKLDTAYNGFFQHKRGFPAFRKTSNFKSFQFKPGQAKLTVNCTSKKKRCYSHVYLPGIGSMRYLDSRTIPTDADIRTVTVIKEADGWYMSVLLKEPKALPEVPDIKTVPSAVGIDVGINKLISLTDGSFVENPKFGTNKKTRRQLRIRQRRVNRKVKGSKNRKKAGIIVAKLHKKIADKRNDHQWFAANKVVGTAAAIVQEDLNVKAMKSRCKPKREKGRFMANGQSAKRGLNRSISDVSWGELFSKIAWLALKAGKPVLAINPKFTSQECSVCHHVSKANRDGEKFICESCGHIDHADTQASRTILHRANLEFVSIRRKNLSGDSRKVTLVRDDSAIRGKRDQGKNCTSKACTERSRSVIPEKRILFEQLSLQLFD

SEQ ID NO: 35952 - protein, 407 aa, Nostoc sp.
MMLVFEAKLEGTKEQYQSLDQAIRTARFVRNACLRYWMDNKGIGRYDLSKFCAVLAANTEFPWVAKLNSMARQASAERAWSAIARFFENCKKSKPGKKGYPRFRKEQTNGSVEYKTSGWRLSEDRRYITFSDGFQAGTFKLWGTRDLHFYQLKQFKRIRVVRRADGYYCQFCIDQDRIEKRQPTNKTVGLDVGLNYFLTDSDGNQVENPRHLRKSEKSLKRLQRRFSKTKKGSQNRTKFRNKLARKHLKVSRQRKDFAVKTARCVVMSNDIVAYEDLKVRNMVRNHHLAKSINDAAWTQFRQWVEYFGKVFGVATVAVPPHNTSQNCSNCGEIVKKSLSTRTHSCPHCRHTQDRDWNAARNILEIGLRTVGHTGTLIVSGDIDKSTGGETPLDKPSRGKRKPKKATS

SEQ ID NO: 35953 - protein, 465 aa, Nostoc sp.
LIDNLPPVFGDKHQVNIKTINCSVSYIVSHATKWYYDYMLLTYQFKLNPTSVQVVILETWGELLRRHWNYALGERLDWLRRTRSQIDRCSLISEPIGEIPNKPDYYTQASNLKQTKELFPDYKNIYADCQQQNLMRLDKAWKRWLIPDKKGHCGGKPRFKKRGDISSFTFPRVNSPKAGAHLTGNVLKLSKIGEIEVILHRPIPDGFEIKQATILSKADGWYCSFSVYDKTVPDSLPLDKIKSATGIDVGLEKFLTTADGQSIEVPQYYRKAQSKLARQQRKLARKINGSKNYKKQTKKVALTHLHVARQRKEFHYQVAHWLVNSYDLIVFENLNIRGLARTRLAKSILDVAWGAFLQIMQAVAVRRGKHTAGVDPRGTSINCSSCGERVEKTLAIRVHSCSCGLVIDRDWNSALNLLKRGFAPSVVEGSVGLPIPGCGGLDSSQPVKQQVSFVNLRCSRYTACS

SEQ ID NO: 35954 - protein, 182 aa, Nostoc sp.
VGVDLGVKELATLSTGKVFPNPKHYKTNLEKLRRLSRNFSRKVNVSENKHKAKLKLAKHHAKVANLRIDTLHKITTYLCKNHAKVVIEDLAVANMVKNHKLAQVISDCGFGELRRQLEYKAKKFGCEIIIADRWYPSSKTCSNCGHIQDMPLKERIYNCQSCNFILDRDLNAAINLSRLAKP

SEQ ID NO: 35955 - protein, 407 aa, Nostoc sp.
MMLVFEAKLEGTKEQYQSLDQAIRTARFVRNSCVRYWMDNKGIGRYELSAYCAILASNIEFPFVSKLNSMARQASAERAWSAIARFFENCKKSKPGKKGYPRFRSYQTNGSVEYKTSGWRLSEDRRYITFSDGFQAGTFKLWGTRDLHFYQLKQFKRIRVVRRADGYYCQFCIDQDRIEKRQPTNKTVGLDVGLNYFLTDSDGNQVENPRHLRKSEKSLKRLQRRFSKTKKGSQNRVKFRNKLARKHLKVNRQRKDFAVKLARCVVMSNDIVAYEDLKVRNMVKNHHLAKSIHEAAWMQFRQWVEYFGKVFGVATVAVPPHNTSQNCSNCGQVVKKSLSTRTHSCNKCGMVLDRDHNAARNILEIGLRTVGHTGTLTSVDENDLYLGDANPPSKPTRGSRKPKKATS

SEQ ID NO: 35956 - protein, 421 aa, Nostoc sp.
MIGTQKNATKPDAVSELILNVLGMASNSLYNTGVYLSRQQYFENGKIISYGKLCKDLKVDENYKVMHSQAGQQTLKSVAEAFKSFQALEKKAKKAELNQKPKLPHYRAKGGMYQVVYPGQAIKIIDKNGTKFLEVPLGCPGKKYFEGIEAITLPYPKRLWGKPIKELRFIPTHESWYTEYVYEMGEVLQATGIHALGIDPGLNNWVSAVCTNGKSFLVCGKRLKSVNQWWNKTKAALSTAVSKQFGEDAFFTKRMARLTDKRNRQMRDATNKVARQVIDWCLNNAVVTVVFGCNLEQKQNINIGRKNNQNFVQIPTAKLRKRIEQLCELHGINYVETEESYTSKASFLDGDLIPKFGEKPEGYKPCGKRVKRGMYKTSSGECVNADLNGVANILAKVSTRLGLDLSRVGRGCLTQPMRFYA

SEQ ID NO: 35957 - protein, 411 aa, Nostoc sp.
VRTSYQYRIKPTKEQAEKIDSTLEKLRYQYNYLLAQRFDWYEQNRCSIDRCPLICHIPELREQPNYYNQKASLTQLKVDRPWYKSIHSQVLQEVPKKVEITFDRWLKGDINGKKSGRPRFKGKGQYKTFTYPQFKRQHFDNSKITLSKIGDVKVIVHRQVPDGFDIKTVSVTKKADGYYVTLSLDDKTVPTIKPDFKADNIVGIDVGLIDFIVTSDNDRISAPKFFRKAESKLKSVQRRVSRRKKGSNRRKKAIKQLGRQHKKVADTRKDFHFKIALSLLDKYDVVAVEKLNIKGLSKTRLAKSINDAGWGQFISILSNKAENAGLKVIAVNPNGTSLECSSCGHKVKKPLSQRMHNCPVCHASLCRDLNAAINIKNRGAHGLKAQVMSGLGVIEKPSLTRRGVWEYVTLQ

SEQ ID NO: 35958 - protein, 405 aa, Nostoc sp.
VLKAVKVRLYPTTEQQEILARSFGCARWYWNYALNACVQHYEETGKSLKMSEYKGLLPQLKVKYPWLKQDCYSSVLQCVAINLDKAYKNFFEGRTKFPKFKSKFDRQSIQYPQSVTVVGEKLKIPKIGEVKAVFHRKVSGIIKTVTISKTATDKYFASILVEGECSDHKLGGDKIIGIDLGLKDFAIVHDGEEVTKYSNPKHLKRHEKNLARKQKKFARKVKGSKARHKHKKLVAKVHERVSNSRQDFLHKLSRKLVNESKIIVVENLNVKGMIRNRKLSKSISDVGWGMFVNFIDYKLEATDGQLVEIGRFFPSSKTCSCCGHVVDELPLDIREWDCPKCKSHHDRDGNASQNIRTEGIRILSMDGGNPVLAESRRYKTNKLKSGKAVVDETGSPHLLRQEKCG

SEQ ID NO: 35959 - protein, 256 aa, Nostoc sp.
LKQFKRIRVVRRADGYYCQFCIDQDRIEKRQPTNKTVGLDVGLNYFLTDSDGNQVENPRHLRKSEKSLKRLQRRFSKTKKGSQNRVKFRNKLARKHLKVNRQRKDFAVKLARCVVMSNDIVAYEDLKVRNMVKNHHLAKSIHEAAWMQFRQWVEYFGKVFGVATVAVPPHNTSQNCSNCGQVVKKSLSTRTHSCNKCGMVLDRDHNAARNILEIGLRTVGHTGTLTSVDENDLYLGDANPPSKPTRGSRKPKKATS

SEQ ID NO: 35960 - protein, 404 aa, Nostoc sp.
MKTSYQYKLKPTKQQAEKIDKTLEMLRYQYNYLLAQRFDWYEMNRCPRDRCPLICHIPELKEQPNYYNQKASLVQLKVDRPWYKEIHSQVLQEVPKKVELAFDRWLKGDVNGKKSGRPRFKGKGQYKTFTYTQFKRHYFTNNKITLSKIGDTKVIVHRPIPDSPSGSDVGASGFDIKTVSVTKKANGYYVTLSLDDQTVPTIKSDFNPNNIVGIDVGLIDFYVASDSSRIAAPKHLRKAERRLKSAQRRVSRRKKGSNRRKKAIQKLGRQHKKVADTRKDFHFKTAKTLLDKYDVVAVEKLNIKGLVKTRLAKSINDAGWGQFITILSKKAENAGLKVIAVNPNGTSQECSNCGHKVKKALSQRMHNCPVCHTSLCRDLNAAINIKERGTHALKAQLMSSKRSH

SEQ ID NO: 35961 - protein, 530 aa, Nostoc sp.
MIVFEAKLEGQNEQYRALDEAIRTARFVRNSCLRYWMDNKGIGRYDLNKFCAVLAASIEFPWVDKLNSMARQASAERAWSAIARFFDNCKKGKPGKKGFPKFKKEQTHGSVEYKTCGWKLSDDRRYITFSDGFKAGTFKLWGTRDLHFYQLKQFKRVRVVRRADGYYCQFCIDQERVERREPTGKTIGIDVGLNHFYTDSNGETVPNPRHLRKSEKSLRRLQRRMSKTKKGSQNRIKFRNKLARKHLKVSRQRKDFAVKTARCVVRSNDLVAYEDLMVRNMVKNHPLAKSISDASWSLFRDWVEYFGKVFGVVTVAVPPHYTSQNCSNCGEVVKKTFLTRTHVCPHCGHTQDRDWNAARNILEKGLSTAGHVGTNASGETDQYLSEETPSSKSTRGKRKPRERFFGIPTLNEVGWGGCQATQPENGKLREFIAEHEPVVSALSYLETLGYHRLTEIERQFFEEFFSVSLIIPISQLVLERAVALRQMQRVSLGDAIIAGTALTHNYQLVTRNIRDFQWIEGLQLLNPFEL

SEQ ID NO: 35962 - protein, 435 aa, Nostoc sp.
VQIKGATAYHQAPRAVEAPGFIRGGKAQANLFAFQKIFVTCDIIVLMEQVLTLVCKLNPTSEQIAQIETTLKAFADACNYANQQVKPQITSKTTIQNMVYQDLRSMFGLSANLAVRACARVGANRKTAKQKNKPVLIFKPTSADYDARIFAFREKDWTVSLTLSEGREHIKLDVGNYQQGKLKGRKPTSAQLCKHRDGSYYIHIQTKDEVPEPLKPTNVIGVDFGRRDIAVTSNGDKWDGKQIDEVRDRYAKTRASLQQKAIIGTRSTRRRARQILQRLSGRERRFQQWLNHQISVAVIQQAKNAKAIVAIENLTGIRERTNTQPRSKVERRRSNSWSFYQLRCFLEYKGIKEGVEVIAVPPAYTSQTCHQCLHIGLRSDKRFKCGNCKWHGDADLNGAKMISLLGQSVSLPGGSGYLCCNLSTDSSGLLQSPAL

SEQ ID NO: 35963 - protein, 334 aa, Nostoc sp.
MWGKHLNCAKLQAHIAKLRKRNSFWQSVGSQAVQDICQRIEKAYQLFFKHNKKGVRPPGFKKVRKYKSFTLKQAGYKFLGGNRVKIGSRVYQFWKSREIEGTVKTLTIKRTPLGELFMVAVVDEGGKPEVEIKTGKIAGFDFGLKTFLTCSDGTTIESPQFLKQSLKIVHSASRHHSRKLKGSANRERAFENLVRKYEDISNQRRDWFWKLAHELTDKFDILCFETLNLKGMQRLWGRKISDLAFGEFLQTLEWIAKKKKKRVIFIDRWYPSSKTCSHCGNVLESLDLSVREWRCPSCQSVNGRDENAARNIQAVGASTASLGDVRQAMPAIAV

SEQ ID NO: 35964 - protein, 283 aa, Nostoc sp.
MQRAFKVTLIPNHNQQVLINKTIGCARYVYNRFLALKQELYATEQKTLNYNACSQQLTILKKEIEWLKEVDKFALQNSRKNLETAYKNFFTDLKKSKNKKGVGFPMFKKKHGCKQSYKTNLTNGNIQVIENRLKLPKLGWVKFHKSQDITGKLVNVTVTRTLSGKYIASILCETEIEKYPTVTQNIALDLGIKSYLVTSDGEVVGNPKYYRTQTRKLRSCHKKLSRSVKGSSNRVKAKIKLARACVRITNLRDDFLHKLSTRLIKENFPAEIVEAGITPLLVV

SEQ ID NO: 35965 - protein, 402 aa, Nostoc sp.
MIVFEAKLEGLDEQYRALDEAIRTARFVRNSCLRYWMDNKGIGRYDLNKFCAVLAASIEFPWVANLNSMARQAHAERAWSAIARFFENCKKSKQGLKGFPKFKKEQTHGSVEYKTCGWRLSDDRRYITFSDGFKAGTFKLWGTRDLHFYQLKQFKRVRVVRRADGYYAQFCIDHERVERREPTGKTIGIDVGLTHFYTDSFGETIANPRHLRKSEKSLKRLQRRLSKTKKGSNNRIKFRNKLGLKHLKVSRQRKDFAVKTARCVVKSNDLVAYEDLQVRNMVKNHPLAKSISDASWSLFREWVEYFGKVFGVVTVAVPPHYTSQNCSNCGEVVKKTLSTRTHVCPHCGHTQDRDWNAARNILEKALSTAGHVGTNVSGDIDLCVGGETPPSKSGRGKRKPKE

SEQ ID NO: 35966 - protein, 406 aa, unknown
  TnpB Polypeptide
MRKINRTYKFRLYPNKAQIELLAKHFGCARFVYNYFLNQRIEQYKITGKSDNYYSQAKALTKLKEKEETEWLKEVNAQSLQFSIKCLEVAYTNFFQKRTKFPKYKSKRSKNSFTVPQSSHISDNRLFIRKFKEGIKCRVHREIKGKIGKVTVSKTPSGKYFASVFTEEDYETPLEKTNKSVGLDMGLKDFIVTSEGEIFKNNRYTRKYERSLAKEQRHLSRKKKGSRGYENQRLKVTRLYEKISNSRTDYLHKCSISLVRRYDTICIEDLNVKGMIRNHRLSKSISDVSWGSFVTMLTYKADWNGKKVVKIDRYFPSSQTCNVCGYVNKRIKDLSVREWECPICHTNHNRDVNAAINILHLGLNKDTSAGTVDYTDGEDVRANILKGQSSVKSEAYDPLVHGWFMS

SEQ ID NO: 35967 - protein, 400 aa, unknown
  TnpB Polypeptide
MATHYTYKFRLYPNTEQQVLLAKHFGCHRFIYNHYLEQRMKFYLEHKEDTKKGLNYYDQAADLTKLKDELPWLREVYSQSLQFALKCLETAYNNFFTKRAKFPKFHSRKCKQSFTIPQNTEIRDGKLSIPKFKDGIKCKFHREVVGKIKTCTVSKNPSGQYFACIVVERDMEQLPKLDKVVGIDLGLKTLAVCSDGVKYENIKPFRTLEHRFVKLQQWFARTTVGTKLHEKLRVKIAKLHQRILNIRNDYLHKVSTKIISENQVIVLEDLSVKGMIRNRRRSKSVWDVAWAKFVNMLTYKAQWYGREVVQISRWFPSSKMCHDCNYVKGDLQLSDREWDCPKCGKHHDRDFNASQNILTQGLNLINNRGKHGDGVGTGIAHKAAKSAKKHSGSKHEAPTL

SEQ ID NO: 35968 - protein, 400 aa, unknown; identical to SEQ ID NO: 35967
  TnpB Polypeptide

SEQ ID NO: 35969 - protein, 415 aa, unknown
  TnpB Polypeptide
MLVTRAYKTELDLNDKQVTACKQHAGAARWAYNWGLHQKQECYKATGKSPSAIDLHRELNAKKKTDLPWMYKVSKCAPQEALRNLDSAFRHYFRRCQLKKEGKLRGKVGYPTFKSKKQGLGSFRLTGSIAVFPDAIQLPRLGRLRLKERNYLPTGGVKVLSATISEQAQHWYVSIQVEQEQAVPANTGPVVGVDLGVKSLATFSDGTVIPNPRHLRRRLKKLKHFHRAVSRKVKGSKNRKKAARRLGCLYRKVANQRANTLHQLTSHLAKTKRVIVMEDLNVSGMLKNHHLAQAIADVGLYEFKRQLLYKAAWYGSRVMLADRWYASSKTCSGCGWVDEALELSDRVFHCQNPQCPDCGLVIDRDLNAALNLARLAGSSSDTQNACGGASAGAKRKPRVQLTPAKQEPNARNASA

SEQ ID NO: 35970 - protein, 384 aa, unknown
  TnpB Polypeptide
MLYNHPMAYKAFRTKLKLDNKQATLMAKHAGYARFVFNWGLRLWSQAYKEGLKPSVQVLKKVFTNYVKPQFTWMSELSSKVYQYAFINLGDAFKRFFKKLGGYPKFKKKGRHDSFTIDNSGSPIKLGGTRHKLPFMGWVSTYEALPECVVKKVTISSQAGCWYISFAIEVLQEDTPKCREVIGADLGINALATCSDGTVFANPKAYRKAAKTLARLQRHLSRKVKASCNWHKCLQKVQRLHQRVANIRRDTIHKLTTFLAKNHSQVVIEDLNVSGLLKNHRLAGSIADASFYEIRRQLDYKNERYGSKLTVADRFYPSSQICSDCGHRQKMPLNQRTYQCGSCGAVKDRDFNASLNLEQYPQSVGLTDNTCGGGAADSPRRSKK

SEQ ID NO: 35971 - protein, 362 aa, Anabaena sp.
MLLGFKTELKLNNKQRTAFLKHCGVARHAWNWGLALTKQILDHNKANPTEKIKFPSYFDLHKWLVALVKPECPWYYEFSKSAPQQSLMALRTAWDRCFKKVAGVPKFKKKGKQDSFTLEGTVKILGNNKIQVPKIGILKTYERLPQVQPKSVTISRKADKWFISFRFEVEPTPRPKIVDFVGVDLGINHLATLSTGEVFDGAKSYKKYEQKLSRMQWLNRRKQVGSNNYKKAQLKVARLHRKIANLRKDSLHKITTYISKNHAVIGIEDLNVRGMLANRKLAKAIADMGFYEFRRQLTYKCEFYGSKLVVVDRFYPSSKTCAECGTKKVTLLLSEREFHCENCGVTIDRDLNAAINLRKAVS

SEQ ID NO: 35972 - protein, 417 aa, unknown
  TnpB Polypeptide
MKTVKSQKVNLDKLLITYQYRVKDSNKKLVKSLMHKSGLVNLVWNYCNDIQQQAVKRCRPWLSAFDLSNLTSGTSKEIDLHSASIQAVCEEYATRRSQFNKPFLKFRTNKKDRSLPWIPFKASAIKVDDKGTFSFMGLKLKTWYSREIDKRAVLKTGSINRDSCGKWFISVVCELKFNSKEEQENYQLSLTSKGQNLTAIDPGLNPMLTFSIEQPDGSVIYKEIEPQKYYKNLQDKLAKFQRAKKKKQTKILHKKIKNKRKDFNHKLANEIVRENHTIINTDLNISKLKKGKLKGHAKAWSDIGLGELRITLRTKAKKHNVKYIEVSESILKSTQTCSCCKAMTGPRGRKGLGVSSWACLKCGRHHERNQNSADNHRLAYKESLRDDSKILPQKELKNKVSLTILDKECPQGESPSL

SEQ ID NO: 35973 - protein, 352 aa, unknown
  TnpB Polypeptide
MFAKTFGCARDIWNMMLADKISYYKETKKMLYNTPAQYKNDFPWLKEVDSLALANVQINLQKAYKSFFKSESSFPNFKSKKYRQSYTTNNQKGTIAVSNNRIKLPKIGWVKMVQHREIVGTIKNATVSLTPAGNYYVSILCEVDMQELPKTGNSVGIDLGITDFAILSTGEKIGNKRFLKSDSEKLAKEQHILSRRYEQAKKDGRKLSECKNYQKQRKKVAKIHERITNKRKDFLQKLSTEIVKNHDIICIEDLASKNLMKNHRMAKSIADVSWSKFVRMLEYKAEWYGRQVSKISRWYPSSQLCSVCGHNSGKKPLNVRAWDCLECGTHHDRDINAAINILTEGLRLVGQG

SEQ ID NO: 35974 - protein, 362 aa, Paenibacillus sp.
MPYHKAFKYRIYPTTEQQKLIQQMFGCCRFVFNHFLGKWNDTYAATGKGLSYNTCATQLPSLKAECEWLKSVDSIALQSAVRHVADSFDRLFKKQTDRPRFKSRKHPMQSYTTRFTNGNIAAQGNRIKLPKLGWIRYAHSRELEGRILSATVRRNAAGKYFVALVCEVDVQPLPPSNKEIGIDVGLKEFAVCTDGPRVPHPKAYRKHEQQLVMWQRRMSRRTKGGANWQKAKRKVASIHEKIANIRRDFLHQFTTRLIRENQMISIEKLDVVSMLKNHTLAKSIADASWGEFRRQLTYKAAWYGRTVKLADTFEPTSQRCHACGFVCKEVKNLAVRQWECPTCQTVHDRGENAAMNIKRVAI

SEQ ID NO: 35975 - protein, 427 aa, unknown
  TnpB Polypeptide
VPREAGQGFVGMAWQAASVRTAYRCRAYPDAAQQAVLNRTFGCVRVVWNTILAARQERYVTQRTGTSYGQASAALTVMKHDPARAWLNEVSCVPLQQALRHQQHAFTAFFAKRARYPRFKSRGGRQAAEYTRSAFSLRIGALRLAKTPGPLAFVWSWPAVEVAGLDPTTVVVAKEPDGRWYVTFAVEAAAPAPLPQTRRAVGIDLGVTSFAVTSDGDRVANPRHLERRARSLARYQRRLARCQRGSANRAKARAKVARAHRKVRDARADFLHRTTTGLVRGYDLIAIEDLHVSGMVRNRRLARAISDCGWREFRRQLDYKCQRAGRRLVVIDRWYPSSKICSACGFVLAELPLTVRTWRCPSCRVLHDRDLNAAKNILAAGLAAARAFPGDACGADVRHLETSPVQSAVNQEPQPVTAGIPVHQDGE

SEQ ID NO: 35976 - protein, 208 aa, unknown
  TnpB Polypeptide
VVEIDDISLVEPKTAIGVDVGLKSLVALSTGDTIQYPRYYVQTQQKLAVAQRNLSRKKMGSANRRKAKAKVAKISNDIQNHRDEFLHQVSNKLLDSADLIVFENLNIYGMLKNHHLAKHIQDHAWGKLIQFTQSKAAKAGKIVELVDARYTSQKCSQCGIIVPKTLAERVHLCPNCGLEMDRDINASLNILTLGLRGSAYRDTAIAGQ

SEQ ID NO: 35977 - protein, 494 aa, unknown
  TnpB Polypeptide
LKKPQFERLKELTHHAKNLYNQTLWTLREAFEATGMYFSYFQMDKAMKQVENLEGEINYRLVKSAVAQQILRRLDNNFKSFFACHQDFQKNPGKYKGKPRPPKYKQGKHDNLSYNTCAFQVKYNLVVLKDHFEIKSFQMPSGKVIKSAKILVRQGLVILEKGLEIELPKQLVGLAIKQVEVIPKYQSFHAVFVYDDDISEIYQTVKPFKTVEQVEFCKLDASGEFCSKVVKLHNQVMSIDLGLNNLATCVTNGVVEPFIIDGRRLKSVNANYNKRKAKMQSKLSERGKKWSRRLQGLTDWRNAVVNDYMHKATSIVVKTCVKHGISKVVVGDVVKSLNGINLGKRNNQNFVNLSLGQFVDLLGYKLGSHGIELVVTNESYTSKASFLDNDKMPKRYNPKAKKKHTFSGKRVKRGLYKSSDGTLLNADANGAYNILRKTDSDFSFSKLAVKVGARVLEWLHPTKRIHPLSTWREQFFIDLKSHRISKQKSKLSFH

SEQ ID NO: 35978 - protein, 416 aa, Sarcina sp.
MQITSSYSVEIRKQGLCFRKTFEVYRSAAAYLIPVFDSVWGELEETGSAKRRFNAAEHLVHSTKKNTARFDFDLRFPKMPSYLRRAAIQFALGTVSSYRTRLEAWKKEAPFQGDGGRDASGKTAKGRPVLQAGNHAMPVFYHDVMYKAGEAGSDQAKLKLFDGHDWVWKEVRLKHTDMEYLRKHWRGKEASAPALEKRHRKFFLRFTYTEEAGEKDHLKHVLGRIRRAQREHGSANSGSFWAYAVRLNEELSKKTASAIVSFAAEHGADVIVFEYLEMKGKIRGSRKQRLHMWRKRDVQKRCTHLAHRKGMRVSRVCAWNTSALAFDGSGKVERSAENHSLCRFSTGKQYNCDLSASYNIGARYFIRELIKPLPETARSLLEAKVPAVKRRSSCVYADLLKLPGAMEVLSREPGAA

SEQ ID NO: 35979 - protein, 391 aa, Sarcina sp.
MQQVLTIKLKILPDEAGKKLLEETMAAYSRACSFVAERIAEDHLPLNRCSIHKAVYRSCREQFSLPSQMSASVIRTVTASFRSIKTSKERHPSRFSKKKRNSLTVPRFRVPQVSLVWNRDYSLVWDKSHTQRLFSVNTLAGRIRVPFRADAFGWAFEEGVVFGTAKLVCRHGKYYLHIPVTVDHADPVPLCPETRVVGLDRGIRFLAVSFDGEKTCFASGAPVKRKRAHYKELRKELQFRRTRSARRRIRSLGQRENRWMGDVNHCLSKALVSHYPAGTLFVLEDLTGIRSATERVRLKDRYVSVSWAYYDLEQKLKYKAGRAGSHVINTDPAYTSQTCPVCGHAERKNRNHEQHLFRCCKCGYRSNDDRVGAMNLWRMGIQYLPKAQVSA

SEQ ID NO: 35980 - protein, 305 aa, Escherichia sp.
  misc_feature (256)..(295): Xaa can be any naturally occurring amino acid
VERLQAFKFQLRPGGQQEREMRRFAGACRFVFNRALARQNENHEAGNKYIPYGKMASWLVEWKNATETQWLKDSPSQPLQQSLKDLERAYKNFFQNRAAFPRFKKRGQNDAFRYPQGVKLDQENSRIFLPKLGWMRYRNSRQVTGVVKNVTVSQSCGKWYISIQTESEVSTPVHPSASMVGLDAGVAKLATLSDGTVFEPVNSFQKNQKTLARLQRQLSRRVKFSNNWQKQKRKIQRLHSRIANIRRDYLHKVTTXXXXXXXXXXXXXXXXXXXXXXXXXXXXXXXXXXXXXXXXRQQKPRNDSH

SEQ ID NO: 35981 - protein, 391 aa, unknown
  TnpB Polypeptide
MIMDMTRTVRIRLRPDAETAALFEQTVQAYTSSFNEVARVGWDAGLTNGVELHKATYYPERARTGLPAQLVCAARVKATEALKSAKALRAKELKKPKEKQRLPAMPQSAWRPIRYDVHSYRVDLVGGHGTLLTLRGRRPIAFTLTAYNQRYAEWTVTSADLLHDRRGRWWLHVVVTQPLTETAPTDEIVGVDLGIVHPATDSDGNHYGSDHWTVVEERTYQLRRRLQAKGTRSARRHMKKMARRQRRFRTDCDHVVSKRVVTAAQPGATLVFEDLTDIRTRVRARKEQRRRLHSWSFAQLQAFVAYKAEARGVRVAFTDPRYTSQKCSACGHRERANRSDQAHFSCVSCHFSCNADHNASMNIRDNYRRAAVSPPTVSIQPLVVSGTSLAL

SEQ ID NO: 35982 - protein, 410 aa, unknown
  TnpB Polypeptide
VRVIKAVKQNYQPAPEVVALLEDFRLMVNDCIRVGLKFEEENHATPSMRKLSLLCYGQLKKYEVYSAYRLTAISKAAGILSARRKSIKRGYYAKSPFVSKPLLVSCYHVKILDGKLRVPLRDKRCEYIPLNASTLRVTSDPALRLNSFTLIETSLSICVSKEVEVEPREPTNTVGIDRNLRNLAVGNAEKVTYYDMTKVVMIAENARSIVRSLRRDDVRILHSISSKYGRRRSERVKQIIHGVTKQIVREAKAKRQAIVFEEIRGIRNLYRKGNGQGASFRGRMNSWPFHEVKRQIEYKAAWEGVPVVTLSRRDTRGTTMDCARCGERLQSPVRGDPEHHRQLWCERCEEWMDRDLVAVLNISRRGRVRFARSSTEGEAGEAVKGNAEHEGEPLILRVDASKLRRGQQTQ

SEQ ID NO: 35983 - protein, 319 aa, unknown
  TnpB Polypeptide
LRKIELNAHNKIYFSKHKFHNLLAGHGKKLEIPSHTIQGTLLQIYDAWGRCFKKLAKKPRFKGVRNKLNSIPFPDPLKQPVDNKILVPGIGKVRYHKQELPEAKIKCGRIIRRASGWYLCLWLDADHKFPVMQTNKEVGIDPGFHTLLALSDGTKIDNPRELRKGAKRLAQAQRGHKKQLAARLQERQSNRRNDRNHKISRKLVENYQTICYSDDNFKKMARRFGKSISEAALGNLIGMLSYKCRIGGRTLIPVKSNFTTMTCSTCGALTGPKGLSGLAVRSWRCSACGADHDRDTNSAVVVVKAGLGISLGRGLGSVA

SEQ ID NO: 35984 - protein, 424 aa, unknown
  TnpB Polypeptide
MDYVLKYRLFPDGFQREQLDWVRDTVRQLYNHSLHRFNRIPESAGTVKQRVTQVRDEIPDVKDWWTDLKNIYSTVLQQAVEQLTTNIENLGKLKENGFDVGSLNWKAPHEYRSFTYRQRGFELDEKSGPTGRGTLTLKKVNGNNIDVPIRLHRPIPDETDVKHVTVKKDRTGAWYACLNVERDAPETPDPKEINVEDTVGLDLGILNFIHDSDGRHITRPDLSSDRERLEREQRNLSRKEHRSTNWEAQRQRVAEVHKGMRQKKLDFKHKVAAFYTREYDAVFVEDLNVKPMLESSRNGRNTAEVGWREFITILKHHGRKRGCHVEEVDPEDTTKACNQCGVKTKKPLWVREHSCPSCGYTTDRDYNAALNVWERGLRKLGVVHSEDTPAETGTAVEQTHREPVSASSVVETGSPCLKEAAYGG

SEQ ID NO: 35985 - protein, 461 aa, Micromonospora sp.
MKTMQAYRYALDLTAVQERAVLAHAGAARVAYNWSLARVKTVMDQRTAERSYGIGEVDLTPAVGWSLPALRKAWNQAKSDVAPWWAECSKEAFNTGLDALARALRNWSDSRCGKRAGRPVGFPRFKSRRRSTPSVRFTTGAIRVEPDRKHVVLPRLGRLKLHESARKLARRLDAGSARILSATVRRDGGRWQVSFCVEVDRPQRTPARPDATVGVDVGVKHLAVLSTGELVANPCHVDCAARRMRRLARRMSRRVGPDRRTGREPSNRWEVARARVAGAHARVANLRRDGLHKLTTRLAREYGTIVVEDLNVAGLLRNGRLARYVADAGFAELPRQLAYKIEWSGGRLVVADRWYPSSKTCSGCGTVKAKLALSERTYTCTTCGFVPDRDVNAARNLAALAHEVTDARSGRESSNGRGADRKTRPGGPVAVKRQPGTAPAGKTGTVSPQGGTADHGLTYAS

SEQ ID NO: 35986 - protein, 431 aa, unknown
  TnpB Polypeptide
MARIYGAVREFDPMPAQVTALRSNVGAVRKAQNTMLDNVKQKLDAKESISWTPISLHTEWRNIREEKAPWYEECSKEAFQDGCSRLSSALKNWSDSRKGKRKGKKVEFPKFRKRGTRDSWSFTAGRMVTDSVVKIPRVGHVALKEPLHIPEGSRVTMWTVRERAGRWFLTVRIREDSWTKPEKKPTAYVVGIDLGVGDDFATFPDRSKIKNPRFLKQDHKRLRKAHKAVSRKPRPKNPKDTSKRREEAVQRLQRVYFDVTNRRQDFLHKLTTDLVKSHDVIVLEDLNNAGMARKKGFRLGKSVSDACLREFRRQVEYKSEWYGTTVIIADRWFPSSKLCSTPGCGYKNQDLELKELEWTCPECGRTHDRNVNASRNLTGYGERLLAGSFPVLPGIPGMARGDGARPPLVAVVGETGMEARDVGLLASVSRK

SEQ ID NO: 35987 - protein, 440 aa, unknown
  TnpB Polypeptide
MKTVLTAKLKLQTNAAQFQAVRATQLAYRDALNYVSRYAFEHNKMSNKVALQDGTYDEVRARFHLPSQMACSVPRQVGATYKTLWTKVKHNAALRKAGKTKKRYKGLDRPPKYVSPTLTYQYKKDYSFKSDRQVSILTLSGRVIVPYAGYHEHVALIARGAQVGAAKLWYDKPKKQFYLLVSLEGEGADPTPETHTGVAGVDVGVRYLAVTATTRGDRSFHSGKGVVPKANHYARLRKRLQKKGTRSATRRLMVISGRERRLKQDANHVVSKRIVTRHPHSLIGLENLTDIRERTRRKHGKQATQKQRRANAAYSKWSFAQLHSMIAYKALLHGSMAIKVDAHYTSKACPMCGYTCDANRPKKGLLFICQQCRYTLHSDLIGARNITMRTLLVRQDWTSTGQLSIAPDVSSDEAKAERLRRYSELRWSLDTSPRLSSGGI

SEQ ID NO: 35988 - protein, 408 aa, Synechococcus sp.
MRTAYQYRLRPTASQVALMGEWLELLRKQYNYRLAERFNGWEQNRCNIHACSLTVCHLPELKDKPDFDSQKRDLVNTKALFPEYQAIHSQVLQDCVERVQRAFDRWLKGDCNGKRAGRPRFKGVGRYRSFTFPQMKQDCIRGQFIHLPKIGPVKLVQHRPLPEGFVIKTATITRKVDGWYVTLSLQDSSVPEWSPDTPTWENTMGIDLGLSSFLVTDEGEAVEVPQHYRRAQKPLKRLQRSVSRKQKRPNRYQKAVKRLSKAHQKVANQRRDFHHKTARKLLQTRKHIAHEALDIKGLARTRLAKSVHDAGWGQFLQILAAKAERAGLLTIAGDPRGSSQGCSGCGREVPKKLHERWHDCPSCGLRLSRDHNSARVIKSRAVGRPVLQAQEMSCHWAGVTVGEAWRKP

SEQ ID NO: 35989 - protein, 445 aa, Synechococcus sp.
  misc_feature (356)..(419): Xaa can be any naturally occurring amino acid
MIITHEYRILPSDDQAALMTEWLELLRRQWNDALGQRLDWLTATRCPIDRCSLVSCPLPVSEAPLEPNYYRQAGSLKQIKQLFPAYRGIYAEVLQQNLMRLDKAWKAWQEPDSTGKRRGRPRFKKAGELRSFTFPRINCPKAGAHLEGETLRLSKIGSMPVVLHRPLPEGFVPKTCTVVRKADGWYVCISLEDKSVPLPEPVPIKKAVGIDVGLDRFLTTSDGEVVPIPRHYRQAQKHLARQQRQLSRKVKGSANWKKQATKVACLQLHVARQRKAFHYQVAHWLVEQYDLLVVEDLNVRGLARTRLAKSILDAAWGQFLDILTAVAVKRGKQVLRVDPRGTSQNCCVCEERVPKXXXXXXXXXXXXXXXXXXXXXXXXXXXXXXXXXXXXXXXXXXXXXXXXXXXXXXXXXXXXXXXXSDSRKLPSTARQGLAGEDVTFRRDLE

SEQ ID NO: 35990 - protein, 143 aa, Synechococcus sp.
LVRDAQAIGAALAFEDLTDIRERLNQKPRSKAERRRTNNWAFYQLRMFVTYKAAIAGVPVVLVPPAYTSQTCHKCLHIHPEQGKSYRSGKLFKCGHCGWEGDADYNAAQVISLLGATVNSPEIPKLSCPLGQLGIGIKPAPCA

SEQ ID NO: 35991 - protein, 244 aa, unknown
  TnpB Polypeptide
LTFSWSHTWFSRRVKGLELGEPVIKEDKVHLPFRYRLPWFTPLDFLAIDSNLYTLDAYDGEKFVTFSMRELYSLKFGMGLKRGRIQSYASKHGRKGELLSRKYSHRERNRVRDYVHKFVNELLEMYPVTTFAIEKLNKQSMFQDADDRLSKKISRTVWRSIHRVLKYKAPLYGSLVKEVNPHLTSKSCPRCGRVSRKVGLFVVRGVVSPWTGNSTPPSTSSSRCAGFPTSFSLPLGVGGLGLPR

SEQ ID NO: 35992 - protein, 480 aa, Desulfosporosinus sp.
VKAVLIDLTNEQKALLDHMMLVFCTAIRYSFKRQLEGQRIGDLEKVVAHKYHLNIRQAKDAVESARQTIASQHELVRLHHQNYSKKVEALVKKLKKPKLSERRVKALTAKLAKRQQKLDYWTTFLTSKTIPPVTFGTKKMFLRRCKGLISKQEWNDCRNNRFYSRGDKTKGGNPNLRVVFKDRVSFLEISTLEKTVKNRAIKVMMPIYLPQKLSKKTGKVNGVHYRKLFMESLEQGVAYQVELIKQDGKYYAHITFEEPEANVVDTGHLNMIGADTNPDGFVLTRIDNKGNYRGHTYLKQHELTFCRSNRRTNLCGELVKQAVEAAKTNHCGIAAEDLKFKDDRDVTGKMARVSSQFVYATLLQMLERSCLRNGVEFVKVRPQYTSKIGLYKYCHQYGLDVHNGAALVIARRSYGLKETVPKLLRDKLVPKKTLTIFNQRNEWGQWSEISKQVDRLFKKRKEVNTPGLWLVRRKELLRIA

SEQ ID NO: 35993 - protein, 405 aa, unknown
  TnpB Polypeptide
MKLNRVEQHIIKKNNSIWKLIDELCWKSKNVYNYANYIVRQEFIKNNKWIRYNELARIVKDSEPYRDLGSNVGQQTLKLLDQNWKSFFASIKDWSKNKEKYLGRPKLPKYKNVKNGRFILVIDNIKVSIRDGHLRFSWKPMNLLNNKIKTKVQDKLMQVRFIPKCDNYVLEIVYEVNIPETKINSTNIVGIDIGIDNFATISNNIGVQPIIINGRSIKSINQYYNKKKSELQADLKIRHKMDWSNSLQKLTNKRNNKVNDFIHKASKKIVNWCVLNNIDTIVIGRNKNWKQESNMSKKVNQNFVGIPHYKFIQKLTYKCENVGIQLIETEESYTSGTSFLDGEQPNKNNYNKERRIYRGLFKSNGGELINADLNGSYQIIKKVFPDAFINGIEGVGLHPVRLNVI

SEQ ID NO: 35994 - protein, 305 aa, Bacillus sp.
INAQVPKQASKDFDTARKNSFKKYKNGFHTSYKSKKDLIQGFYANYERLIIGKKVVHIQSIGEVKTSQQLPRNKKTSNPRVTFDGRHWWICVGFEESFEFQELTHESIGVDVGLKELFVASNGMKERNINKDAKVKKLLKRKKSAQRDMSRRFKNGVKIQSAGYEKAKAEHLRLSRKITNIRNNHIHQATATLVKTKPMRIVVEDLSISNLLKNKKLSKALSFQKLNFFFQCLSYKCEKYGIEYVKADKWFASSKICSCCGVKYDHSVQPEGQWSLKIREWRCVPCNSHHDRDVNASINLSRWVK

SEQ ID NO: 35995 - protein, 424 aa, Nonomuraea sp.
LETPGFGPGEESEFAAERRHTRLERAGEFAWLNEESSVPLQQVPRIQHQQRAFARFFAGCAPHPRFTSRHGRQSAEHTRSGVRRRDWRLWLAKTDTPLDLVWSWPEVDPSTVTLSRDPDGRWYVPLAVDVADPGQAPPTGSAAGVDLGVKDFAVTSDGEKIANPRSLARRERNLARHQRRTARKQRGSSNRSEAWAKVAHAHREVRASRADSLHKAATQGRHRIAIDRRHPSSKTCSACGRLLAELSLPTRHWTCPSCGTRHDRDVNAAKNIPAAGRAVSACGGDVRHPGNRMRSPVKQEPQPAKGGIPRLQPWGGSQMGSFPIRRSASRLGPSTPASSPGTPAAALPPLRSPRTGPETGAGTGAAERPFEVVFPSGATSTASISGPRKRCPSRAKSRESPVARKRCRGMASPPAARPRSCRIR

SEQ ID NO: 35996 - protein, 374 aa, Collimonas sp.
MILCIHTAIQYSMAKDSSPSDEVVRVIRLRLKDKHAAILREKSFWANQVWNYCNELSYKVWQRERHFMSGFDFAKYTKGASKAGVPLHSQTIQAISEEFAVRRKQFKKVKLRWRVSKGSRRSLGWIPFKASALQYRNGQLKMSGIDAPLSLWDSYGLSQYALGAGSIAEDARGRWYINITVKVKKTVSTATKMIGIDLGLKEFAAFSDGKKEDCQQFYRLAEHRLAVAQRAKKKKLTRAIHAKIKNRRKDYQHKLSTALVEQSGAIFIGNVNASGLAKTTMAKSVLDAGWSQFRTMLNYKCIGAGVWFEEVNEAYSTQDCSVCKTRSGPKGLKDLGIREWTCKECGTHHDRDVNAARNILRRGRATLAVGIPVV

SEQ ID NO: 35997 - protein, 360 aa, Sulfolobus sp.
  misc_feature (352)..(352): Xaa can be any naturally occurring amino acid
LWKFSLSEVRIVTRKGWVSLKPFFTKLFWRYYNDGWALASESSFKLCKGNVVKLYLVFKRPLPKPFEAKGYIPVDLNEDNVSVLLDGKPLLVETSVKKITLGYAYKRKRISEGRSTGKPLLVETSVKKITLGYAYKRKRISEGRSTKDRVVRRALKSLKERFKKLDIRRKLAKLIVTEALREGKGIILEDLPKNTPEKMVQDIKDKQLRDRIYKSAFASLKNAIVEKAKEFGVPVLLVNPAYTSSVCPIHECKIIYPPDGSSAPRVGVNPAYTSSVCPIHECKIIYPPDGSSAPRVGVCERGRERWHRDVVALYNLLKKAGNVSPMPLGSKESHDPLTVRLGEWLRAKSLHXAVGLEGVP

SEQ ID NO: 35998 - protein, 402 aa, unknown
  TnpB Polypeptide
MLVLEYKLVVSAAQSQRIEEALRTAQFVRNKTLALWYQDRRNKAFDLNKYCAVLAKEYSFANALNSQARQAAAERAAYAVSRYLKTDKSGKRLAKPKFQKDNRSVEYKVTGWKLSPERKRITFKDGIGIGTMKMLGTKNPQRDLCAYDLVLIKRVRILRKADGYYVQFCIDVDRKETLEPTGSTLGLDMGLAKFYTDSNGNAVGCPKFLRTAEKKIKRAQRKHSRKIKGSNNRRKSKSVLGRRHLKVQRQRKDFAVKLARCVVKSSDFVALEDLQVRNMIKNHCLAKSIADASWGIFSQWLLYYGSVFDRPVIKVPPAYTSQECSSCGRRVQKSLSERTHACQCGCVLDRDHNAAKNILRLGLALDSKLYPGALENSLGLSEGTLVESEPLLLAYQDSKFAR

SEQ ID NO: 35999 - protein, 396 aa, Thaumarchaeota sp.
VKVLALNRALSSYFGLVKWYLHFNSRSKSFLHENCYATAKELFDLNTALIQTARDKVVEILQSFAKNKKEGSVLRLKRISIRFDRRCYSFSKTTNVLTPYWLTLSLNRKERVSLPIVFGERQKQRIEEAFRGEWRFTTVEMVKRGGDWYAHFVLKKAVEVPDETETVIAVDRGEHNLAVAVAISKNNPNKPKKGRFWRGEEIKRIRGLYGHIRRRLQEKRLLKKVKELRGEERRKVNQQLHIIANQIVAYAKQFPKPIIVMENLNGIRGIFKKSEKLNRRFHSLPFRKLQTIIEYKALHEGIEVRYLTKKETKNTSKTCHRCGYVTQVRGRIFRCPKCGIEYDRDLNACVNIAHRVTSSMGWGSCEPPEPADEETGAKPTLKAGSLAPLGRGSSLE

SEQ ID NO: 36000 - protein, 422 aa, Succiniclasticum sp.
MAMRKIAKMFYHKGVVVKIYPSDEQRRIVAVNDGASRFVYNKLVERDKLYRMRKAEPLVPAYHNHIAYLDWSLQSAENMKTAYPFLAEPEIDSCAIGMAKSNFFDAITNMFERHTGRPQYKHKSAEQSYQTSCSNANTENPSVQILDQHHLKLPKLGKIRFDGSPKVVSDVMRCLELYNARIGTVTIKRDSVGEYWVSLSFGFDEPLVNLLPETGSAVGIDVNLSNFCAISDGTIVPNPKFAKQKEPEIKKTQRKLSNKKTYANRHDLDYRSKNYEEQRVKLAYLHRNVARQREEFEHCLSKSLVENQDWIFAEDIRTKNLMKNHNLAGAIADASWSEFTHMLDYKSTMYGKNFEKVSAVNTTQQCCACGHICKDEDHIDLGVEEWTCPECGTVHSRDLNAACNILMEGIEKHHLSYRIPVW

SEQ ID NO: 36001 - protein, 444 aa, Cupriavidus sp.
VPFKKADPNIVQFARKVLLDISADDAGCLDGQSKICNWLQNQLKDQVEARLCELHLMNWLSIDDEATTKKLLSEVYSEIGLRNLVPALKDKHPFLRCVHSSPLKNIALRVAKAITAHRKSKSSSRAGQKVGWIKYKSWAKEWCSVEYEEPGKGWDVSEFGWLKLTFGTDREGKRLSLRVRMVRPPKHIAQARTCRIIREGKDRYYAVFTFKKQKQAQQPATRAVYIDPNQKNFGYALDTEGKVFEIQNLQRLREMERTLDALKSKCDKCARKSLWVDVVHQDGTKSMHWRPSRKWTSLNQAFVRLELKVREQRKHFQFSLANQLFRHYDVVGIGDYVPENADHGKGRKYNRAVPNRSMHGSFKDTLQWMATRSGKRAVVLDETGTTRTCHVCNHVVEGGIHPSIREWDCPGCDTHHLRDENASQNGLRRLLKSLGVDAGNPQMP

SEQ ID NO: 36002 - protein, 431 aa, unknown
  TnpB Polypeptide
MTESYVLTLKLNTSPEQDVWLGHTFRCGQQIYNVLVRHCRKQLRKLIQDPEYRKSLDVRKESGLSKADKNRINMKLAVIRRDYGLSEYQLHAYVSVQQHRFRKCIDSMTAQKIASSVWRSVEKYLFDNGKCIHFKRYDDLDSLEGKSNVSGMRFRGGRLHWLGQVIQPQIRTDYDSEALRSRVKYCRIRRKPVGTKYHYYLQLVLEGKPPVKHIVAHGTAGLDIGTSTAAVVTKNSCRLTVLGSDAKDRSSQIRQIQRAMDRSRRATNPDNYLPDGTVRKGTRKWVRSKHYRKLQFRKKTLERRHVDAVNASHHRLANEIASKADIVYVEKMLFHGLARKSKSAMKKADDRFRSKKRFGKSIGNHAPAAFLTILGNKLASCGGELIKINTVSFRASQYNHVTDDYVRKNFPAGEVLLTAATSREICTLHSC

SEQ ID NO: 36003 - protein, 382 aa, unknown
  TnpB Polypeptide
MYTVRRLNIGKTEQLDELASASGELYSRVVVLFWRTVRKKGVWLKPSSLMRWQNSDRLHAHTADACAQAFFSSLKSYRARCKTDPDAKPPHERRKFFRVEYKSTAMRHKGDTLTLSNGRGNPPLVLPWTWETPKTLTIHWTGTQYEAIAVYVLPEPKLVQDGRTAGVDLGEIHLAVSHDGDHTHIINGRLLRAKRQYQNRIKARLSHMIDTKKRGSRRRERLIQSKKRQLRKLDNQIKDITHKCTTRLVSTLREDGVQTVVIGDVRDIRQGLDYGKKANQKIHQWLSGKARWYITYKSQRQGMKVALQDESYTSQDCPVSEHRNKPRGRQYSCKCGFRFHRDGVGAINIRRKYLGFGRVIGDMAPPTGWRYHPHACVARRAA

SEQ ID NO: 36004 - protein, 382 aa, unknown; identical to SEQ ID NO: 36003
  TnpB Polypeptide

SEQ ID NO: 36005 - protein, 434 aa, Cyanothece sp.
MLTTRRVTFRLYPTKKQEKKLHDWRKLHQYLYNACLSHRITEYRHFGKNISYFDQQNCLPEFKKVWPEYKQLGSQALQATCKRIDYAFQRFFKGLAKFPGFKSFHRYRGWTYPGLSGWKADTTGYHGALELSNLGQIRMRGKVRIWGQPTTCTIIWKNNKWYCSITVKCEVKRETGTGACGVDFGTLRAVTFDNSTGIENPRFLAKSKDKIAKASRQLRRKRSPNKKKRIKASKRWKKARQKVSKLQNKVTNQRQDWQHKVSAQIVSGNSLVATEKLNLKGMTRKAKKRVRNSLIGGECKTHSRQGSKRKNQKTGLNRNLLDVGIGNLTQLIKYKVEESGGVFVEVPIKIAPSQTCPNCGKKKKKELSERVHNCDCGCVMDRDAAAATVMLNYARGLGANLLNRGSQSSGQNHTPKRCGGFAKDWELKRQKPRT

SEQ ID NO: 36006 - protein, 216 aa, unknown
  TnpB Polypeptide
MDQRLLVKGGSIKSEYYWWKRRIAAYQSIRDVLRRLGISTWIYYHEKYLKAMYKRDERLRHLYITAIRFLADELHRRGVRKLYIGYPYMLSQNNGNEYNTNIWWYRKIVLWIVDVFRGYGIEVKLVPEDYTSRECSICGNKHKNGRIYRGLYICRKTGKKINADVNAALNIARRLGHRIKIAKKIESYLVTHNGVRRLIPPQGANTRDPEVRNPAL

SEQ ID NO: 36007 - protein, 412 aa, Nodularia sp.
MQLVERHIIQRNHPHYQEIDQLCFAAKNLYNYANFHIRQSFILTQKYLDYNCLAKELKSTEPYQALPAKVAQQVLLGLHRNWVSFFAAIQVYTENKSKFLGRPKLPKYKHKDKGRHLLVYTAQSVSKPKMKAGVIHLSKTQIDIPTKIECVHLNQVRIVPKIDHYVLEAVYEKEELDYDLDSNAIAAIDLGIDNLATLTSNQPGFLPVLVSGRIIKSINRYYNQRKAKLQSLLPSHQKTSKQLQSLTKKRNFRVDNYLHKASRLVIELLMKQGLGTLVIGQSPLWKQNANLGKRNNQNFVCIPHNRFVQQLIYKAKLVGIKVLVSEESYTSVASFLDQDIIPTYGKADAKEVKFSGRRIRTKLYKAGNGKLIHADVNGSLNILRKVVPTAFSLGIGGVVVRPVGIIPGKQMA

SEQ ID NO: 36008 - protein, 413 aa, Janthinobacterium sp.
MERYQAYRFELRPTGEQERAMRRFAGSCRFVYNKALAMQIENYEAGGRYIGFAGMCKVLTSWRHDPATPWLPDTPCRSLQQALKDLESAFKNFFEKRAGFPKFKRKGTGDAFRYASSKEFKLDEGNARIFLPKLGWMRYRNSREVLGELRKVTISKSCGKWFASILTRREVELPLHKAATAIGIDVGIARFATLSDGSFIAPLNSFKKHQQRLARYQRRMGRKVKFSSNWRKAKARVQKIHRDIANARKDFLHKNTTTISRNHALVCIEDLQVRNMSRSSKGTIEQPGKKVSQKSGMNRAILDQGWGEFRRQLDYKMAWNGGMLLAVPPHHTSQTCPACGHVSKDNRQTQASFLCVDCGYEKHADVVGAINVLERGHRLSACGEMAQSGRSKKQEPIEARRNSSRRAVEISVL

SEQ ID NO: 36009 - protein, 318 aa, unknown
  TnpB Polypeptide
MASGGEGVLTLSTGMRVSPEPGAIELLRRYNVALNYAINRILRLDLKKIGEVHNALYRELREWFGLLSRTAVDCYRDALANANAWRNNPRKGRRPRVKKLSMLLHQGLGYRVKDCYVEIIGGIRLRIIGWDRRYDGYENGEAGLVYRDGKMMLWISKKIHRPKPYQPRDVIAVDINEKKIVYGDHVINEEIDTKIDEAHRWKKLPEDLQKKYSSTRYPAWRRRRGILRRIRSYHRKARNILEDWARKTPLKMVRLAVKLQHALAREDLTGLINSLRKIKNKDHRTKPIIMGYSRLVKWIDWQAMKHGVPLATVNPNGT

SEQ ID NO: 36010 - protein, 396 aa, unknown
  TnpB Polypeptide
MSRYRLLPSPAQQVVLRGHCAQARFVWNLAVEQHRHWRSARKSAPGYLEQCRQLTQVRAEHPWLAAGSQMVQQQALRDFAQAMVAFFDPQNPAGRPSWRKAGRDEGFRIVAVKPAHVRRLGRNTGEVWVPKAGWVRFRWSRAVPTGVKSYRVTFDPAGRWHLAFAAIPEPVPVPGNGQVIGIDRGVAVSAALSTGELLHVPPLAAREQRRMRWLKRKLARAKRGSNRRTRIRLAIARLKARETDRRKDWAEKASTDIARRFDVIRVEDLQIRGMTRSATGTAGNPGRNVRAKAGLNREILRSGWGLLVRRLEEKAPGRVEKMKPAFTSLRCSACGHVDAESRESQARFVCTACGFACNADVNAARKIAAGYTVTARGGDGAARPVNREPQLLLQSA

SEQ ID NO: 36011 - protein, 254 aa, Ferroplasma sp.
  misc_feature (219)..(244): Xaa can be any naturally occurring amino acid
LIKRNNNYYINITAYKNKLNTETNQILSFDLGIKNQLTLSSGLQLKYSIEKTKKEKRIQRILSKKVKGSNNYRKLKVKLNKEQDKTKNRRTDTRNKIVHYLTSNYNIIITQNDSISGWQRIFGKRIESTGIGGIIEALKHKASTLILLYRFIPTTKECSKCHNKYDIKLNERIYKCSKCGLISDRDYNSTLNDIYYGTKTHKFKKLKVPVEYREFKPDXXXXXXXXXXXXXXXXXXXXXXXXXXNRKPQCFNMR

SEQ ID NO: 36012 - protein, 363 aa, Acidithrix sp.
VTTISVTGDIAITQHDQLLCRLHDQLGWRATKDRNRVRFTTGTMGFEDDRRTIVLPMIGALRSMENTRRIQRHLAKNNARLLKRTLSQRWGRLFVSCQLAIKTSVVTPPSATMSKKDPRAGVDLGLRSLATIADSNGSMTAIPNPAPLRATMNERRRVGRNLIRRIPGSHGHRQAKAKLVKLDRKAVYVRRESIHQLTCYLVDNYSEVKIEDLNIAAMGRSMGRRALRRSVSDAGLGAFKPTLTYKAISAGVKVVVVDRFFPSSQIHHNCTGRLTGAKLAKRLICDTCHVEVDRDENASLNIRDWSVISCGPVGSSALPVPRPFRTGGSCDDGLTHHRPRCSCDASRCPQRRHRQRTPGPVHL

SEQ ID NO: 36013 - protein, 249 aa, Actinobacteria sp.
MHAGGEIRTVANPGHYDQARKRLRRASRVVSRRQGPDRRTGQKPSKRWEKANAQGNKVHHRVANLREDALHKLTTAVAAEYGTIVIEDLNVAGMLRNRRLARRIADAGFGEIRRRLACKTSQRHATRIVVADRWYPSSKTCSGCGAVKAKLPLHVRTYECDACNLVIDRDDNAALNLAALAAAAVTGTGVAGDQDTAPAVSKPRGASQKTRATRPRRKAEAGRAGGATLSRQRQTETRGRSQAEALTLW

SEQ ID NO: 36014 - protein, 380 aa, Lactobacillus sp.
  misc_feature (97)..(110): Xaa can be any naturally occurring amino acid
MRSEKTTLIWVVMMLMIRTQKVRLYPNRHMRKVLGRLCDYRRYCWNEGLATWNDMYDLYTIDSSSPHPSTYLVRNELVANKADWQYALSARTLQLAXXXXXXXXXXXXXXQGFKTDRAKIVAGKLRLDKPHGVKNWYDIRISKHVDLSGVLKVVSIYRENGKYWASFPFEVKLDDKPQTGDNSAVDVNVGHLNYTAGVINTLPKRLRKLYQRIKFYQKQLAHKRVVNGNNATKSGCYIAMRAKLQRDYRRVANIQHDIMQKFTTQLVNDYDKIVIEDLSVKAMQMSHVASKGLQRSMFGYFRQILSYKCDWYGKELILADHQYPSTQRCSKCGHIKVGDDKITLQGNERHCTKHNEYVCYSCGAVLDRDENAVANLLDLI

SEQ ID NO: 36015 - protein, 557 aa, Streptomyces sp.
MTVGGLRDVAAPFVAPGPSGVAVRDRLKHLTPEDEKMLRLVGAHLGSLASKDLKARCMDGLDHSADTWAARKRELTASSSSRWAGSITKATHDQWALARRGQAAHVQSLEAGVLMIRRRLALPVGEKGTQHAPGGYRSAREWFSKSLRLHALEDRLATVRADRENGVVHVLRGGKRLAGTRHHLDQAQLTEAAWRTRWEAERWFLSADGESGKRFGNETIRISPEGEVSLKLPTPLADLANAPHGRYALAATVRFAHRGMEWADRVKANRAVAYRIHYDTGRSRWYVTASWQIPPTQTVPIEAALAHGVIGVDTNADHLAAWRLDEFGNPIGRPRRFDYDLSGSTHHRDAQVRHALTRLLNWAKTCGVAAIAVEDLDFTAEKTREKHGGRRRFRQLISGMPTGRLRARLTSMADQTGIAIIAVDPAYTSKWGAQHWQQPLSTPTRKTSRHDAASIAIGRRAQGHPIRRRTAPPRAHQSDVHGHRTVQARPETLGREGPRPRMPGPRTRSVPPDAGRTRATRTSTTVRDARSGQEWVQNSLLLTEEERFTPMAPGANL

SEQ ID NO: 36016 - protein, 414 aa, unknown
  TnpB Polypeptide
MLLSKATTIKVTDVQSNIVGHMGYAAYKLWNVCKYERDNHEALGLADYPDWYYQKKAHKDNIWYRQLPSQTAQEVCKQLDKGYKSFFSILKSKGIEEPKPPKYKHSCMPVTYMQNGIMHEDDTLRLTLSKSLKQFMADEYGIHASYLYLKNRMFQVRGTIKQLKLYMPEDNVMRIIIVYEIPDVQLLPYNGNILAIDMGVHNPLTTYDNVNHTSMIYGRQYASMVRNYEKLIAHYKSISDAQQSALGIKYPKMSNRLKSLYTKKRNSIKDLFHKATRSIVSYCVENDIRTVVIGDITGIREDNDHGDANNQTFHALPYRQIAGMFRYKLAMCGIELVQVSEAYTSRTSPKAKAVDKTHAVKSNRKKRGLYKDGTDIYNADSVGAYNIMRVYVQKYKKSATLKYDRLSSPTKVAV

SEQ ID NO: 36017 - protein, 412 aa, unknown
  TnpB Polypeptide
MQLTQQIKIDVNPDKKDVLWKLSEKCRLIYNFALDERKKAFDAGKKVSYVDQQNTLPALKKQFPEYGWVYSKVLQYVLRTLDANYKSFFALHKKDPNANPPKFRGKNYFFTMVYNQSGFKHYDGKIQLSHKCNKFPLEFKIPDKFKFSKIYQISVYEKDKDFYLSVVYEKPNKDFIDNGLYQAFDLGATKHSAVNLSGKFVNFVNARPDKYWRSKIQSLQCRRDRCQKYSLRWNFFHKLLCKCKRKSSNQLKDFQHKLSRKIVDNTKANTIIVGDLSVKKLCQINRWQKGLHSSMHNTGCIARFVSFLTYKAKLVGKRVIENSEVNSTKECYVCGKKHDMPLDKRIMICDCGNVIDRDENSSVNIMVKFLSLNGLWTACQTLFGNLRQTVNGKTQVALDLRFRELVGSPFQN

SEQ ID NO: 36018 - protein, 383 aa, Gammaproteobacteria sp.
MPLSFTRTLRLKVRAEAYSWLNAAAVEVNEVFNYCNETSLKAATRTDTKRKWMSGFDLCSLTAGASQYFDKIGADTIQSICVHYAQKRQAARRLKLRWRVSRGARRSLGWVPFKAASIKRKGVCLRFAGKCFRVFETARLEGIKWQAGCFAQDALGDWWLCVPVKLKAEQSIAPLEAVGIDLGLKDIAVTSDGERLAAGRWTEGYAQKLASAQRHGHKRQAKRIHRKAARCRADALHKFSRSIVDRYQHISVGDVSSLKLARTRMAKSVLDSGWGMLKNFLEYKSQQAARTSEVVNERNTSVTCSACGALTGPRGVNGLIVRSWICRDCGESHDRDVNAARNILIGSRCRTSVCGNESSAWLIPPSSAYRVREAGIETAWAAA

SEQ ID NO: 36019 - protein, 403 aa, Microcoleus sp.
MIVLEFKAKGKTNQYSAIDDAIRTTQFVRNKAIRHWMDSRGVGQKELYRLSKALREEFPFVKALNSSACQAAIERAYSSIARFYSNCKKSILGKKGYPQFQKNCRSVEYKTSGWSLSETRKSITFTDKKGIGKLKLKGTWDLNFYQLEQIKRVRLIRRADGYYVQFLVSAENKVDADLTGKMIGLDVGLKDFYTDSNGHTEPNRKFYRTGEKRLKFRQRRVSRKNIGSANRRKAINRLGRVHLKISRQRQEHAKRVARCVTQSNDLVAYEDLRIKNLVKNHCLSKSINDAGWYQFRKWLEYFGAKFGKITVAVNPAYTSQECSKCGTVIKKSLSMRTHACQCGFVLDRDWNAAVNILKLALSTTGHVGTWVIDPNASGDSASTLIGAILSGQAGSMNEESPWL

SEQ ID NO: 36020 - protein, 420 aa, Microcoleus sp.
MNFTYRIYPDASQQAQMLDWLESCRRVYNYALRELKDWMNSRKCMIDRCSLEKEYIISADVPFPGYMEQKRQLPVLKETWTGLKNVHSQVLQDVIKRLHNTWENFRKRDFGFPRFKKYGQFKSFLFPQFKESPITGNQIKLPKIGLVPITLHRPIPDGFAVKQVRVLSKCRGTQWYVLVTIQSDVSVPDVPVHGRAIGIDLGLERFITSSDGSFVERPKFFKSLQSRLKVLQRRAARKQKRSKNWEKAQIEVAKLHHHIANRRSYFHWKNAHKLCDQAQTIFAENLNTVGLNRGMLTKECVDASFGAFLSLLEWVCWKRGVYFEKVHPNVTSQTCPNCQAAVSKTLGDRIHSCPECQYQTHRDHAAAQMVLIRGLENVVPVDDGEGKLPGLAVLSEAFCLDKWLSRNAQERSRASQRSTR

SEQ ID NO: 36021 - protein, 427 aa, unknown
  TnpB Polypeptide
MRKVTHGRAWFPDPERGRILFLMKVQASAVRAAYQQMRRTGDFGNPVKRALKPHYMTDLNQRYIADACGFAAQKRNVPSVIFGGKRAWRDLQRGKLSKEDWVQKRNALLYSRGDKSHKGNPNIRIQGNKILVNDPSERGRWIEGIFWMPKKFDFNPDCYDVRLIYRKGQVEVKISSEFPTPRIVTKPVSQGAIGIDCNPDGLAVVETNAQGQLVHHHYENEQRIRFARSEKRTYDIRLLAAQVVLFAFLTRKPLVLEQLSFRAGKQKGPKFNRMKHNFLHKQMLDAIRSRATKMGVEVMDVNPAFTSILGKLKYQDMYSLNVHTAAALVIARRGQGFLESQRFTDKLTGRGGSRINLEGRSRKHTLRPKAWSWLRDEFLKPKNSRPHRAATSSCNDTGMRSNLGEIPKDESSTITGRRGHLPEEVDA

SEQ ID NO: 36022 - protein, 417 aa, Lactobacillus sp.
MWSNLANRLKKLIQGNENFSADQRHLLFFILKFKSAWQAVLLHKPIELPEEYSEALAEIETKLKHKQIKQAYSYLCRITYRYHYRARKSGKLSSSMKCDLNWAFEGNTFSFSSDVPRKQFSVEMTSSWNYPRTGDITVVLDRIKQRLEVHKLISSKRYSNDSKKAIGIDKGLDTLLSCSSGNEYGKNFSKLANAIVDKYGKRNANRQPYMSLRWQLNQQLEQLEKADKPLSKTASKKKRKLLDKLKNLEQNNIGRKSYDKSYRSAQETVRSFINCAINRMIETEHPAVIAKEDLTFVKEKSVKSDNSRFARKMRKRLNSWTKGQLDERIEYLSSKNSIETHDVNPAYTSQYCPICGQHFEERYGSHHELTKCKKCGKMNANIAAAKNILSRLTDEEITLYTPYKRVKEILVSRIKEA

SEQ ID NO: 36023 - protein, 415 aa, unknown
  TnpB Polypeptide
MSALSCKLGVVRTAYKVRAYPDAEQASVLNRTFGCVRVVWNRTLADRHARYATEGKPTSYRESDAALTAMKKTPELCWLSEVSSVPLQQTLRHQHAAFQAFFQKRSRYPRYKSRRGKQAATYTKSAFRWRDGQLTLAKMAAPLRFVWSWPELDPAALDPSTVTVSRDPAGRWFAVLHVDVPEPAPLPRTGQSVGVDLGLKDFAVLSNGEHIPHPKHMERREQRLKRYQRQLARKQKGSANRAKARAKVARQHARVTDARRDFLHKTSTSLVRRFDGIAAEDLNVSGMVRNHSLARAISRTGWAEFRAFLAYKCERYSRTLVIADRWYPSSKTCSGCGHLLASLSLDTRRWVCPGCGVLHDRDVNAAKNIATAGGLPVDACGGNVRRQGSPLPQLPAKQELAGASPPGIPALQDGE

SEQ ID NO: 36024 - protein, 590 aa, unknown
  TnpB Polypeptide
MFYCEKSGRLMGHMRTKPRGERTLTKEKTPTFLLELPLVVEAGQAARQRAHLEAGRQFYNAVLSAGQRRLHHMRADPAWQAARAISRTHTQERRAAFSALRERYGFSEYAFHELAKALRVSWLADHLDAVLAQTLATRAYCALNRVCVGKARRVRFKSRGRGLSSIENKRNDTGLRFVLETPEEGNQGFLIWKDDRLCALIDWKDPVVKYGLEHRIKYARLLQRKVSSPQAQGADACGIRYSVQLALEGVPYRKLKHRVGSDTIGADLGPSTIALVPREGEASLTVFCQELAPDAKELRRLQRKMDRQRRAANPDNYDSMGRVKKHGGKTRGKGKLVWNSSKTYQKTRRRKAAKERRLAAHRKSLHGRLVHEMVAVGNTIILEKISYKAWQKQYGKSVELRAPGMFIDMLRRTVASTGGTLHEVPTRSTKLSQYCHGCGLCLKKPLAQRVHQCGCGIGPVQRDLYSAFLAAYLDPRHPDPSHAQYQQYWESAEARLRAAWEEGYQRAKEGQTVPRSFGIPKARARLPRSLNEATQEPAFLLTRGRLEAWKHRSEPPLLEHGESSETNLVSSRIPKHYDVYQRSMNSSNYG

SEQ ID NO: 36025 - protein, 399 aa, unknown
  TnpB Polypeptide
MRKAYRFRIYPNPVQVKVLERTLETCRILYNTLLAERRDAYRNTGRAPSYNAQKCSLVEKKTVNPYLHEVHSQVLQDVTLRLERAFQNFYRRLREGQKKAGYPRFKGWNRYDSFKYPQYGNGAVLRDGRLVLSKIGAVRIFQHRPIPPNMTIKTCAIRRDVDKWYACFSIETTDTAKLQRPRETASVGVDLGLYSLVTLSNGEKVPPPRFLRKMEKKLKREQRRLSKSKKHSKNWHKQKRKVARVHRKVRLQRTDFNHKLSRTLVNQYSLIAFEKLQIQNMVKNHSLAKSIMDASWGQLQAFTSYKAAEAGTIVEFVDPYGTTVNCSRCGFHVPKTLSERIHECPNCGLVLDRDWNSALNVHIRVGWGTAEFTPVETKPLLQPRMVGASMVEESGSPRL

SEQ ID NO: 36026 - protein, 446 aa, Actinomadura sp.
MGVYKKRLAIRPTPKDSIRMRMNTHCVYRVVVAVGGGWLALRRAYKFLLRPTARQEQALREMLADHCSLYNGALQERREAYRHVSKTRVRYGDQSAQLKEIRAFDPQRQGRWSFSSQQATLRRLNRAFEAFFRRVKTGQTPGYPRFKGVGHFDTVEFPKDGDGCRWDSTPQDPQTRVRLQGVGHIRVHRHRPVVGRVKTISVKREGRRWFVVLSCDDVPTEPLAPTGSVVGIDMGVTYLLTTSKGERVHNPRFFTSMAEELAEAQRHLATFPRRTRRRTKRHRAAARKVARLHAKIRRQRLDHHHKTALELARDHDMIACEKLNTAGMTRAPVPKPAPEHEGAYLPNGAAAKAGLNKSILDAGWGQFLRILADKAESAGRRVILVDARNTSRTCPPFAGGCGHVAGQNRLTQARFECTVCGFAGNADHVGALNILHRAGPARCAAA

SEQ ID NO: 36027 - protein, 410 aa, Actinomadura sp.
VTRYRLQPTPAQEAGLLAHCGHARFVWNLAVEQQAHWRPGHRSAPGFVEQCRQLTEARAEFAWLRAGSQTVQQQALKDFAQAMANFFGGTHRRPTWRKSGRHEGFRIVGRRGRAWDVRRLSRRVGEVKIPKVGWVRFRWSRPVPDDVKWFRVTRDRAGRWHVSFAVIPEPVSAPGNGLMVGVDRGVAVSAALSTGDLLHAPGFTGPEAERLLRLQRKLARAEKGSNRRARLKVAIGRLKAREADRRKDWLEKTTTSLACHFDGIAVEDLNVRGMTRSARGTLDAPGVNVRQKAGLNRAILASGWGRIVTRLEHKAPGRLFKIDPRYTSHTCHACGHCTPDNRESQAEFRCVACGHQANADVNAARNIRDTAISNIAARDTAVGRTVAAREAFQPAGGAVNREPQPDLLST

SEQ ID NO: 36028 - protein, 393 aa, Limnoraphis sp.
MIVLEYKVKAKLHQYRAIDEAIKTVQFIRNKSIRYWMDAPKEAKINRFALNKYSTEQRSEFTFVKDLNSMAVQAAAERAWLAISRFYENCKSKKPGKKGYPRFQKDCRSVEYKTSGWALNPTKRRITITDKKGIGELKLLGKWDIHQYPVKSIKRVRLLRRADGYYCQFCLDITITDIQPKTGKEIGLDVGVESFYTDSNGYQEPNPKFLRKAEKSIKKSQRQIYKKVKGSSGRRKSRKVYAKKHLKVSRQRNEHAKRLARNVCTSNDVVAYEDLSVRNLIKNHCLAKSISDAGWYLFRKWIEYFAAKFGKLAIAVSPHYTSQKCSNCGVIVKKSLSTRTHICRCGCKLHRDTNAAKNILNSTKNREGHSRINATGVGVSTLIGENLLEQILT

SEQ ID NO: 36029 - protein, 416 aa, unknown
  TnpB Polypeptide
MQLVEQHVISRIDERFAVIDVTAFKSKNLYNAVLYEMRQAFIFQGVRLSYEEMAERMQSHEAYKALPAKVAQQVLKQLAQAWEDFFAALASYMEDPSKFTGRPKLPKYKHKTEGRNLLIYTMQAISQGKRGLKRGIIKPSRLPISVKTQQDPSTIHQVRIIPRNSYYIVEVVYSKKPVQAQVDPSFCVAIDLGVTNLAAITSNRAGFVPRLVNGRTLKSINQWYNKRMKELTLCLPKAERERVTKQMERITTHRNRQVNHYLHAASKAIIDFLVREGVGTIIVGKNPLWKQETRMGKRNNQNFVQIPHARFIDMLTYKAALVGIQVEVQEESYTSQASFLDLDPIPIYKPNDDTVYTFSGKRIGRRNRLYRTKDGRIICADVNGSYNILRKRKPDAFYAEGLAAYVVQPLRLAIAV

SEQ ID NO: 36030 - protein, 413 aa, Bifidobacterium sp.
MEQVVRYKYRVYPTREQDQAFTRLFGCCRVVWNDTVRLFQDRFDPVNRDMPSASEFQRIVLTQAKQTPEREWLKNVANVPLTQTLRDSLRACWNGVRKDRKQRFARYRSRKRNPVNSALFTRNGFHVTEHGTFIAKIGVVRTKWSRPLPSQPSSCTVTHEPNGRWYASFMVKRNTTLLPHCDTNAALDLGFNDLASVITTDGERHRIRNPRNYTHTERWIQHVQKKLSRQQKGSHRYEKTRQHLARLHAKSRDRLNDYQNKQVLRLIRDTQAIGIEHLNIHGMMKRHGRSVRSTALSGFVAKLEHKAEQYGRSVVRIGRFEPSTRLCALCKHHVDDGIPEQVRVWQCARCGATLDRDWNAAVNILDAAGLAESLNAHGDHVRRELAAADSRNGRGSANPTDEANGSGLGITVL

SEQ ID NO: 36031 - protein, 320 aa, Moorea sp.
IFLNAEQRSIVRQWFGVSRYVFNKTVKILQNGEVKANWKAIKTGILNDLPEWCKAVPYQIKSIAIKDACTAVREAKKKYKKTKQINRVRFRSRKNPVQSCYIPKSAVSDKGIYHTKLGELTFAESLPDNICDCRLTSTNGDYYLVVPHKVTNVKAENQGRVVALDPGVRTFLTFFSETSVGKIGNGDFSQIQRLCQHLDNLISKISKAKGGQKRRMRKASRRMVIRIQNLVNEIHHKAARFIVDNFDVILLPTFETSQMSRKSDRKLRSKTVRNMLSFAHYRFKEFLKHKAQESGKMVIDVCEAYTSKTVSWTGGAARSY

SEQ ID NO: 36032 - protein, 448 aa, Moorea sp.
MEFKAVLKEPQKLAINEAIRTARFVRNKVLRYWMDNRGTGKKELYRYNTQLREEFEFVKDLNSHACQASVENVERAIKRFFDNCKKKIPGKKGYPRFKKHSRSVEYKQSGWKLSPDNKSIKFTDKKGIGKVKLKGTWDLWRFEQKLIKRVRIVQKADGYYVHFCVKVDNSEQLEATGFTVGLDLGLKEFYTDSDGYSEPNPRFYKKGEKRAIFYQRRVSRKKKGSANRKKAINRLGRTHLKISRQREEHAKRLVRSYRKIVEPYYKRFNPFMQSRTPIKAPLSKVSSPARCVIRSNDLVAYVRAACRRQDLRVKNLVKNHCLAKSINDAGWYQFREWLEYFGQKFGRITVAVNPAYTSQNCSSCGEVVKKSLSTRTHACKCGCRLDRDVPSEPLREHNAAKNILSRALGTVGHTGTYRAVRSNQELSETERVWVGGFARVKTSKILTI

SEQ ID NO: 36033 - protein, 481 aa, Moorea sp.
MVLVKYFAMGQKQAKKRTKRKKSKTASSIRTDVWSLSLTRHQRNLAILTVEEYRHFLKPLVLIAYGNWSALLGLTAKERVNALEKLVHQTANNPNPKYGWYFKKAINNHPSFRKFPSYLRRAAIQDALGIVSSFVTRWQDWKRGNRKHRHDKSPKLTAIGNSYPALYKGQQIRYNANFNAVDLKVWNGTDWVWLLAIRVPTSGKSRHLGLDNKLMSPSLIANDRRVHLSMPVEIAIKELPESDWVSAVDLGINTTATCSIVSRDGTVKARKFISPARDIDRRDQRKQRIATKSKQTRKITKRNLPQGFCKGLYRKSKHINEHIAQFVSKAVIDFAMAHQVRVIVFEDLSNWKAKAGKHGSVQKQRFHQWCKDRIVELAIEKFSELGGFVVKVNAKYTSAYGFDGSGLISRSKKKYSLARFKNGKCYNADLSASYNIGARYWYAVLTNAKLTRVWEGRSSSHTLRTPVTLSSLWKLSESNLA

SEQ ID NO: 36034 - protein, 286 aa, Moorea sp.
MIILEFKAYGKKQQYQAIEEAIRTVKFVRNSCLRLWIDNKGINKYDLNKYCKVLAKEFPFTNALNSTARQAAAERTWSSIARFYDNCKKSVPGKKGFPRFQKHCRSVEYKQSGWKLSPDKKSITFTDKKGIGKLKLKGTWDLWRFDKKQIKRVRIVKRADGYYVQFCIAVDNNEALKPTGNTVGLDVGLKDFYTDSDGNAESNPRFYRKGEQRLKFYQRRVSRKKKGSANRKKAINRLGRHHLRISRQREEHAKRLVRSYRKKSAAFIVDRLCIKGGRFCCKAALF

SEQ ID NO: 36035 - protein, 211 aa, Moorea sp.
SSIPRFFDNCKKKVPGKKGFPRFQKHCRSVEYKQSGWKLSPDKKSFAKRRLCRIIFSDKKGIGKLKLKGTWDLWRFDKKQIKRVRIVRRADGYYVQFCVQVDINEELEPTGNTIGLDVGLKDFYTDSDGHAEPNPRFYRTGEKRLKFYQRRVSRKQKGSTNRRKAINRLGRTHLKISRQLEVHPKRLGTKLPQDSGAFMGDRLCIKGLNLL

SEQ ID NO: 36036 - protein, 187 aa, Moorea sp.
HTRKYLSRKTENRRLRKDQAGIIAIIGAASRSLFNGESLKVFAEDLTQPIKGKRQSLAMSRKLNSWMKGAIRDSLQKWANWTGSVVSEIQPSYTSQIDSVTGTLLGVRKGDSFIRFNGVVLQADHNAALNILARGTDKEISRFMTRVEVQAVLLRRTARFLEDMDLSLANAVELGWLDPKHELCSIF

SEQ ID NO: 36037 - protein, 412 aa, Moorea sp.
VDKSWFSTSLKVVQNQNLPQIFSPSFTSSIAVSTDSESTGQKSKKIRIFLNAEQRYTVRKWFGVSRYVFNKTVKILEDGETKANWKAIKTDILNSLPEWCKAVPYQIKSIAIKDACTAVREAKKKYKKTGQINRVRFRSRKNPVQSCYIPKSAVSSKGIYHTKLGELTFTETLPDDIGDCRLTSTNGDYYLTVPHKTTQVKSENQGRVVALDPGVRTFLTLFSENSVGKIGCGDFSRIQRLCSHLDGLLSRISKAKGKQKRRMIKAARRIIIRIQNLINELHHKAARFLVDNFDVILLPTFETSEMTKKGNRKIRSKTVRNLLSFAHYRFKEFLKHKAGETGKTVVDVCEAYTSKTVSWTGELINIGGSKKIKSKIDGRSMDRDINGARGIFLRALVDTPWLRNQLALASQD

SEQ ID NO: 36038 - protein, 392 aa, Moorea sp.
MESMTYTYRIHPDIDQEAKMLDWLEQCRRVYNYALRQRKDWINSRKCRVDACSLRHEYIISVDEPYPDYYKQQNALTVAKKNIPEFKAVHSQVLQDALKRLDRAFKMRQQRQFGFPRFKKVGRYRSFVFPQFKSNPITGWQIKLPKIGKMPIVLHRAIPDGFVVKQVRVLFKASGWYAQRILQSDISIPEPMPHGEPLGIDWGISSFVATSQGELIDNPRFYIQSQSKLKWLQRRLSKKERGSKSYQALAKKISLLHEKISNQRQDFHYKISNHLCRQAGMIFAEDLNILGLSKGMLAKHVLDSAPGQFLNILDWVCRQTGTYHQKVDAKGSSQLCPECGADVPKDLSVRIHSCPECHVVMPRDVASGKILVNRGIAAVEGLAVKLGVKEES

SEQ ID NO: 36039 - protein, 203 aa, Moorea sp.
MSVWEYVTENSVGKIGEGDFSRIQRLCLPFDRLISKISLSKGKQKRRIRKAARIITIRIQNLINELHHKAARFLVDNFDFILLPTFETSQMSKRQERKIRWPKGHATRTKTVRNLLSFAHYRFKQFLKHKAFETGKLVVDVCEAYTSQTVSWTGELVKIGGSKIIKSKIDGQKMDRDINGARGIFLRALVDTPWMREHLALAG

SEQ ID NO: 36040 - protein, 286 aa, Moorea sp.
MIILEFKAYGNKSQYQSIDEAIRTMKFVRNSCLRLWMDNKGLNKYDLNKYCKTLAKNFPFANELNSTARQAAAERAWSSISRFFDNCKKKVPGKKGFPNFQKNCRSVEYKQSGWKISPDQKSITFTDKKGIGKLKLKGTWDLWRFDKKQIKRVRIVKRADGYYVQFCVSVEVKEQLVPADATVGLDVGLKDFYTDSRGKTEPNPRFYRTGEKRLKFYQRRVSRKKKGSTNRRKAVNRLGRQHLKISRQREEHAKRLVRSYRKKSAAFIVGRLCIKGGRFCCKAALF

SEQ ID NO: 36041 - protein, 286 aa, Moorea sp.
VIILEFKAYGKDSQYTAIDEAIRTVKFIRNSCIRLWMDNKGTGKYDLSKYCKILAKQFPFANELNSTARQAASERAWSSIVRFYDNCKKKKPGKKGFPRFQKQCRSVEYKQSGWKLSPDKKAITFSDKKGIGKLKLKGKWDLWQFDKNQIKRVRIVKRADGYYVQFCIAVDIKEDLKPSCRNVGLDVGLKEFYTDSDGNTEPNPHFYRKGEKRLKFYQRRVSRKKKGSANRRKAVNRLGRTHLKISRQREEHAKRLVRSYRKKSAAFIVDRLCIKGGRFCCKAALF

SEQ ID NO: 36042 - protein, 450 aa, Moorea sp.
MQRGFKTQLKLNNRQKTLMAQHAGYSRWLWNWALNMWNESYKAGLKPSANKLKKFYTNHVKPQYPWQSTLSSRVYQFVFMHLSEAFNRFFQGRAQHPKFKKKGRNDSFTLDNCGKVMEFSGTRLKLPFIGWVSTYEPLPEIQTKRVTISRVADSWYISLAYELEPEPTVKSREYLGVDVGVKVLATCSDGTVFPNPRAYKQAQKKLARLQRELSRRTMGSANRNKTKLKLAKVHQSVANIRKDAIHKLTSWLCKNHAVIGLEDLNVSGLLKNQNLAGAIADSALYEIRRQVSYKSEWYGCSLVFVDRFYPSTKTCSSCGHVQEMPLKERVFDCEVCGEVKDRDYNASLNARTFCRRLFGLSLWNRKCRHPMKNQVTGKKQEGNFNTVCTALYQFLVAGNKGTTQQKYWLNITELNSINTDMVRGYLKSFLILNFAPLAPQFWGEQESICW

SEQ ID NO: 36043 - protein, 278 aa, Moorea sp.
RQKGIGKLKLIGTWDLAFYRVKQIKRVRLVRRADGYYCQFCIQVDVNVDVEPTKHNVGLDVGLKEFYTDSDGNTEPNPRFYRKSEKRMKFYQRRVSRKKKGSANRKRAINKLGRVHLKISRQREEHAKRVARCVVLSNDMVAYEDLRIKNLVKNHCLAKSINDAGWYQFRKWLEYFGKKLGRVTVVVNPAYTSQNCSSCGTTVKKSLSTRTHVCRCGCVLDRDQNAAINILNSALSTMGHIGTWIDKDPNASGDLSTTGTGEILSQQLGSLNEESPGF

SEQ ID NO: 36044 - protein, 406 aa, Moorea sp.
  misc_feature (72)..(105): Xaa can be any naturally occurring amino acid
MFNLTYEFKLKPTKQQSKIFDEWLEITRLVYNYALAERKDWYKSRSCQINSCRLRSCYIIPADTPRPTYASXXXXXXXXXXXXXXXXXXXXXXXXXXXXXXXXXXAFTNMWERNAGFPRFKKKGRMRSFVFPQMKGKRLEHGLVKLPVIGWVKFRQSREIPNDAQIKQARIVKRVSGWYVMLTIQWNVDLPQPIPHGEAVGIDVGLTSFIATSSGLLIKRPRFLGDAERKLKLLQKRVSRKPIGSKNWRRAQKKVAKLHEYVANCRKDWHRKLCHHLCDHAGMIFVEDLNLVGLSRGILGKHCLDAGFGQFFKILAQTCFKRGVYFQKVDARKTSQICPNCLTETGKKELSQRTHICSACGYTTNRDIAAAQVVAIRGLTAVGHTVKMLAEGKFVGIPLKQESSRL

SEQ ID NO: 36045 - protein, 407 aa, Moorea sp.
MRTAYQYRLRLTRQQQVTIDQWLDICRRQYNYRLAERFNWWEQNRCDINACPLVCHLPELKDRPDFYAQKRDLVNSKKLFPEYKDLPSHTLQDVIARVKKTFDRWLQGDCNGKRSGKPRFKGVGRYRSIAFPDPIKPEHIDGRLIQLPKIGKLKMILHRPLPDGFKVKTATITKKADGYYITLSLQDSSVPVLTPDAPSLDNTIGIDMGLKEFLVDDSGAYEPIPQHYRKAERCLKRLQRSLSRKKKGSNRRKKAIKRVAKAHLKVSNQRKDFHYKTAKKLLSQGKNLAHEKLNIKGLAKSRLAKSVTDAGWGQFLQILSIKAERAGLLAIAVNPNGTSQNCSECGAKVPKTLSDRLHNCSECGLTIDRDHNAAINIKYLAVGHSVNKAQVASDAIAGVPEKPALYA

SEQ ID NO: 36046 - protein, 460 aa, Moorea sp.
MQLGYVYKLKPSPQQKATMVEWLDMLLAQYNYLLRDRNDSYEQARSPKLGNFCDLRSDGEACPLTCSVSKSSSVGYPWKKSQKNPRRNAYEIQSSALPVLKKQRPWYKKIHSTVLQQMLRQLDTAFTKFFKGEAKYPRPKRRSRYRSFKYSPGQVKLDGDGIYLPGIGWMGFYNSRPIPDGFTIKSVTVRRKSRGWFVSLQIENKSVPLSPVKTANEIRPDRVKGCDLGIKKLVSTSDGETIVNPANTNKFKRQARRLKLRQRAASRKKKGSNNRKKLFGKVAYLHEKITNKRSACHWEIAKQLTDGTDALIFEDLNIRGMKSRCKPKPNENGGYDHNGQSAKKGLNRVISDAAWGELIKKVEVVAAKSGIPVIKINPRHTSQECPKCHHTSADNRSGEKFVCTECGYHDDADINGGVNIRNKGLKKLGIDPAQLPSVRRKVTPTETTVAHDCAWESPSL

SEQ ID NO: 36047 - protein, 410 aa, Moorea sp.
VERSWFSTNLKVVQNPNLPQIFSESFTSSLVASTDSESTGQKSRKIRIFLSAEQRYLVRKWFGVSRYVFNKTVKILQDGEVKANWKAIKTGILNDLPEWCKEVPYQIKSIAIKDACTAVREAKKKYKKTGQINRVRFRSRKNPVQSCYIPKSAVSEKGIYHTKLGGLTFSEALPDNRGDCRLTSNNGDYHLTVPHQTTQKNAENQGRVVAIDPGVRTFLTFFSENSIGKIGHGDFSRIQRLCSHLDNLLSKISKTKRNQKRRMRKAARRIVIRIQNLVNELHHKAARFLVDSFDVILLPTFETSEMSKKGKRRIRSKTVRNLLTFSHFRFKEFLKHKASETGKTVVDVCEAYTSKTVSWTGEMVNIGGSKAIKSKIDGLIMDRDINGARGIFLRALVDTPWLREQLALVG

SEQ ID NO: 36048 - protein, 265 aa, Moorea sp.
MEFKAVLKESQKVAINEAIRTARFVRNKVLRFWMDNPGIGKKELYRYNTQLRDELEFVKHLNSHACQASVENVERAIKRFFDNCKKKVPGKKGYPKFKKHSRSVEYKQSGWKLSPDRKSIKFTDKKGIGQVKLKGTWDLWRFDQKLIKRVRIVQRADGYYIQFCVKANNSEPLQATGCNVGLDVGLKEFYTDSDGYAEPNPRFYRKGEKRLKFYQRRVSRKKKGSANRKKAINRLGRQHLKISRQREEHAKRVARCVIRSNDLVA

SEQ ID NO: 36049 - protein, 460 aa, Moorea sp.
LFQCRQANSLINCAIYYVKNKHYDWLREQPEAYNTYWRDDTLKFGWKTYKCAVRYPELDKALKMSPHYKAMAAQSAQQTLKSVGESLTGYNQLVSKYYKGEVDRPRLPRYRKKGGLAAVTFPRQALTYKQGLFYPSVSKESKPELICDVVLDPPAFVDPDWVKEVTVRPYLGQLWINWVIDDEKQPVENNPNLDYSQAWSFDHGGDNWLTGVSTHGKSLIIDGRKLKSMNQGYARLVAKYKTGKPEFYWDSKLDRVQRKRNNQMRDAVNKTARFIINRCLSDRIGNIVIGWNERQKDSINMGRRGNQNFVAIPTKRLIQRLKQMCPEYGIKLTVTEESYTSKASYLDEDPLPKHGEKPSGWQPSGKRVRRGLYKTAKGYLVNADCNGAGNITRKVAKQLGLDLTKMGRGALTLPHRYDIFKYLKKSYRMSCVREASPLAVGHAARTAIVARENRCDFTTS

SEQ ID NO: 36050 - protein, 286 aa, Moorea sp.
MIVLEFKAYGKQRQYSAIDEAIRTAKFIRNSCIRYWMDNKGVNKYDLNKYCTVLAKQLTFANELNSMARQASAERAWSSIVRFYDNCKKKVPGKKGFPRFKKHCRSVEYKTSGWKLCPDKKSIIFSDLKGIGKLKLKGTWDLWRFDKKQIKRVRIVRRADGYYVQFCVQVDINEPVPATGNTIGLDVGLKDFYTDSNGDAEPNPRFYRKGEKRLKLYQRQVSRKKKGSSNRKKAINRLGKTHLKISRQRQEHAKRLVRSYRKKSAAFIVDRLCIKGGRFCCKAALF

SEQ ID NO: 36051 - protein, 404 aa, Streptomyces sp.
MIRAYKFLMRPTVRQEQALDEMLRDHCSLYNGALQERRDAYRHVSKTSVKYGMQSAQLKDIRAFDPERQGRWSFSSQQATLRRLDKAMQAFFRRIKSGDTPGYPRFRGVNWFDTVEFPRDGDGCRWDSTPHDPVTRVRLQGVGHVKVNQHRAVTGRVKTVSVKREGRKRFVVLTSEQDQSEPLPATGSVVGIDLGIASFLAGSNGEFVPNPRHGRRAAAKLEAAQQTLSRFPRVRRDKRTGNHQRAVEKVATLHGKVRRQRLDHAHKTALGLVRVHDFIAHEDLKIRNMVKAPAPKPDPENAGSFLPNRAAAKAGLNRSISDVGWGVFLTILHAKAESAGREVIAVDPRNTSRICPECGHLSVENRPTQEKFHCVSCGHQAHADTVGALNVLRAGLVRRDANPA

SEQ ID NO: 36052 - protein, 441 aa, unknown
  TnpB Polypeptide
MSIRAYKFRLEPTSAQALGLDDVLSAHRWLYNECLDQRVQAWREFQVSASYYDQANWLWAERRFNPRIGVLNYSSSQATLRRVQRSFENFFRRVKENQEGKARRKPGFPRFKGVDQFKSFEFPSVGDGVGLDGNRLRVQGIKGLVSIRKHRDEEGKTKTIRVKKEAGHWFAILSCELPDVPLVPNGRPAVGVDVGLCSFLVDSEGNKTGNPRFLQKSLKELRRANRSLARKKLASRKRQEAKLRLQRIQARVADKRRDFLHKLANEVVGSHGLVAVERLNIQGMTRKRRKKEAKQEKGAQKQRKSTRTKRRNIHDASWGMFREMLRYKAASAGCEVIEVDPRGTSQDCSRCGTVVPKDETVRWHECPRCGLSLDRDHNAARNILLRALDRTGPAAFISLSPTQGSGMRAVPPLAPPGSLEKPSPSGDGEGHVSFLKDMLEK

SEQ ID NO: 36053 - protein, 174 aa, Brevibacillus sp.
LLVDKHNRNLNLLKHKLGTLRVTQKANKWMVQISVTIPTSEKTGTKIMGVDVGLKVPAVAVTDEDVLVSLAMADKNKYVRRRFKSKRKKLGKQKKWNAICNLDNKEQRYMKDQDHKVSRAIVQFAVDHNVSAIRLEQLTNIRQTTRTSRKNEKNLKIHGHFIVYPIHCVQSKYV

SEQ ID NO: 36054 - protein, 145 aa, Brevibacillus sp.
MVQISVTIPTSEKTGTKIMGVDVGLKVPAVAVTDEDVLVSLAMADKNKYVRRRFKSKRKKLGKQKKWNAICNLDNKEQRYMKDQDHKVSRAIVQFAVDHNVSAIRLEQLTNIRQTTRTSRKNEKNLKIHGHFIVYPIHCVQSKYV

SEQ ID NO: 36055 - protein, 235 aa, unknown
  TnpB Polypeptide
MEYLRKYWAGKRAAAPVLEKRHRKYFLRFSYIEEVPLTKAPVKEQIICSVDLGINTDAVCTIMRSDGTVLGRKFIDFPSEKDRMYRVLGRIRRLQREHGSVQVKSRWAYAKRLNTELGRKIAGAVAGYAEENHADVIVFEYMETKGRISGKKKQKLHLWRKRDIQIRCEHQAHRRGMRISRICAWNTSRLACDGSGTVVRDPGNHSLCTFQNGKDITVIFRRPIILEQDILYGNS

SEQ ID NO: 36056 - protein, 383 aa, unknown
  TnpB Polypeptide
VIELTRKKKSNNDVPTQTLTARTKVVGLSDQDALLLGLLGFSATKLWNVANHHRRAAWSETGKIPGFPEQCRELKGNRWYRLLPSQSAQEVLGEQDDSYRSWFSHRKNGDKKANPPGFRKKDSLSTVTFKQNAFEMLPDNQVKLKLPKTYERREIILEYRLPPDAVLGKVQQVKLVYEPKTGEWRLHITHKVQIKYRETENIMSLDLGIVNITAGLISDGYSFIVPGGELLALDRYFQKEKVKCSRSSSKHCIELNAKWGRQRNHYLHVLTRWLVNLALARNVSVILVGELKGIRADKDWGDAGNQKLHTWPFSKITSLLTYKAALAGIRVIKAPEKSTSTTCPACGKRIKKARIYRGLFCPLQSSFQRRPGGRVQYSAKVSP

SEQ ID NO: 36057 - protein, 150 aa, Gloeocapsa sp.
VSRQRKEHAKRLARCVILSNDLVAYEDLKVRNLVRNHKLAKSINDAGWYQFRVWLEYFGTKFGKITVAMMPHFTSQNCSNCGEKVEKSLSTRTHKCPHCKYIADRDENAAINILQRGLSTVGHIGTNAWGEETPTLVEAILSEQVTSLNL

SEQ ID NO: 36058 - protein, 439 aa, unknown
  TnpB Polypeptide
VPRDAGRHGERQVRPARLRRFYEKTCDSGTVRTAYRCRAYPDEQQQAMLRRTFGCVRVVWNRTLAQRRARWHLERTGTSYAETDRALTAMKKDPDLAFLNQVSSVPLQQALRHQHQAFRGFFAGRARYPRFKSRAGRQSAHYTRSAFSLRGGVLRLAKAASPLRFTWTWPDIDVTALDPAMVIVSLESDGRWYVTFTVDTQAPEPLPQTGRAVGVDLGVKDFAVTSDGQRIANPRHLERRAQNLARYQRRLARCQNGSANRAKAKAKVARAHRKVRNVRQDFLHRASTRLVRENDIIVIEDLHVAGMVRNRRLARAISDCGWGEFRRQLEYKCQRYGRELVVIDRWYPSSKTCSACGHLLAELSLSTRHWTCPSCRARHDRDINAAQNIRAAGRAVARDAPGDACGGDVRHSGSSRVQSPANQEPQPARAGIPVFQGGE

SEQ ID NO: 36059 - protein, 401 aa, Calidithermus sp.
MAVYRKVYRFRMEPTQAQGDALLRMAGARRFVWNWGLKRRKEAYAATGKGLTYCQQAAELTALKKQPETAWLKDVDAQLLQQALRDLDRAYQAFFSKRARFPRFKSKKRDEPRFRIPQRVRVEESKVYIPKVGWVRIRQSQPIDWRIKGATFKQDAEGQWYVTLTAEFEVPDVPLPPANPERVVGIDLGLSHFAVLSDGSPPIDPPRFYRKGLAKLRRAQRALSRKQKGSKNHEKARKQLARVHARIRNQRQDWLHKLTTALVRQYDGLCIEDLNLKGMARTKLSRSVQDAALGEFRRQLEYKALWHRKHLAVIDRYFPSSKLCRECGSINPTLSLSERVWTCGCGAVHDRDLNAARNIRAEGIRTIPVAVGHTETLNAWGEGVRPAHSRQSSLNQESHAL

SEQ ID NO: 36060 - protein, 371 aa, Clostridium sp.
MILGKKVSLYPTEKQEQKLWQSVGTARFIYNWTLAKQEGNYKNGGKFISDNDLRKEITILKQDDLNWLNGVSNNVAKQAVKDGCEAYKKFFKGLSDRPRFKSRRKAKPSFYNDTSKLKVKESSVLIEKVGWMDIKKDSIPMNCKYTNPRIGLDGKYWFISVGLEKENPTLELTKESIGIDVGIKDLAICSNGMTYKNINKTKAVKKLKKTLKRKQRQCSNKYEKNKKGKEFVKTKNIAKLEKQVRLLHRRLANIRVNHLHQATKKIVKTKPSRVVMETLNIKGMMKNKHLSKAVAEQCLYEFKRQRQYKCEFYGIEFVEVDKWYPSSKTCSGCGNVKAKLSLSERTYICENCGCIIDRDYNASINLSRYSE

SEQ ID NO: 36061 - protein, 380 aa, unknown
  TnpB Polypeptide
MSDNLIRTVASKLDVDGHGPALSETARRFNAAATWIADVCWREGITNTNTAHHRVYGETRRRFGLGAQLAVNARAKAMEALKAARRRGSQTCPSFGPEGAVRYDARTYRLLPLDGVSLGTVAGRVTCRLLPGARQRAMLLEEVWAIGGADLVQRKGVWYLHLTQHRPAPEPTDPTGYIGVDLGIVNLATTDDGQAYSGAQVKQVRRRRCAQRQRLQKRNTRRSRARLRTLARKEARFQRDVNHCISKALVAKASLECKALALEDLSGIRGRVTTVRHQQRREHDSWAFYQLRQFIAYKAMAVGVPLVLVDPRNTSRTCFVCGYCAKGNRLSQSHFHCLQCGHVAVADHNAAQNIALRAAVNRPIVLLGPQAPIASTSRLL

SEQ ID NO: 36062 - protein, 247 aa, Scytonema sp.
VLVLEYKVKGKQEQYRAIDEAIRTTQFIRNKAIRYWMDASPEAKVNRIGLNNYSTALRKEFAFVKELNSMACQSATERAWSAIDRFYTNCKSKKPGRKGFPKFQRDNRSVEYKTSGWSLHPTKRRITFTDDKGIGEVKLLGKWDIHTYPVKSIKRVRLVRKADGYYCQFAVDVEIKPEQRTGNGELGLDVGLEFFYSDSNGHHEENPRFLRKAEKAIKHAQRQIYKKKKGKNQRRKARQRYGAIRCE

SEQ ID NO: 36063 - protein, 404 aa, Burkholderia sp.
MERLQAFKFELMPTGEQARKMRQFAGARRFVYNKALALQQENREAGGKFIGYVGMAKRLTEWRNGPDTPWLKDAPVHTQQHALKDLDRAFVNFFEKRADYPCFKRKGMGDSFRYPDPKQMKLDRENGRISLPKLAYIRYRNSRMVLGEVRSATVSHRAGKWYVSILTRREVEQPVPHGPVVGIDVGVARFATLSDGTFIAPLASFKKHEQRLAKYQRRMARKVKGSSNWKKAKARVQRVHARIANARSDFLHKASNEISKSHAMIAVEDLQVRNMSKSASGTADAPGRNIRAKSGLNKSILDQGWFEFRRQLEYKTAWRGGFFVAVPPQNTSRTCPSCGHISADNRRTQALFACVRCSHEANADHVGAINVLERGQRLLACGETAQSGRSKKHEPAEVTRAIAA

SEQ ID NO: 36064 - protein, 377 aa, Burkholderia sp.
MDIKRAYRFRFYPTPEQEAILARTFGCARFAYNHMLRLRTDAWYQRQERVGYHETSAALTALKKTPEHAWLNEVSSVPVQQALRHLQTAFANFFAKRAKYPNFRRKDGAQSAEYTTSAFKWDGASLKLAKMDAPLAIRWSRTIPKGAKVTTATVSKDASGRYHVSMLCDDAVSAKPEVSGKVGIDLGLTHFAILSTGEKIAAPNTFRKNEARLAKLQRRLAKKQKGSANRMKAKLKVARMHARTADSRRDFLHKLSSRLINENQVIAIESLAVSNMQKNRCLAKSISDASWSEFTRQLEYKAQWYGRTLVGIDKWYPSSKRCSDCGHTAVKIPLNIRAWTCPECGSIHDRDINAARNVLAAGLAASAHGESVSPMSL

SEQ ID NO: 36065 - protein, 405 aa, Burkholderia sp.
MNRLQAYKYELMPTTGQARDMRGFAGSCRFVFNKALILQKENYEAGRKFISYVEMAKQLTAWRNGADTPWLKDAPTHPLQHALKDLERAYKNFFAKRAGFPRFRKKGRSDSFRYPDPKQFRIDQANSRIFLPKLGWLRYRNSRDALGTAKNVTVSQSCGKWFVSIQTEREVGQPVPQAAGMVGIDMGIARFATLSNGTFYAPLNSFRRHQARLRKAQRAMSRKAKFGKNWKKARSRVQRIHARIGNARRDYLHKTTTTISQNHAMVCVEDLQVRNMSRSAAGSTERPGKHVRAKSGLNKAILDQGWFEFRRQLDYKLAWNGGYLIAVPPQNTSRACPRCNHVSKDNRQTQSRFACMSCGYENHADVVGAINVLERGQRLLACGETAQSGRSVKQEPAEATQVETA

SEQ ID NO: 36066 - protein, 416 aa, Kurthia sp.
MERLELFCSKNACRISTGGTSIETIKNERAEEVNVMSQNKAYKFRLYPNKEQQARIHQTHGHCRFVYNHFLALWNTSYKEEGKGLNRSLMSKVLTKMKKQDETAWLRNVDSVALQASYECLIDAFNRFFKKQNNYPRFKSKKNPVQSYTTKNTNNNIAIVGKRIKLPKLGLVKFKQTCVVEGRIMRATIKYNASGHFYVSITCEVPDIQPLPKTNQTVGIDLGITDFAILSDGRKVENQRFTVKMEQQLKREQRKLSRRYEQAKKEKRDVRDCMNYQKQRMKVARLRERVAFQREDFLNKLSTELIRQYDIICLEDLNTKGLLKNHKLAKAISDVSWSSFVQKLMYKAKWYGREIVKISRFYPSSQLCHVCGHRDGKKSLDIREWICPSCGAVLDRDINASRNILAEGLTLLTQQP

SEQ ID NO: 36067 - protein, 341 aa, unknown
  TnpB Polypeptide
MKLWEKTGEKSGRPRLVYENHAMPVFYRDVMYREGAEGKDDAYLKLYDGHDWKWFCVRLSHTDMEYLRKNWKGRKASAPTLERRHRKYFLRFSYTEEAVLTKTSVKDQIICSVDLGINTDAVCTVMQSDGTVLGRRFINFPGEKDRLYRTLGRIRRFQRAHEPAQSRGRWAYTKRLNIELGRKIAGAIVSYAEESHADVIVFEHLEMHGKISGKKKQKLHLWRKRDIQKRCGHKAHRKWMRISHVCAWNTSRLAYDGSGLVSRDPQNYSLCTFRTGKRYHCDLSASYNIGARYFIRELLKPLPETERSLLEAKVPSVKRRTSCVYADLKELYLQMEVLQAA

SEQ ID NO: 36068 - protein, 424 aa, unknown
  TnpB Polypeptide
MRRFSSATRYAYKRLLEGNKRKDLKKNLSKLFNINTRYSDDAILSAQSMISSCEERGQNPKKLIFGSRKVFEQLKKNHLTGKRRRQLKAKWKESRQGNLYSRGDKSKQGNLNLRFEYIDNNQLYLRINTGNRQYVYAKVIRGVKRKSDKWIDFVFMLENAYRYKEWFPYSVRLKIKNGNIYAFVSINEKLPPITITKDNGIIGIDVNAYPFHLALAFTGKNGDLGKYQSISLNELLNVGFEKRQYLEWQIAHQIIKTAKEENKAIAIENLQKLPKGKRGDGFAKLRGKLQKWSYKRLLDKIEVLAKRNGIEIRKVNPAYTSVIGKLKYAPQYNIDKDIAGAYVIARRGLGFKEKLPKNYKELLNDTDFLSYTIAKIEDKISETKQKLEEENNKYKRNGLKTKLNKLRKNLKTLQKYVSRLTSHV

SEQ ID NO: 36069 - protein, 399 aa, unknown
  TnpB Polypeptide
MERGFKYRIYPNASQRDQIARTLGCCRFVYNRALDVKKSAYAKTGKTVSWAELSRMLPAWKRDSETSWLAQADSMALQQSVRDLDRAYKNFFRRVREGGKPGFPKFKSRRHSRQSYRTNGGKVVDRNHIALPKLGTVRAKVSRPLQGRFMSVTVSLDAAGRYFATFLCTDVPTKDTPATDRKVGIDLGVETLATLSDGRKIGNPRHLKKYERKLAREQRRLSRRKGTRRGEKPSGRYLKQRKRVARIHAKIADARTDTLHKVTTMLADENQVLCMEDLNAKGMMRNCHLAKAVSDASFGEFARLLEYKCAERGRTLVGRPLLPSSKTCSAAAQARRPAAVGTVMGLPRVRCAPRPRRQCGEKHTGGGETHPLQHGRYRGARGNRGGYNRLNAQGEDARP

SEQ ID NO: 36070 - protein, 400 aa, unknown
  TnpB Polypeptide
MNQVLTVSCKLQVPSEQVALIDELLQAFADACEYTNRTVKPGLTNEQAMQSLVYNDVRARFGLSSQLAIQAVRRVAGNRKTAKQKGKPIKKFAPTSAAYDERVFSFREHDWTVSLRLLSRRTRFRLAIGNYQRGLLKGQVPKTATLVKRKDGSYYLNIQLESQPPEIETTDKVLGCDLGRTDIVVTSEDDKYSGKDITKIRDHYSNLRAKLQSKAAKGTRSSRRRCRQLQKRLSSKERRFQSHTNHTISYQLVQKAKTNNQVIALEDLTGIRERTNELPRTAVERRRSNSWSFYQLRQFLTYKCTKFGVRLVLVNPAYTSKTCHRCLHIHPVQGKSYRSGKSFRCGHCSWSGDADLNGSKNIAAIGQLIDLPGGSSLLFCSLQDVVLRAAENPTLSRQAG

SEQ ID NO: 36071 - protein, 204 aa, Anaerobacillus sp.
KYFASVLVKENEQLFPKIDTRVGIDVGLKDFAILSNGTKYENPKWLRKAEKRLTFLQRSLSRKKKGSKNRNKFRLQVAKLHEKIANPRNDFLHKISNEITNENQVIVIENLKVKNMQKNHKLAKAISEVSWSKFREYLDYKATWKGRDLIIAPKNYASSQLCSCCGYKNKDVKTLNLREWTCPECKTHHDRDINASINLLKLAM

SEQ ID NO: 36072 - protein, 398 aa, Pleurocapsa sp.
MPTHRKVYRFRMRPTKAQQERLYQLAGARRFAWNWGLATRKAHFETHGEGIGAGELSKRLTALKQLPETAWLKDADSQLLQQSLKDLDTAYKNFFEKRTRFPRFKSRKADEPRFRIPQRVKVEGGRVYVPKIGWVRIYQSQSVDWLTKSATFKRDACGHWYVTLTAEFEMPDTPLKTVIPDRVIGFDAGLKDFAMFSDGERVATPKFYRRGQKKLRRTQRQLSRRKKGSKNRDRSKKRVARVHRKIANQRKDFLHKLSTRVVVAHDGVCVEDLNLKGMAKTKLAKSVLDASHGEFRRQLEYKCAWNRKHFQTVSRWFPSSRLCRHCGSINANLQLSDRVWTCACGVEHDRDLNAAQNIRVEGLNLMEAAGQTDSLNACGASVSHHFGAVRVEARIPLL

SEQ ID NO: 36073 - protein, 477 aa, Ammonifex sp.
VCELPLRVSPAQEKVLLARLEAARQLYNACLGEAVKRVKLIQQSRLWQKAWKAGDRDLRNALIREACSKHGFTDAALQHYAVEIRRSCWIRDHLDVHVAQKLGTRAYRAAQRVLSGQARKVRFKGKNQMDTVEGKSNEAGIRWRDGCVVWKGLILPAVIDPEDPVVRHALSCRVKYVRLVRRKVNGRNRFYAQLICEGAPYQKPENALGEGVVGIDAGPSTIARVNDKEAVLSRFCEELAEKEAEIRRLQRKLDRSLRANNPENYNPDGTVKKGPKQWKKTKTYLKTQARLAEIWRKLSAHRRSLIGRMVNETLRMGNVFKFEKLSYRALQRMFGKSVNTRAPGMFFRELARKAESAGGKVLEFPTRVKVKGRDTHVGLSSFCICGERRKKSLSERWHICSCGVRCQRDLYSAYLARFVEQIGQNDFELDAGSAARQWLGQEPVLQAASGRIPNPRVLGKVAQQPRKGTEGVAAEEG

SEQ ID NO: 36074 - protein, 367 aa, unknown
  TnpB Polypeptide
MLRTISIKLLVSSETHDALDTVRYAFADACNYIVPYAKDNRAFNNVKLHHLCYYDTRDRIGLGSQFTCNAIKAVAGKYKALKLKKHQDVPHIHFKPKSVHYDKKTYTLKDKNTVSLSTLGKRVDAKLIWGKHQKALFEKGTPKEAELIFKNGTWFFNLVIEISTPDRVSSNNVMGVDLGENNIAATSTGKLIGGGKLRYNRDRFLAIRRRLQRNGSQSAKQLLKRLSGKEARHVTQVNHQVGNAIIAEAIEHNIGVIALEKLTNIRKRIKAGKRVRARLHRWAWYQLQTFIEYKAEAVGIEVIYANPAYSSKTCNKCGAIAARNKHRLTCSCGNRAHSDLNASQNLAWLGETAVSSRGAVNRPNVAA

SEQ ID NO: 36075 - protein, 297 aa, unknown
  TnpB Polypeptide
MASGDEGLLTISIGVRVSPEPGAIELLRRYNVALNYAVNKILRMNLRKSERFITLYIESSKNGSTSHLGQLLTAIGMPLQMQMLGGIILRRGRKPRVRKLSMWLYPGQSYWVRDGYVEIAGGIKLRIIGWDRRYDQYENGEARLVYRDGKMMLWISKKIPKPQPYKPRDAIAVDVNERKIVYGDDRINKERDTKIGEAHRWKKLAEDLQKRYSSPRYPAWRRRKAILNRIRSYHRKARNILEDWARKTSLRIVELAKKLRYAVAREDLTGLVNSLRKIENKDHRKKLIIMGYSRLGR

SEQ ID NO: 36076 - protein, 375 aa, unknown
  TnpB Polypeptide
MSGGGNPRGVPARDSDPLEAFRKEIERRKRSNKRTARLRLFPNRYEQETLFDIGLVCARLWNELSYEKRRAFFNRELTIMKRDEINKKYYHRYKEVLGVNAGQVVNKNDGAWNAFFKQLDLRKQRRLPPHIKKLSPPGYWKDRETGEKKIHILIRNDRYHVEPISEDEVYIVLEDFDLRIRYAGRIRWEGKQGRLEIIYVNGRWFAHIPIEVGVEPPKSNPKGYVKPIYDDDEGKKKKQRIINPRSIRQRDPIGDREAFIGMGLNNLFAVVTSDVSALLIKGETIKSEYYWWKREIATYQAIIDLLRNAGLPTWKEYHEKYLKAMYKRDERLRHLYITAIRFLADELYDRGVRKLYIGYSYMLSQNNGNEYNTNI

SEQ ID NO: 36077 - protein, 464 aa, Acidithiobacillus sp.
MTTVTRILQADAPEALQDICKSMGFVRADIWRRYGALGTVGKSANDVRKAISAARFYADLPVDGTIRNETTKDIVNDVLLYKAAAMQKVRKAIAARITDEAERKRLYTLLRQDQWLTDNFLHRQMRKHFQHGKSQVANQFIVRSDKFNTEIVNGYLTIVIHIAAKYGEAIRLTTTSSGKNVKLTGSNLRIIVKDGFSEIHYATTKGDGRPRGEKMIGIDKGYTEAFMDSEGVAHGKDFGKVMRVYSDKASTTGKARNKLYVLERRHREAGRIAKADHIKLCNLGRIKIERRKDRTHQRLRTIAYQSAHTIVDKAAVVVSEDLTAPMAKKQAWKQFNRRMSAWAKGVLAEALDSVCTQRQAEHCLVASAYTSQMDSVTGLLEGKRVGDKFYRVNGEVIQADHNAALNVLRRYEDAEITRFTPYQEVRRILLARSPAQLSVNGHELQAQAYQPCADKSSVQICTGL

SEQ ID NO: 36078 - protein, 369 aa, unknown
  TnpB Polypeptide
VVRACRRDQLSGYARGEQNGVALHHATYRPLKDDYPALVRDHHIQARVKATEAIKSALTLAKQGRKVSAPRSRSCPPRYNVHTFKADWVAGSVRLSTTGGRITVPFVVPAYAAPYVGAKTCTAELMHRDGTWFLHIVVDFPAPAVAHADDVIGVDLGVAQPAVTSDNRFLGKRAWRNTENRYFKQRRALQARGSKSARRHLRKVRGKHARFRRDCDHGLSTRVVRGTVPGATIVVEHPTGIRARVRSRRGKHARRVHGWSFAQLRSSSSTKPRLAVARWSVSSRDTRATPARAVVTRRATTGGPVPCSSVVRVTTRCIATSSGPGTSRPSTVTPSVYLSASGGRSTRLPSRMPAPCRKRQGQAPAFRRG

SEQ ID NO: 36079 - protein, 388 aa, unknown
  TnpB Polypeptide
MLKTYKIELKPTKEQIEKINKTIGVCRFIYNFYIAHNQENYKGSGKFISGMEFSKWLNNDFIPNNQSYSWIKEVSSKAVKQSIMNGEKAFKKFFKKESGFPKFKKKNKSNVGVYLPKNNKTDFALERHRIKIPTLGFVRLKEYGYIPLNSIIKSGIITKLCNRYYISILVEEEVQNKNEVSFTEGIGVDLGLKDFAVVSTGETFKNVNKTNKIKKLKKSLRRQQRKLSRKYESLKKRNKQKGGNATRQNIQKQILTVQRLYNRITNIRTDYINKIINNLVKIKPKFINIEDLNISGMMKNRHLSKTISEQKFYELRTKLINKCHQNNIEVRLSNRFYASSKICSCCGSPKKDLKLSDRTYKCLQCGLIIDRDLNAAINLRDNQIYKIA

SEQ ID NO: 36080 - protein, 522 aa, unknown
  TnpB Polypeptide
MKRARTPTFLLELPLHIDWSQEHHVRAHLEAARCLYNALLSEAMKRLRCMRQDPAWNKARALSPFKKQERAQALSDLRKRYRFSEYEMHEYAKRARVSWIADHIDSTMAQTLATRAYQAANCVCVGKAKRVRFRSRGRGIDSVEGKRNDVGMRFALDPGVGDGGFLIWNEQVIPALIDWRDPLVQHSMRHTIKYVRLVRRKASSPQAQGADKEGNRYYVQLVLEGHAFVKPKHEQVEKETIGLDIGPSTLAIVPRSGAADLITFCEELAPNTRKKRRLQRKMERQRRANNPGNYDEKGRVKKGCLHWKESKRYKATRRQHAHTERKLAAYRKSLHGHLAHRIAQRGTTITIEKTSFKAWQKQYGKSIGLRAPGMFLAHLTRIVAKTGGTLREVSTYRTKLSQYCHQCGQYHKKPRSQRWHQCPCGLGPVQRDLYSAFLLAYLEPGKTHPSINHHAWEGAEPRLRAVMEGLQQRANEGQHWPRSMGLVASRKTARAGARRLESPAYPHQEPISPSGRSETMGE

SEQ ID NO: 36081 - protein, 470 aa, unknown
  TnpB Polypeptide
MGQATRTTKLLLNLGKRKEGGANSQKRAALDATAAVLDAARAFYIDFFLAHAEKLAERVAYYSEEHLEIRERLISAHELLSWAESCTVATAAHPHPWPGWNFTQAFPAMPFAYRRSVIKDAIGKVRSYLSNRANWEASGKQKGKPGWPAATDHPTLYQGCLSLDLEALDTKEAFVRINVYTGEEWRWMAYPVNSSRYTVQRLREADWQRQSPTLVLRAHAAELHIPQVKKIAAKKVMERKQDPDLVTVAVDLNVKNLAVITVRQHDAIIETVFVTDHGLDAHRYRHLRRIARKQWQSGKPVKGERSNQQLWRHIDRLNDDAAHTVARIIATVCGRYPGCILLFERLRKIKAGKASKSRRMNRRRANQLRGKINQHARDKAYAQGVVTVEVNPHGTSQYCSRCGAKGERFSYRGGKRIVEKWGKLFWCPVCHYEAHADFNASANVHRSFYREWHWLPRQAKAPPLPGSEGG

SEQ ID NO: 36082 - protein, 373 aa, Scytonema sp.
MVRKKTPSFITEIPLVVDSKQEKELLSRFEASRQLYNACLNEAVVRMELVRNSEAFKTAKKIPRSKKKERTDAFSAARQAYRYSDYDLQAYATIVANSSKWITDKIDSNTQQTIAKRAFKASERVIFGRAKKVRFKVSSRFRSVEGKTNKQGLRWKNEQLVWGSLNLRPIIDENNPVTMHGLQSPVKYVRILWKELNGKRRWYAQLINEGNPYQKEKNYVSNGLIGLDLNISNIAFVGDEKAGLLPFAEKVPIYQNEITALQRKMQRSSRLTNPSNYEPDFQAKKGRKTITKKGKPKKGSRNWRKSKNYQKIALKKRELERRKTAYAKSKNRGVVNEILRHGNVIKAEKVSVKAWQKRYGKAIAAKSLLFCTI

SEQ ID NO: 36083 - protein, 228 aa, unknown
  TnpB Polypeptide
MNPDRYNDDGTAKKKSKDLPAWKFSKTCIRNKAKIRELYRKKTEYTKCRHENLLNRMIKDASVFINEPMDFKVLAKRAKETSRQDKASVVTKSDGTEQTIYKYKRKKRFGKSISDRSPSLVISRLKQKCNQYGLVYIETDKWKYKASQYDHVLDEYIKSELSQRFKKIGDYTVQRDLYSSFLQSCMDTLEKPDRNKCIKLFDNFVKMQNELINEMKAAGISYPTCFGF

SEQ ID NO: 36084 - protein, 397 aa, unknown
  TnpB Polypeptide
VEVTTIKVIKAHKIRLHPTAEQEEYLRRACGTRRFIFNWGLAEWQRQYQAGEQPAAFALKKQFNAIRGSEFPWTYEVTKCVVEGAFDDLGNAFRNFFAKRAKYPQFKKKGRSQESFYLANDKFTVGDHWVQVPLLGEFLVRQREAKGEPITKRTRMKRNLGKVNLAEKLRFSGKIMGATIRQEAGWWFLSVQVEVVSAQTPVDGPPVGIDAGFMRLATLSDDTRFENQKPLRHLLAQVRCLNKQLARRQKGSKNREKTKRKLARLHYRIRCLRDDLLHKVSYYVTERYGFIGLESLNVRGMFQNRKRALSASDASLGKLAYYIETKAQAHGTKVQRVGRFFPSTKRCHRCHHVREIDERERIYICFNSACGWVGDRDLNAALNILEEALRLASLTVQ

SEQ ID NO: 36085 - protein, 234 aa, Sporolactobacillus sp.
LPHEKGIRIGITTIKQEPNGNWFVSFQVKSDHPFKEKLVKMNKTVGIDLNLSNFLTQSDGKVVENPHFYKRIKGQLAKVQRVVSRRATRAKKEKRALRISKNYQKIRLRLSELQNKIARQRLDFLHNVSTTLIKNHDVVVSEELRGKNMLKNHALALSISDVGWRTLINQLEYKAILYGRTYIKVDPAYTTKTCHVCSSINHEVKLGMEQWICPTCGTFQIRDHNAAINIEQKG

SEQ ID NO: 36086 - protein, 379 aa, unknown
  TnpB Polypeptide
MVKKGIVNMRKTFQYRLYPTRKQIIKLLHVLSVCRHLYNDTLHDRKVSYEDCNCGVSYYDQQDWLKFADKQGVYGHILQNVLRRVDTSFQNFFRRVKSGAEKVGYPRFQGRDRYDSFTYPDPYGTGYKIEDGKLNLSKIGTIRIFQHREIEGKIKTCTIKRDGDQWYASFSIELPDPEPKEVKTSVGVDVGITTLATLSDGTEIENPKTLDKYDSKVKKAHRDLSRKKKGSKNRNKQKVVLAGIYRKVRNARKDYLHKASRILADTYDRIIFEDLQIKNMVKNHHLARSIHDASWGMLISLTTYKAEYAGGVVELVNPRNTSKQCSVCGGIQSMPLSQRTYRCPNCGAVMGRDHNAAINIKNRYVPADCGKLTPVEMVA

SEQ ID NO: 36087 - protein, 452 aa, unknown
  TnpB Polypeptide
VKTQIAFSDNINKGKFAALIEQAERLGAIRTEVWQRFGSIKGISLRDRTIRDNWLKEGRQFNVGATPWKQTLCDAIGDIKACREAAKFDAKQAIRRHTKDKIEQKRLYTLLKYDKYLDDRYLARTMRKHFKRGHNHTHNQIIVRSDDYTVFTLNEKVWIKIPSLIKGKRIAIPLSTNVAPKGNLRIILRNHKVEVHYAAEATKTNDCGTQTLGVDKGYTEVLTDSDGEHHGVTLGAVLTKESDRLKLKYQRRNKLKAIARKKPWVNKHNLGRKKLDKQAVEHQSDVKTIVHEAVNLVIGKAAVIVTEDLTSPIAGKKFGKNVSRRLSAWTKGVIASAIENVSRRRGSTVIYVNAAYTSQMDSRNGTLSGKRCGEKFYCEDGEVLQADVNAARNVLARLYDSEISRWMPYKQVKAILLKRTSANRLKLLNQDSSCRLPYLSTESELSNEQVYI

SEQ ID NO: 36088 - protein, 415 aa, unknown
  TnpB Polypeptide
LRRTCIVELIVDEETEKKLRRLCELSSKLWNEINYTRLKAWMEKKGIDFDGTYKEFYEKYKPLIGSATAQIIIRKNDGAWRGFFELLKLKKEGRLPPFVKKVRPPGYKKKRKSRALWVVLRKDQCEVSDDKLILKYLGTIGRIEVKYKGILHLRGERGGIEIRYDADRGKWYASIAFDVSEKMVRGEWRPVPKQPRGNLTAGIDIGINNLMAIYVENGLTKLVNGRPLKAISHYWRGRITEYQSMLNKYGLKMSKKLRQMYTKWRRQIRHYINAKVREAVEWLYNVGVSKVKIGYPKGLAQENGDFNNVHIWTYGYLLRRIAEVAEEYGISVIYVDETGTSSKCPIHGDGCGIRVYRGLFRCTQLNEIYNADIAAAYNILKTQITEDANNPRAPKRGGGNGRRPGQGLNPQKEGM

SEQ ID NO: 36089 - protein, 575 aa, unknown
  TnpB Polypeptide
MKTVNSLPLTVTRLFAPIPLDTQAELDLLCELYGRTLQKFQMAFCTHELRQKVWNWRAFRDEIVYCLNLPQPKFETLLEDLKAQGKRAQAELLKFLRSQQSSEGPHLQARHWKLCLEEASQGLRTYWQTVKAELKRQWGRFFGRYSNEPKTLIYINWILRETEPQFYMASQGKVPYPQPPKLNPKEKDAEERYRKRLTAFEKLKKDIETVKRYAVAKRVYCAIKKVRKKIRLPHCRLTSNRADFDSSCWRLNSKDQNELRLTSYAEGAKKRQLIALRILGKGALRGTIQLIKKLDVYELRVCREALCKPERTEGEIVGFDTGYTEVAALSNGAFIGQKFGEKLTRYSDYCKEKGQKRNKLWAKAKELESSAKEKDRRKSQNIFKHNLGRKKHNAKYRRAQDSIKQEINKAINSIVQGKGDGLDGVKVKELVIEKLSAHMGKTRSKNWNRRLSSWARGYIRQCLEQKCKQFGIRLTQVNACHSSRVCPACFYPSKENRVSTDRVKCRQCGYEGHADTCAAKEILRRRSGEIPLYAPPGKVFEMLMVQYKRGLEVPKAPPFSCKTQLNESEGEKKSL

SEQ ID NO: 36090 - protein, 234 aa, unknown
  TnpB Polypeptide
VFFNGHYYSVWDSYGLSKYQFKTASFNEDAQGRWYFNVVVEIETQASSGTASVGIDLGCKEAATDSNGHKVVGRQYRQLEQQLGIAQRANKKHRVKAIHAKIKNRRKDDLHKYSRQLVDGNAAIFVGNVNSLSLAKTKMAKSVLDAGWGMLKTMLEYKCAHAGVVFEEINESYTTQTCSCCGEIPASSPKGRAGLRIREWSCSSCGATHDRDVNAAKNILAVGHDRLAVGIHPL

SEQ ID NO: 36091 - protein, 340 aa, unknown
  TnpB Polypeptide
MSKLTYKVKHNADLSSELKKAKNVALFAIKTRSLSSKDVKQFGLKSIIANQVLRKYSRNKKCKQVRRVKLTIPNQGLLFKDKSIRIPSLKLIISFDKIIEKINQVELDDTYAYICCSVVDDIQYKERSCIGVDLNATGHIAVASIDDKVLKLGKEAPHIHRVYQSIRRKAQKNRTYKFIKKIKNKESRKIRDINHKISRKIVDIAKIKNYAIKLENLTGIRKKKQGKKVNGIKSNWSFYQLQQFIEYKSKLLGVPVFYVDPQYTSQRCSRCGLIGTREKKMFRCICGHNDHADANASFNIAKASIMHGNLNIDRDIFKSNTDIAQVEMMRTTLTTEPTML

SEQ ID NO: 36092 - protein, 387 aa, unknown
  TnpB Polypeptide
VITYNTQLLMKNQEEFDSLKSILDMHKTVFNFASPIQFVEPKNSLIILHSKVYHPIRKQFPDIPSQIIIKAEQECIASYKSTKSNKHKLKKPIVKNNLSVRLDKRLYSKDKTNKYSIRITTATGRQSFNFIVYPKLKKLLDKYQYKDPLIYEHDGKLFISFPFENKSEPIKQKVAIGIDLGIRRSAATSDGKLIIDKKFNDEKRKLIHEKDKLKSKGSKSARKHLIKLKHKEHNKNKNQSHLISNEILKTDADTIVLEDLKGIKTKKNKYQNKRSIGQVPLYELRRIITYKAENQGKTILLVNPSYTSQTDSVTGKREGERRGCRFYSKNGLIYDADINAAINIAKKSKLPVSQTSNLTYGQAVVNQPIVCKPSRSIGVLQASTALA

SEQ ID NO: 36093 - protein, 171 aa, Endozoicomonas sp.
KRYERKLAYLQRELAKKQKGSSNRAKARLKVARLHAKIADCRMDATQKASRKLINENQVVCVENLAVKNMIKNPKLAKHIADANWGEFVRQLQYKAEWADRTVIEIDRFFPSSKRCSSCGFINESLPLSIREWDCPECNTHHDRDINAAVNIKTVGLAGLACGATGTGMAA

SEQ ID NO: 36094 - protein, 539 aa, Micromonospora sp.
VSHCCRLLRGWISGSVQVVAVCRWYMAWCVAVARFTTFRFCLSPTVEQEFVLRRHAGAARFGYNQCLRLVKDALDGKRGGTVGKVPWSGFDLINAFNRWKRSGDAGRVMVAAGDGTVTVQVTGLAWRGEVCQQVFEEAAVDLGRGLSAYKASRTGHRRGRRVGFPRFKSKKRAPLSFRIRSRTSAAGRAGIRVGEHAPRTVTLPGIGTLTVRQDTRRLRRMLAKGRAKVVSATVSHRAGRWAVSLTCEAADLHEARRHQPNTDAAGWVGVDRGLSTFVAAARADGTQVLRVDGWPRPARAAVARQRRLSRKVTGKQRGSYNRARPQPGWAATTPAWPRSGAVSCTRSPTSWSIPTTGSPSRPSPSPACSATGAWRRRSPTRHGANWPANWPTSSSGAAANWPWSTAGTRRPRPAPHAGAWPPHCLCTSARSPARRAGIMPIGTTMPQSTSLSGPSSTTPSPGTSPQGARSPTPAEGKALARAHARAKPAPMTQEPHPPHPGRGADAREGRCLTTPPSYETGRNPAVAVLLRRAPEPAYR

SEQ ID NO: 36095 - protein, 493 aa, unknown
  TnpB Polypeptide
LIIISRNLKKNINKKEKFYLTVKQQVSKYKYKQLYILFKKLCKYSKNLYNSALYNIRQYFFNTNKYLNYNNNYHNIKNNINYKLLEANCSNNILHIIDENFKSFFALKQKKLKCNIPKYLDKNDYFILPTHKIHINSNNEWIIPLSYQILKEYNLTSQSKDRFRIKIPAILKDKKIKYIQVIPKYKGKIFEIHYTYEIEINDNIQVNNNYLAIDLGINNLFTCISYNHNSNKKINSFILDGKELKSINQGYNRIISKLQKLNTNKKLRYTKKMYNILKKRNNKINYYIHKTCKKLIDYCLANNIKTIVLGWNSDFQRKTNLGRKNNQFFTSIPFSKIKDNLEYRCKMNNIKFVLQEESFTSKASFLDNDYMLSYKKDEKLGYVLRTIDNKVELRKKLFTGKRVKRGLYKSKNGILINADMNGALNILKKYLLNKEYEKIKQLNKNKCKVVSRKISYEDLIESRDIHNLYEDISTLYCRGALVAPIRIKAQESI

SEQ ID NO: 36096 - protein, 401 aa, unknown
  TnpB Polypeptide
MMVDQNFKSFFALLKKKKQGKIKNRVNIPRYLNKNGYFKICDPEGNKRINIINDELYWTIPMSRLFLKGGMTLFDGSVVQPHDRVKVKLPNILKDKKIKQIWIIPKNKGFYFEIQVIYEIKINNDQIDQLSRNKYLSIDLGINNLCTCTYYNPYSINLKNKFKSFIIDGKKLKSINQYYNKQISKLKQLAAKDNKAPYYTKRMYNITRKRNNRINDYINKTSKYIIDYCLKYGIYTIVLGYNQQWKNKSKLDKKNNQNFVNIPFYKLKENLKYRSELKNIELVIQEESYTSKANFIKNDYIPTYGKVELKKNVYDENKKYKFTGYRPSRKRGQYIFNNTSYKLKLNYINSDLNGSLNILRKYLNNTSKVVNIVKNFDIVKDFNDILYHRGVLVTPIRIRLK

SEQ ID NO: 36097 - protein, 498 aa, unknown
  TnpB Polypeptide
LIIISRNLRKNINKNNKFYLTVKQQVSKYKYKQLYILFKKLCKYSKNLYNSALYNIRQYFFNTNKYLNYNNNYHSIKNNINYKLCEAQIACNILHIIDESFKSFFTLKEKGFKCNIPKYLDKNDYFILPTNKIHINKNNEWIIPLSYQILKEYNLTLKSKNRFKIKIPTILKDKKIKYIQVIPKYKGRIFEIHYTYEININNNIQINNNYLAIDLGVNNLFTCINYSHNSKKKINSFILDGKELKSINQGYNRIISKLQEKNTNKKLRYTKRMYNILKKRNNKINYYIHKTCKKLINYCLQNNIKTIVLGWNNDFQRKSNLGRKNNQYFANIPFSKLKDNLEYRCKMNNIKFFLQEESFTSKASFLDNDYMLSYKKDEKLGYVLRTINDKVESTYVDIENSTLKKKYFTGKRVKRGLYKSENGILINADMNGALNILKKYLLNEEYKQLNKGKVVSRKISYEDLIESRDIHNLYEDISTLYCRGALVAPIRIRVRESI

SEQ ID NO: 36098 - protein, 402 aa, unknown
  TnpB Polypeptide
VVIRRQGYRFRLKPSASEDALLRQFLGCSRLVWNAILGENEYRYEQGDPLPLNHAAFCARLNTLKARHAFLRDVHSQPLQQTLRDLAGAYQKVFDSKLSAEMPTFKKKGHAGGIRFPQGFRVERSGVFLPKIGWVAFRVSKRSVKRKLEGKIKNVTVRLEAGKWYVSFQSEREVAEPVHENRGSAVGVDVGIARFAALSDGTFFEGANAFKTNERRLAFHQRRLARKIKFSANWKKAKARITDLHARIASLRKDQIHKASATISKNHAVVVLEDLAISNMSKSAAGTVEEPGKIVAAKSGLNRRILDQGWAELRRLIDYKLAWGGGTLLLVDPRNTSRTCSACQHVSADNRLTQAAFACVKCGYAANADTNAATNILGRAGQARIACGDSRESVKQEAQCAA

SEQ ID NO: 36099 - protein, 363 aa, unknown
  TnpB Polypeptide
MILRTQKIELNPNNKQSTLMSQHAGYARVAFNFSLSSFKAGLDKDEWRSYIDIKREFNAVKRDKFPWCSELSQNASKNAIHNLGDAATRWKKGQNKFPVYKNRSGKCSYQADNGEGTVEAYKKRINLPKIGWIRMREELQWTGEITKVVVSKHNNKWFASITVRRLDSNNYKHQPLLFDDRRPVGIDVGINTLATCSNGDTYENPRPLKRYERKLARTNRRLLRRQKGSQNWYKAKALLSAVHARIGNIREDAHHQAAIRIVRKASAIGIETLKVTNMLKNRKLAKALSDSALGGLLTKLKYKADRRGIPITEAPVFFASSKTCSNCGHKKADLTLSERTYRCTACGFECDRDLNAAVNLCPA

SEQ ID NO: 36100 - protein, 353 aa, Halomonas sp.
MKQTKTLKVRVRDKHAAQLNRMARSVNFCWNYLNELSSRAIRERGLFLSAYDLHPYTKGAGKELGLHSQTLQCIAAEYATRRKQFKKSRLSWRKSGGVRRSLGWIPVNTGAAKWKNGQVFHNGSYFKIWDSYGLSNYKFRSASFNEDARGRWYFNVVVDADIKPSLGQGAVGIDLGLKDIATCSNGEKLENSRFYRGMEEKLAIAQRSHNKKRTRAIHAQIANRRKDALHKFSRRLVNQYGEIIVGDVSSQKLVKTKMAKSVLDAGWGQLKTMLEYKCDHAGIVFKEVREAYTTRACSACGSLSGPQGVNGLRLRDWECVACGARHDRDVNAARNILSLALGHERPEVGIPVL

SEQ ID NO: 36101 - protein, 327 aa, Escherichia sp.
MRRFAGACRFVFNRALALQNENHEAGNKYIPYGKMASWLVEWKNATETQWLKDSPSQPLQQSLKDLERAYKNFFQKRAAFPRFKKRGQNDAFRYPQGVKLDQENSRIFLPKLGWMRYRNSRQVTGVVKNVTVSQSCGKWYISIQTESEVSTPVHPSASMVGLDAGVAKLATLSDGTVFEPVNSFQKNQKKLARLQRQLSRKVKFSNNWQKQKRKIQRLHSCIANIRRDYLHKVTTTVSKNHAMIVIEDLKVSNMSKSAAGTVSQPGRNVRAKSGLNRSILDQGWYEMRRQLEYKQLWRGGQVLAVPPAYTSQRCTCCGHTAKENRLS

SEQ ID NO: 36102 - protein, 406 aa, Moorea sp.
MIAAYQYRLRLTKKQAIEMDRWLEMLRFQYNYLLADRFRWYEENRCSINACPLVCHLPELRDNPNYFSQKRTLPQLKKDRPWYADIHAHVLQDCVKRVALAFKKYLKGDFKGKKSGRPRFKGKGRYRSLTFPSLGKDPIKGSLLKLPKFGWVKMIYHRSIPEGFKIKTATITKKADGYYVTLSIQDDTVPQTIPVYEVSNPVGIDMGLKSFLIKSDGSEVEIPQYYRKAQKRLKKIQKAVSRSKKGSANRKKAVVKLGKAHKKVADTRKDFHFKTAKNLLDNHDLVAHEKLNIKGLARTRMAKSVLDAGWGQFLSILSVKAENAGLLTVAVNPKNTSQNCSNCGKKVPKKLKDRIHSCPHCGYVADRDVNAAKNILNLAVGHPVSSKACRATEPLGGVGKKPALSR

SEQ ID NO: 36103 - protein, 355 aa, Archaeoglobales sp.
VEVIKSYSISITAPKELIEEYFKLKKTVLDEVFKHARYSKSGKVHLKFDKNKRKELRDKLLKNWRFAKHYVDSAINSVIGLVKGWISLYNRGKAKSKPEITKKTVYVKTTLFSVKNGKIKITIEPKKRYLEINLTKFNYLPKDYDSIGGLILMENKLIITFKKKAELIKPRDYASFDVNLTNITGFVNRRIVRFDLKELYHIHRVYEEKRKRIQKLAKTKPKTAKRLMEKYSKRERNRATDIMHKITTTIARELASTKCGAILENLKNIKDRILNGSKDLNRKLSKWNCRMFQFMLEYKLKWFGLPVKYVNPANSSKTCPLCSGRLSAYEGRLIMCKNCGLIQDRDVIAVLYLRM

SEQ ID NO: 36104 - protein, 384 aa, unknown
  TnpB Polypeptide
LRNYKFRLYPNLEQEHKLQNNLNVCKWVYNKFVEQAQKSFLTRNDMNYILTELKQSEPWLYNYHSKMLQMVSTQLEGAEKSLIELSKKGHKTGQLKFARYNEFRTFTYNQSGFKLDNNKLFLSKIGDIRIKRHRDTPDNIRQVMVTKSKSGKWYACLTCELVKMNPPKINFTKSVGIDVGIKSFVYDSDKHSTPNPLNLKKMLKPLVRVQRKVSRRVKGSNNRLKAIRHLQKIHEKITNRRNNFQHKLSSTYANHYDVIFVEDLQLTNMVKNHKLARSIMDSSWNAFLQKLEYKCKLLIKVSARNTTIDCSRCGNKVPKSLAVRIHRCDKCNLVINRDYNASINILQKGLKIFSQKLPQELREVTPVEISKKSMKQEAQFFRYG

SEQ ID NO: 36105 - protein, 388 aa, Deltaproteobacteria sp.
MEQDCLRTFVFKAYASKRNRKLHRQIGVAASIWNHCIALHKRYYRLFSRHLNQFQLMKHLTKLKKLPRYAFWKELGSQAVQDVVQRIDKAYLLFFKNAKARKIENMSGRKVRPPSFRKWFKYQSFTLKQAGYSVTGNLIVIGKQQYRFFKSYEIEGKIKTLTVKRDALGDIFFVFVTDAEHQTFRAATTEIAGMDIGLKDFLVISDGTKELAPQPLKQALKQLAKANRTLSRKQRGSNNRRKARKNLARLHRTIANRRKDFHFKQARKLAHRYNAIAIENLNLSGMKALWGRKVSDLGFGGFVSILEHQASKTGCTIVKIDRWFPSSRLCSSCGKINERLMLRDREWSCDCGAIHDRDLNAAINIQRAGTSALGLGDVRSGPIPAITV

SEQ ID NO: 36106 - protein, 389 aa, Deltaproteobacteria sp.
MRKTYKYRLYPSKTQEAKLLATLEVCRILFNSCLVDRKCHYESTGKGLSRIRQQEILAADKKRVLLLKEVHSQVLQDVLFRVDRAYQGFFRRLSEKHGKTGYPRFKSEGRYDSITYPQEPGFKIEEGKLKLSKIGHLKIKMHRAVAGQVKTCTIRKDGNHWYTCFSVEYEPEKRPVPTKAVGIDVGLKSFATLSDGTEITNPKHLRKAEAKLKRVQRSLSRKKKGGGNRMEAKQAVAKLHRKVRNQRLDFHHKEARKIVNNFGLIVAEDLKIKNMVRNRHLSKSISDAGWGNFLLLLASKAEEAGCRFEKVDPCHTSVNCSCCGSKVPKTLASRTHRCPSCGLVLSRDHNAAINILQRATAGTAESYAWGEPALSGHSLNQEAMLLAAW

SEQ ID NO: 36107 - protein, 363 aa, Haloarcula sp.
MKRTNTFAVRPLSETGEQLLRDLLDASAALWNEVNYQRLMRYNDEDGFEGGIWDADTGRLEGRYKGVLGASTAQQVIRKNSEAWRSFLHLKDQYHDESNTSVTEHPNPPGFRGNEDDGRQLRTVIRNDAYTTEWGDRSRLEILVGSELKDQYDHTGRLRLEIAGNPNWPNYEKQGRLDLWYDETESTFRASQPVTVSDSARATPLADETAALDIGANNLVACTTTTGEQYLYEGRELFQRFRETTREIARLQSKLPEGRYSSERIRRLYRKRTRRRDHAQGALCRDLLDRLYAEGVDTVYIGGLTDVLDTHWSVKTNAKTHNFWAFKKFTERLACTAEEYGISVEVRSEAWTSQECPRCGSTD

SEQ ID NO: 36108 - protein, 222 aa, Salmonella sp.
AGRYFVSCLCEFEPASLPITSSVVGIDVGLKDLFVTDTGFRSGNPRHTAKYAARLALLQRRLSKKAKGSKNRAKARLKVARLHAKIADCRLDALHKASRKLINDNQVVCVESLKVKNMIRNPSLSKAIADASWGELVRQLQYKGEWAGRSVVAIDQFFPSSKRCSCCGFTMKKMPLDVRKWQCPECGTDHDRDVNAARNIKAAGLAVLAHGEPVNPESLKAA

SEQ ID NO: 36109 - protein, 224 aa, unknown
  TnpB Polypeptide
MEVGKINNATVIRTPSDKYFVVLNVDFEPKAKQNNGGSIGIDVGIKEFYSDSNGNVVSNPKFLEKSSRKLRREQRRLSRKKKNSNNRNKQRIRVAKVHEKITNQRDDFLQKLSTMLISENQVICIEDLKIKNMVRNHKLARYISSVSWGKFFGMLEYKANWYGNNIIKVPTMYPSSQTCSCCGYRNPLIKNLAVRKWECPNCHTVHDRDTNASINILNKGLSIA

SEQ ID NO: 36110 - protein, 381 aa, unknown
  TnpB Polypeptide
MELKKERREMANKAIKYRAYPTTEQSIMFAKTFGCCRKVYNLMLTDKIAYYKATGKSIQTTPAQYKDEYPYLREVDSFALCNVQLNLQAAYKNFFDKKRKTQSGFPKFKSRKARNSYTTNNQKGTVAIIDDKYIKIPKIGKVRAVIHRKANADWKLKSATISKERDGSYYISILYEFERVATKVPKSKNAIGLDYKSDGLYMDNNGNVGTNHKFYRESHDKLAKAQRKLSRMKGSKKNELKSNNYIKQLHKVNKLHKHIANQRMDNLHKLSTEIANQYDVVCVESLNMRSIANRGFGNGKATYDNGYGMFLCMLEYKLADRGKYFIKIDKWFPSSQLCSCCGNRKKLELSDRKYICTCGLEIDRDLNAAINIKNEGLRLLA

SEQ ID NO: 36111 - protein, 450 aa, unknown
  TnpB Polypeptide
MRISSSYRITSSYKIKLTGDLKALEISINIYRDALRVLIPIINDNWEILSEYEFTKQKCNCIEKWIHHTKTNQALYDFDEQFPKFPSYLRRSAVAQALGIVSSYHSNLANWGKEPKGQAPQLSLTHYAYPAYYKNNLFRNFDPARQTIELKVFKNSDWVYEVYHLKTSDCRYYLTHLTSKKQNVPIIQKKGRRFYAAFSCEEEVSLVEEESISKICAVDLGLNTDATCAIMDQDGTVYARKFISFSKEHDRLHTQLGRIKRNQKRGSHQNKTLWRGVAGISQDISDKTVQAILDFGNEYGVDVFVLEYLDFKGKNIVKRAHFWRYKRIYKVLTQRAHQHGLRVARVSARYTSRLAFDGSGWSKRGLEIAPETPYALMQFTNDKIYNADLNASYNIGARYFIRRLLKTVTATQRLALEAKVPRVAKRSTCTLSDLINLRSEFVALVTKTQA

SEQ ID NO: 36112 - protein, 383 aa, unknown
  TnpB Polypeptide
MLKSFKTEINPTVEQKTKINKTVGVCRYIYNFYLGYNKALHDKGEKFMTGNNFSLWLNNEYTPNNPERAWIKEVSSKAVRKSIENGYTAFRRFFKHQSSFPKFKKKGKSDVKMYFVKDNPKDCRCERHRLKIPTLGWVRIKEKGYIPTTKDGWKIRSGTISIKAGRYYVSVLVEVPDTEITNNSNDGIGIDLGLKDFVIVSNGKTYKNINKSAKIKKLEKKLRREQRCLSRKYESLKKGESTQKNIQKQKLKVQRLHHKLGNIRTDYINKSIAEIVKTKPSYITIEDLNVSGMMKNRHLSKAVVSQKFHEFRTKLKAKCNQNGIELRVVDKWFPSSKICHCCGAIKKDLKLSDRIYRCNCGYIEDRDLNAALNLRDALTYEIA

SEQ ID NO: 36113 - protein, 310 aa, unknown
  TnpB Polypeptide
MKRELKTEHEWLGEVNSQALQSALRNLDTAYKNFFRDTHAVGFPRFKSRKNRQSFQCPQHCSVDFKKGTLSIPKAKGIPAVLHRKFKGMVKTVTISMTPSGRYFASVLVDTAIQELSASTIQGNTTLGIDLGIKSLAVCSDGRTFDNPKNLQRSLDRLKLLQKRLSRKQKGSANRNKARILVARLQERIANSRKDNLHKITHALTHDSQVRTLCMENLNVKGMQRNHHLAQAVGDASFGMFLTLLEYKCSWYGVNLIKIDRFAPSSKTCGKCGYIYKGLKLSERSWTCPECGTHHDRDFNAACNIKEFSL

SEQ ID NO: 36114 - protein, 202 aa, unknown
  TnpB Polypeptide
MGIDVGVKDLAIVAFGEDQIVFHNINKSKRVRNLNRKKRKVQRAISRKYRTKGSYAKTKGIEKYERILKTINYKLANIRSNYIHQTTHKLVSMLPKAVCVEDLNVTGMMKNHHLSKAIQEQCLGEFLRQMEYKCAWNGIELVKVDRFYPSSKTCSCCGEIKRDLKLSDRTYVCPHCGLVIDRDYNAALNLMKYAASQTRAAA

SEQ ID NO: 36115 - protein, 397 aa, Actinobacteria sp.
MTATCVKRAFKYRFYPTDAQAAELSRTFGCVRKVYNLALAARTEAWARQERVNYNATSAMLTAWKKTGELAYLNDVSSVPLQQTLRHLQAAFTNFFGKRAKYPRFKSRKRSRKSAEYTTSGFRFRDSRLTLAKMTEPLSIVWSRPLPEGSTPSTVTVSQDSAGRWFVSLLCDDPGVQPLPATGTAVGIDVGLDHLLTLSTGEKITNPRHERKDRGRLAKAQRELSRKAKGSKNQAKALRKVARIHARIADRRRDLLHKLTTRLVRENQTLVIEDLTVRDMVRNRTLARAISDASWSEFRSMLEYKGTWYGREVISVDRFFPSSKLCSTCGTLTEKMPLSVRTWTCACGTTHDRDVNAAKNLLAAGLAVTACGAGVRPQRRTPGGQSATKQEAPRREP

SEQ ID NO: 36116 - protein, 265 aa, unknown
  TnpB Polypeptide
VFNKTVEYLKQPDTKAQWMKVAPTIKSELPEWANPVPYQVKKIAIRDACLAVRDAKKKTKKGEKSFVKFRSSRDRVQSVFIPSKAIKPKGVYHTILGELRLSQELPDKIRDSRLILQRGQYYLCVSTEVPATENQGGGICALDPGVRTFLSFYSPDAAGKIGDQDFGRIQRLCFYLDQLVSKISKAKARQKRKLKKAADRLRTKIRNLIDEIHHQVANWLTKNFGTILLPTFETSQMASRSGRKLRCKTVRAMLTWSHYRFQQFL

SEQ ID NO: 36117 - protein, 367 aa, unknown
  TnpB Polypeptide
LDTLLKYSQACNDALDVALEKGITNNITLHHECYYTLKERYGLTSNYVCRCFPRVTGAIKAAKHKRRKPKLFRPTSLDLDNHLFRLIVLGDDFGANVSTMAGRRKIRLDIGNYQRGWLAGQKPTSATLNYTSKREFYINIVLSEECPAPNPTGRKGKTVGVDVGIANLASTSTGLKFSGKQAMHIRREFRAVRESLQAKGTASSRRVLKRLSGREQRWMRDLNHCISKQIVDSLQPGDTIVLEDLTHIRDRTKVRKEQRAAHHSWAFRQLQSFVEYKAAWEGINVVYIDPAYTSKACSKCGQLGSRSGHRFSCATCGHRAHADLNSCHNLLRRAESQFAPSERPSSTGPKATHPSQLQACPVYGAGR

SEQ ID NO: 36118 - protein, 178 aa, Trichococcus sp.
VDLGILCPAVGVVASSGKTQFFGNGRQNKCLRRKYKQLRRDLGKKKKLTAIRNINDKESRIMRDINHKLSRQIITFAAENGCGTIHLEKLSGIRRTSRLRGKNKANLHSWTFHELSSFIEYKARELGIKVVYINPEYTSQTCPTCGERNKVKDRNYNCGCGYHSHRDRVGALNIARTI

SEQ ID NO: 36119 - protein, 259 aa, Bifidobacterium sp.
MERIPHERRITKINNITVSHKADLWFISVNYETDMSVCENQATGVVGIDLGVKTLAVCSDGLTVENPRVLRKRERRKKHLQRIVARRRKGSKNRRKSVARLARYEYHTACKRRDWLHKATRTIADENAVCFMEDLNVNGMLKNHRLAKSISDGSFNEFTRQLSYKTQVRNIDRWYPSSQICSRCGMRKPMPLSERTYECERCGLTLDRDLNAALNILHVGIANYPELMPAEGDNHLNTIGATDAATAPCETGIDHQKTA

SEQ ID NO: 36120 - protein, 404 aa, Symploca sp.
MKARYRYRIYPTVGQQMALARLFGCVRVIWNDALAFCINQYKNGEKKPKNAELQKQFITQAKRTTQREWLSKVSCVPLQQALNDLEQAYQNFFKSCKGQRKGKHVLPPKFKKRHAKQSARFTQRGFTLRSDCLKIAKIGKLKIAWSRPLPCVPSSVTLIKDAAGRYFVSFVVEIASEVLPKNENSVGIDLGIATFATLDNGQKYYAPKPLKKRINRLRRLSKNLSGKTRGSKRYERAKKRKAKLHAKLKDTRTDFLHKLSTQIIRENQTIVLEDLNVAGMVKNRKLSRAISDLGWRQFRTYLEGKAEKYSREFRVISRWEPTSQTCSCCGFRGGKLDLCVRNWTCLNCGTTHDRDVNAARNILVAGGHSETKTGRGDRCQTPAKGAAVREASTHREYVQLSLFG

SEQ ID NO: 36121 - protein, 392 aa, unknown
  TnpB Polypeptide
MKAYKTEIKPNKKQIELIHQTFGNTRYVYNQFIKLNLERHEKKQSVISGYDYSKMINNDPERPDWLIKSPSKAIKQAIMNGEKAIWAYLKGDKGEPNLKKKTKDNSFYVIESIKVERHRIFLPKLKWVRLKEFGYIPNNVKSATVSMKNGRYYVSCLVHETEDERIPTSDQGIGIDFGLKDQFITKNETIPSINKSNKIKKLEKKLKQKQRALSRKYENNMTNKVYHKTGKKKGQLKSFDWIRPLHECKNLNKQRLAINKLYERIARIRTDYNQKALQSILKQKPSFVVIEDLNVRGLMKNKHLSKSISKAQWYMSRLFLTHQCEKLGIELRLAPRFYPSSRLCSECGYKNKDLKLKDRSWTCPECHVFHDRDINASINLEQCENYTVLTTV

SEQ ID NO: 36122 - protein, 500 aa, unknown
  TnpB Polypeptide
MFVTGEKMRSGHDQQPLSYAIRLPDEAQEDALRLLDASRSVVNAALIELWPKLDDFLQERRGPAWKHVVDLIDSPDPHGNRQWRCEAETAGRIMRGQAERKLVFALIQPILSHGFIRPKTEKRPAGKARRTIKEAIEALQQTLEEDDTAFITLQNVVEQACNHFLVQGAFPQKYEDMQAIPLLKVGMLTYAGDDGGFRGQSYRLSFDVQAATASLLFRFPDKQGRWQWSKEPVTLTLPACVIERLKEGASMAPTLRELVKADGSRIAVLDVIVQVPQTPLADWKTVERVLGFDWGVKGLITAVVLRANQAEPDHPVQLSRPLFLDTGGMDGHQARTRRQIDELQAARAQLAPNDPKRAFYEQEITRCWRLYEARNQELAHLAANVLLLFASVWGCSLISGESLTTLKATGRGKGVRGKWRNWRNTTTIRADIWHILRYKSHLLGLRFRSERPRGTSHTCPRCVTPVRGHHLSGEQSPTSSGNGSMSNVSLASERRARTRV

SEQ ID NO: 36123 - protein, 222 aa, unknown
  TnpB Polypeptide
MELHIVCKYEIEAESPGDETAGIDLGISNFAAISYSTGDHELYPGNALKTDERHFAKEVAKCNSSRSNKAVRLRKKRSARRSHYLDAVTKHIVSECVERGIGKIAVGNLEGVREDDETGKPRNWGDRGNERLHRWAFDHFTNLLTYKAKAEGIAVVTVSERDTSKTCSSCGEKRDTNRVEAWLVRLSRVWNRDERRLEWCGKHSASVRSSRKGNSESSVVRG

SEQ ID NO: 36124 - protein, 373 aa, Succinatimonas sp.
MKTFKFKLYRSKKTRRLDHQLWVACKVYNHAIALHRRYRKLYHKSLSKFSLQKHLAKLRKLPRYAFWNDIPSHAIQDITDRIQRGYRLFWENLKNRRKTAPPKFRSWRKYRSLSYNMVGRSVIKGNVIRIAGGKYKFSRSRDIEGTVKLLTVKRDACGDFFVYLICDTPEVRRETRMGESIGFDFGLKGAMLVAEDPKNDIPGPSFFRRQKNAIARANRRLSGKRIGSHNREKARLELARLHRRVANRRRAFHWELARSLCKKYSDICLEDLNMKRMQTGHGKKAADYGFAELVSLLEYVSPKFGTAVVRIGKFFPSSQLCNACGFRNKEIRDVRIRAWDCPKCGAHHDRDRNAAKNIREEGLRILAEKQATA

SEQ ID NO: 36125 - protein, 231 aa, Okeania sp.
MRENSKGIDLGLLYYAVTSDGEFIETPKFFRKSENSLSKLQVRLAKKSKHSQGWKILKDKIARLHQLIARQRFDWQFKLAYHLFSDVSAIFLEDLHIANLVRRCQAKLGKNRQFLPNGQSAKSGLNKSLQDAAFGQFIQVLEYVAWKLGKKIIKVDPKGTSQYCWECLNKVSKSLSERWHSCPKCGQELDRDYNSALLIQKIGLLSTQGEDITSVKTAVKASLAEESLALP

SEQ ID NO: 36126 - protein, 494 aa, Erysipelotrichaceae sp.
MKKSKTPSYIAEYELQPEAFGGFAVLHHAENAAVSVYNICLNECLKRMHKVVNDPKYIALCDMYKKNKEQNKKDNADLRAQFSEIFNKYAYTEYAMHAFVSTIRQKYSCLGSAECQKLASRAFRAVDKKRLHKAKRVRFVAHARGTSFEGKSHTSMLHFNRDCLTVSFGRRHEFAIIVPDDDQYLMQCLQDRVKYVRILKRIIRGKERWFTQLVFEGMPPQKDHIFGEGTQGLDEGTSTIASVTDTSVMLAELAPECRPDEKKIRRMQRAMDRSKRAANPDNYHADGTYKKGHHKWKKSKRYLLLQKKLAERKRRQAIYRKQSHCRLANELIARGADIRVEKMNIKGLAKKSKKTAKNKKNGRTQSKKRYGKTIANRAPAMLISIIDQKLHQRGKSILYVNTWTVKASQYNPLDGTYKKKDLKDRMILLGEDSSGNSIIVQRDMLSAYLIQHVSADGTHIDAASAYKDFDNFRTHQNAEVARLRQADQLTWYVS

SEQ ID NO: 36127 - protein, 469 aa, Anaerostipes sp.
MKDIFFKNLIFKERGKIRKELFDMRIFSTYSAKIKNYNHIFKKTVSVYREAVDFMIQVCLQKWEDIRKEDYLCSPVIYVERLCHRTKRNPEVPYESFDRKFYKLPSYLRRSAINEAIGKVSSYKSNLKNWEEEDPNTRGRRPSFPRAGYICPCMYRKNMYQRTGAYEARIKVYIRNTWDWLDIKLRKSDMNYIDRRCSGRRKCAPVLQKRGKEWHLDFPFEEFLELCDVDVADRIICAVDLGINSAATISVMCSDGTILGRHFLKLPKEQDCLTHSINRIKKAQQHGNRKMPRLWAKVNGINHEISVKTAEFIMDVATLYNADAIVFEYLEKKGKKRGSRKQRLHLWKSQEVQRIVTDKAHRLGMHIARICAWNTSRLAYDGSGRVLRGKQAEFSSYSVCQFQNGKVYNCDLSASYNIGARYFIREILKSLPEKERLLMEAKVPPCSKRSTCTWSTLISLNAELMSFVS

SEQ ID NO: 36128 - protein, 291 aa, Cytophagales sp.
MRTTTSLARFRYKFSTIFKKVSKYPIFKKKGRKDSFYLEGNIEIKNNRIKLPIFGWIKLSEKIKDLKGVKNVRISRRADFWFVSFKTEAKKEKIKYAKNSFVGVDLGIKTLATLSNGMTFENKRPYKFYKRKLKIEQRKLSKKYQKNKSKKEQSKNYGKQQKVVAQLHYKIACIREDSLHKLTTYLAKNHVRIAIEDLNVKGMSKNHKLSSAILDGGFYEFRRQLTYKCEWYGSKLVVVDRFFPSSKLCSNCGHKKEKLYLSERIYTCEKCGLRMDRDLNASVNLAKHVVS

SEQ ID NO: 36129 - protein, 436 aa, unknown
  TnpB Polypeptide
MEVIMRQVERHLIRPGNKLYPVCDDLTFKSKNLYNAGLYQIRQSIFERNKSDNENKKPVLSWAQLVSEFRKQRQSDMLALPSKVSTNILKMLGGNISSYYQLLKGYNDKSNKSITNKPKLPGYLHKTEGRYVVEFTNQTLSKKRGKNNELILCPKDLRILIPTKIDHPKCVHIIPKNGYFFIDVIYEVNENPLRKSKKYAAIDLGIDNLAAITFSDGTNPLLVKGLKVKYINQAYNRLISKSQSKLPNNQKMSKHIHRLFRNREMKLQSEFHKITGFLADYFDEMSLEKVFIGKNNGWKAGISLSKKVNQRFVQIPYNKFISQLKYKCVLRGIEVIEQEESYTSKASFVDYDDIPVWKTDDKNKKHSFSGKRVKRGLYKTKDGSTINADVNGSYNIMVKGLNNFGENLNRSLVSFHTRSLRGYNLLSNKRLIEKYK

SEQ ID NO: 36130 - protein, 446 aa, Persephonella sp.
MTATVLDKKHKIKESLKKTKEKRKNQIPKVYQLKISHSNLNKQQKHWLERVFLEAKWLYNYTIADIENRLNSKTEKIKQVEVKTPKGIETREITCVSSQMKQGILDRIKKNLTDLSKAKQKVIKVGKLKFKSDYRNIPLKQNGITFKVLKDKNRIKLQGLKEPVRVLGLHQLPEDCDIAKAELIKKPDGYYIYLTCHINKQTEKQKQEKINKPIGIDFGIKHQLTLSNGIKINYSVEETKRLKKLQRKLSRQQKGSRNYQKTKHKIQRQHQKIYNRRKDIKNKILSLLKRYEYVLIQEEQIKNWHSGLFGKQIQSTGIGGIISMLKQNIETLIPVDRYEATTKICSRCGSRKEDIALSNRTYKCDNCGLIIDRDVNSATNILKVGLQKVEKTTIKNLPTDCGEVTPVERDICEAKWQLKEEQATARILGSNPYIRVSYTSAKQEAS

SEQ ID NO: 36131 - protein, 317 aa, unknown
  TnpB Polypeptide
MQIISSYGVELRKQNIPIRQTLEIYRSAVSYLIGIYVQVWEELAEIPDAKRRFNAAEHLVHTTKKNHACFDFDIRFPKMPSYLRRSAIQHALGTVSSYKTRLDLWEKTDGKSGKPKLVYENHAMPVFYRDVMYREGAEGKDEAYLKLYDGHDWKWSCVRLDHTDMEYLRKCWSGKKASAPTLEKRHRKYFLRFSYKEEVTLTKTPVKEQIICSVDLGINTDAVCTIMRADGTVLGRRFIDHPSEKDRMYRTLGRIRRFQREHGSAQTQGRWAYTKRLNTELGKKIAGAIVRYAEENHADVIVFEYLEMQGKISGKKK

SEQ ID NO: 36132 - protein, 407 aa, unknown
  TnpB Polypeptide
  misc_feature (239)..(239): Xaa can be any naturally occurring amino acid
  misc_feature (276)..(276): Xaa can be any naturally occurring amino acid
MQLVEKHIIKKNHKQFKECDELSFLSKNLYNKANYIIRQHFIKEDSNYLNYYDINNIMINSKDCDYYQLPCKVSNGTLRLLDKNWKSFFKSIKDYIINPKKYLGRPKLPKYKHKIKGRNIVHYEKGAISKKELDKNNIISLSKTDIKIKTKIKYEDLVAVRIVPRIGHYVIEVIYKQEIKNYDLNQDNILGIDLGLNNLGTIGTTFGDSFILNGKSLKSINQYYNKVKSKLQSKLKKNXFLSNRINKLTNKRNNKINDYLHKSSRYIINYCLANDXGKIIIGNNKNWKQHIKIGKRNNQNFVNIPFDRFINMIKYKSELVSIEVILTEESYTSKCSFVDNEDIKKHKVYLGKRIKRGLFKSRIGKLINADLNGAFNIIRKVVPNFNINVLRNGIEGFAVSPLRINFS

SEQ ID NO: 36133 - protein, 414 aa, Micromonosporaceae sp.
MLTGRRYRLEFTDEQEAYADRVAGICRAVWNIALEQRREYRRRGAYINYVEQAGQLAEAKRDFGWLAEAPSHTLQQTLRDLDRACREHGTFKVRWRSKVRNTPSFRFPDPNHISVVRSSRRWGKVRLPKFGWVRFRWSRPLGGTARNVTVSRDGPHWHVSFCVEDGVNAAEPNGKPAVGLDRGVVVAVATSDGGLLDREFVTLGELKRLKRLQQRLSRSQRVIGRTRASNRRKDTRRKLAVLNATLRARRADFAAQTANRFTREHGLIAVEDLKIANMTRSAKGTSEAPGRNVRQKAGLNKAILAKGWGLLLSRLEHTARYHGATIVKVNPAYTSQTCSACRHVASDSRKSQAVFRCVACRYQYHADVNAAKNILAAGLAVTGRGDLDIGRSVKRQPPKTRKSPDNLALGVPRL

SEQ ID NO: 36134 - protein, 526 aa, Thiobacillaceae sp.
MARKSTPTFIVERALVVSIAEDREMVVRMELFRQLSNACLGEALRRLDRMRESVAWARARAMPKSVGSKPNKERHAVFAAARHAYGFTSEAISAFGTRCKNEAGWNSGRARTDARIGAHECQRVAERAYAAAEMYAFGVRGRPRFKGKGRPLHSIEGKSAGSALAWNAGTGCLEWGSLRLPAMMPPDGQDGWLEQALKAPTKFSRIVWRLINGQRRWFVQLAQKGVTPAKYQTIEGAVAGLDIGPSTVAIYSEHGAALRPLAPEVQQPWVQARKIQRAMDRSRRATNPQCFNADGTFKRGSKITVRSKSYQDLSGELAETERVLDKRRGRSHGRLANQIMALGNVIQAEKLSYVAFQKNFGRSTKVRAAGSLISKLARKAERAGGQLVELDTWSLKLSQYDHTTDTCTKKRLSERWHVLGDGSGVVQRDMYSAFLAATAGKNAIHQRQAQAAWPAAQSLLGRAGWMRQQPVSVASLLAAASAANQLPAPERVARQRALARVDASDAVGASREPKRGSGSGLRTPGL

SEQ ID NO: 36135 - protein, 424 aa, Nostoc sp.
MQLVEQRIINKSHEAWEQIDTMSFAAKNLWNAANYCIRQSFLYGHGVPSYNQMDKLMQPSEQYKALPAKVAQQILRLLDKSWKGYFAAIALYKLDSTGFTGRPKIPGYKPYDGRCVLIFSEQSTSKKVFKDSRQIKLSNIDYCFDTQIAQSQYCQSRIVPKIDHYVLEIVYEVNQHELSQSTQNIAAIDLGIDNLMAITSNVPGFKPVLVNGRPLKSINQFFNKKRATLQHRSKVKTSKRIKHLTTRRNFKAKNYLHRASNYVIELLKDLGITKLVIGQNADWKRNVSIGKRNNQAFVSIPHGQLIDMLTYKGNRVGIDVIVREESYTSLSSFLDGDFIPDYRRKPKNWKPSGKRIFRGLYRTKSGRLCNADINGSYNILVKEFPNAFSPWETPKANETGDREVLVDPIRVNLNGFKVKSLTPF

SEQ ID NO: 36136 - protein, 387 aa, unknown
  TnpB Polypeptide
MYRDLDRLCFLSKNLYNRALYEVRQHYFNTKTFLTGFSLKKQLASCNDYDYRQLPSKVSQQVVLCLEQNFKSFFALVKKKKSGEYDGIVKIPKYLSKTGRFVLIYTNQAISRVELKKGFVKLSGTEIKVKTSRTNINQVRVVPCGDHIMVEIVYTVPDRPELKVNGRYCAIDLGLNNLATVSSNVLKPFIINGRPIKSVNAYFNKKKSEKQSKLRNGLKTSHKLKTLSLKRDNKINDYLHKSSTLIVNQLVSNNISTLIVGYNKGWKQDINIGVVNNQNFVSIPHYKFKQMLKYKCELRGIKYLETEESYTSKCSFLDGEIIGKHDNYKGKRIKRGLFRTSEGKLINADLNGSLNILRNVVGDFKYSIEVCSTPLVYTLGFNERCTL

SEQ ID NO: 36137 - protein, 369 aa, unknown
  TnpB Polypeptide
MIYRAYKYRIYPNRKQQSQIRQFCGCCRFVYNYFLSMRKNAYAEELITVSYNQCSHELTALKKHYPWIGDADSTALQSTIKDLDEAYRHFFQGHNRFPRFKSKRNPVQSYTSKNNNNSIRMSEKHIQLPKLGSIRIRASRHPGNRIINATVSYTSTGKYYVSVLCECPSPAPYEGGIPVGIDLGLKSFAVLSDKLTHIGNPEPLSQLQKRLAHEQRALSRKTKGSNRYRKQKRRIAACHEKVTNYRRNFQHQLSTSLVRSYSVIAVEDLDIQQLLQDNPHTDSRRIADSGWDSFLRMLEYKSSWYGRKMIRVGRYYPSSQICHHCGYQYHDVSVKRLNIWDCPHCGSHHQRDENASVNILNEGLRILQS

SEQ ID NO: 36138 - protein, 418 aa, unknown
  TnpB Polypeptide
MHYAYRFRLKPTGQQRELLDYHRDTCRQLYNHALREFNKIPESAGTLNQRVRQVRDQLTNLKDWWDELNDLYSTVAQAAVMRIEDSIKALSELKKKGYNVGSLNWKAPKDFLSFTYVQSGFEFDKKNGQTVLSLSKLAEIPIECHRDIPDDETVKEVTLKKEPTGEWYASFAVDDREKPEKPSIEAIDADDMVGIDVGILKYVHDTDGTAVGSLDLADERERLEREQRKLSRKEHGSNNWEKQRRRVAACHQQIKRKRRDFFHKLSAYYAREYDLVAVEDLNVKGMLESPRNSRNTASAAWNTFTELLEYKCEREGTHFVEVDPEGTTKECAECGVETDKPLWVREHSCPACGFEADRDANAAWNVLSRGLSELGVGSSESTPVETALPTGTAVVPAKRVVEAGSPCLKERTAVAVSE

SEQ ID NO: 36139 - protein, 378 aa, unknown
  TnpB Polypeptide
MLLPNNKQKSKLFQYANTARFAYNWALAKEQENSKSDGKFLSDIDLRKEFTKMKQTQEYKWLNDISNNVTKQAIKDACDAYKKFFKGLAKFPKFKSKKKTTPSFYQDNVKIQFSEMHVKMEGFAVSKKKNKQKINWIRLAEHGRVPTNCKYSNPRIKFDGLNWWITVGIEYSDSGVTPNKDGVGIDLGIKDLAICSDEHKYKNINKTHEVKQLEKKKRRLQCSISRKYEKNKKGESYCKTCNIIRSEKKLLKITHRLTNIRQNYLHQITSEIIKREPSFICMEDLNIKGMMKNRHLSKAVQQQGFYEFRRQIEYKATWNHIPVIIADRFFPSSKLCSCCGTIKKDLKLSDRIYKCGCGNVIDRDYQAALNLKRYGENV

SEQ ID NO: 36140 - protein, 378 aa, unknown
  TnpB Polypeptide
MIARHVKLKMNKKLKKQLDSMLWHLTGVYNWTIKTVESRKLSGLPYSEFDILNLIPNHSKKCGVSSRALAGTINDAYSAWTRCWSKQNRKPHLKSNRNRLSSILHRGDCKLNILESKVKIPVLGWLKLHSLTKGLPEGKLASSVRLIKKASGWYAVLLFEQDHEQKLNDTDSVIGIDTGFKHLAILSNGQKFENPRELEASSKQLARVQRGRHKRATACLQERIANQRKDRNHKISHDLIRDHAQIYITNDNLRGQAHKFGKSVTGAGTAQLRNFILYKGSSCGRTVKLVESRNTTLTCSGCEAHTGPSGLSKLNIRFWVCEACGASHDRDVNAAINVLNTGLRYSLEASKDAAEPEKVKSLKKLGLSSQNCPGRAVI

SEQ ID NO: 36141 - protein, 418 aa, Halobiforma sp.
VADDYVRRTAITRLSVDGRQRELLEETISEWKRGCQLATDMAWGKCNAKSDVQPLAYDDVREQTGLGSQHAILATHQAAQAITGCIERRSNGKKVSNPTFTAPTVKYDTRTMTLFDDDTVSLSTTESRVRCSLALPDADDGYQRQYLNSDEWSVTESTLTARNGDYFLHIGFRRHKTDTERNTAEDGTVLGVDLGIKNLAVTSTACFFSGRELTHDLREFEKVRAGLQQTGTRSAHRTLEQSSGRELRYVRDVLHRASNAIVDEALRYECDVIAFEDLTHIRDRTGASWGHKWAFQTLYEQVEYKAEANGILVQQVGSAYTSKRCAECGFTADENRPNRTDFCCQKCESEANADYNAAKNIGMRYVRRGQQSSRRTGNSQLALKSGTVTPSGGFTAHPDGFEVEDTDKPHPQRAKSSD

SEQ ID NO: 36142 - protein, 430 aa, Halobiforma sp.
VGGEETNTHCHKPPITKYLIYLLKTVADDYLRRTAITRPILTTEQQDLLDATINEWQDACNISSRIGWQTGETRKTYLQDLAYDEVLEETRLGSQHAILATHQAAAALSGVEEIKELDEKYKTSCPEFTATTVKYDTRTMTLFDDETVSLTTVDDRIRCDLALPDDEDGYQHQYLNDEDWELTESTLSRRDGDYYLHLGFRKPKPEKQVEQQGDDEDRTVLGVDLGIVNIATTSTAYFASGREVRHRHREFERIRSSLQQTGTQSAHRTIQQMSGRESRYVRDVLHRVANDIIEEALNHDCEYIAFENLTHIRDRVPPVKEFHQWAHRQLVDLVEYKSETEGICVEYVDPENTSRRCPECGHTSKGNRVTQAEFECERCDTTANADYVGAKNIGWRYVRRGLQSSRRTGDSQLALKSGTVTPNRGFVSSD

SEQ ID NO: 36143 - protein, 832 aa, unknown
  TnpB Polypeptide
MSKKIIIRIKPENIISNTHSYTTFTIDRIDEQKLEIDDQNEIDDQNEIDDQNEIDDQNEIDDQNEIDDQNEIDDQNEIDEQEHSLITDIDMFNSLERIPDSIPDSMPDLSMINKTQEHSIQNSIPVEALVHWRNPYRVIKCPLKKVLNHYNDLQPIIENYVREINQIVILGYQFIQLYILEHYNKGLDLPTIDQKWIENVLKVICVHSEKRGRPCEKESIDTKKDLKIFYDNTFSRVIKIPLMTSYHKSYCLKEQSKEMFNCLITNLKTNFIKYLSKYINLVHRQPRAFLIHQEKDPQKRKQLYAQLNTDMRNLKTDLIEDTLQNSDPSYHAWIQKEKKFMIPDNMLDNMAFDLKVQPLNYLTPALYINHKIEELGSRPYQVIPQRKSQIPHHITLDSTSIVELIWDHHQILSIPKFKCPLKRSVTQQSEQPQKTKKPANISLTYLKNNAGSYHELIWNRVLKLDHRTCKNDVFNQQPYTFYYQIKTNGFSCSLLFILEKYQNRKHGQKFEKHEHDDEYPQLKNLTKAQCDAYLKGNYKIISLDPGEIDPVSAIDERNQFFQYSACQRRQETYTKRSSEILYAEKLKHNIFAMESPYLKQNPHVKKKKKKFKHRRKKHKRESQSLPLPLPLPLPLPVKRISSRTTNPDQYQEFIGLKNEIDVQTKSFYENLLFRKLAFRRFVRTQQSEVKLVKTISHQYLTQKERTEGKKLLILYGDHSRGSQMKGCVPCPGRGMRRLLAKHFQIIEVDEYLTSQIHHQRKQKMDHLVVRENNHRHRVHKILTLLEDNERCIYVNRDYNACRNILNLGLEYLKTQTRPIEFQRKKKSGDAIK

SEQ ID NO: 36144 - protein, 444 aa, unknown
  TnpB Polypeptide
MRKRRYTVVTQLHEQNNKDLIEYVEVARHAYANAVRETFYVLKNSEEFNKSSFNTYLQNSYGITRRTANSIILDAQGQLNALKAVKRYEKTQLERKINHLETNVIPKLEQKREDNSTMLRLGLSVSLVSQRNLRRKIVAKKQKLNRLKQKLANLTYQIETSSFKLCFGTKHLLQRDYIEFVERRDSQMSFLGAKCEVSCNQQLQLKYNFKDNQFKVKMRKDFGGFKELKGSDRFVFGKVYFRHHKDKIVRILKEKNSPLSFKVIKRNNRYYLYCTFEVQLDPDDFLTRSTYGTIGLDFNKGFITLSETNQYGHLVQTQFLPYRFKSGNKTRTDLQQVISKVVSLSLSTGKDICIENLNFNSKKAQTETKQGKKYNEMLHSLAYRQFIDLVESIAYRNKVFIRKVNPVWTSWIAKQKYCPQMKLNVHVGASFVIARRGQGYKDTI

SEQ ID NO: 36145 - protein, 408 aa, unknown
  TnpB Polypeptide
VSDILILCERHVVKPNSPLFSECDNLSFLAKNLYNSTLYYQRQSLFNSDFQNYYAVTREFTYTNQPDYRALPAKVSKMVQRLVDKNFKSYFALVKTKNTEGCTPKVRPPKYLDKTDGRCIVPYPKDALSLKVDGYVKLSKTSIMIKTKVPKEDIQGARIVPKGNHYIIEILYRVVNRPLRYELPKRVAFIDPGLNNLMTVTSNCFNPILVNGRPLKAINQLANKELAKLKSKLSLRGLYTSPLLQSVYNKRARRITDMLHKITTQLVNHLDSHNIDTVIFGHNVGQKQDINLGKVTNQNFVQIPFTQLIAQLQYKCQLKGIKFILTEESHTSKCSFLDKESVEHHETYKGKRVKRGLFKTSEGILINADVNGSLNIGRKYLTQLGLYTDGLHQSLLQFMVNPQLVKFI

SEQ ID NO: 36146 - protein, 185 aa, Symploca sp.
MKAGYRYRIYPTSGQQMALAQLFGCVRVVWNDALAFCIAQFQSGEKKPKNTELQKKFITQAKTQNKRSWLGKVSCVPLQQSLNDLEQAYQNFFKSCKGQRKGKPVKPPRFKKRHAKQSARFTQRGFRLRGNCLHIAKIGKIKIAWSRSLPEPPTSVTIIKDAAGRYFASFSQKRRSLSLRQETVE

SEQ ID NO: 36147 - protein, 267 aa, unknown
  TnpB Polypeptide
MKLTLQIKLLPTQEQFTFLKNTLIEANTACNEISDIAFTKKLYNQFKLHKEVYHPIKSYFNLSAQMVVRCISKVTDSYKLDKKTKREFRPLGAITYDARILSYVKEGISMWTVGGRLKIPFVCHNEKYIPYIKGEADLVLKKGKFYIFQTVEVPEEEVKDIESFIGCDFGLTTIIATSDGISHSAEWLNTYREHRQKVRSSIQAKADTSKRSTKRNCRKLSKRLSGKERTTANLINHTISKSIVASAKEQGKGISIEDLSRYHRCGL

SEQ ID NO: 36148 - protein, 442 aa, unknown
  TnpB Polypeptide
MRTVSSYGVELRKQNIPIRQTLDIYRSAVSCLIEIYAQIWDELAVITEPKKRFNTAEHLVHTTKKNQARFDFDLRFPKMPSYLRRAAIQHALGSVSSYKTRMELWKKTDQKGGRPKLVCDNHAMPVFYRDVMYREDTEEKDGACLKLYDGHDWKWFRVSLSHTDMEYLRKNWAGKKAAAPVLEKRHRKYFLRFSYTEEVPLTKTPVKEQIICSVDLGLNTDAVCTIMRSDGTVLGRKFINFPSEKDRLSHVLGRIRRFQKEHGSKQIGSRWAYAKRLNTELARKTARSITEYAHENHADVIVFEYLEMKGKISGKKRQKLHLWKKREIQTMCEHKAHRYGIRVSRVCAWNTSRLAYDGSGPVSRDPKNHSLCVFQSGKQYNCDLSASYNIGARYWIREIIKTLPETERSSLEAKVPAVKRRTSCVYADLLILQNEYGCSKAA

SEQ ID NO: 36149 - protein, 281 aa, unknown
  TnpB Polypeptide
VKVRRTCVVKLIVDEETEKKLKQLCDLSSKLWNEVNYAKLKAWLEKKGIDFEGTYKEFYERYKPLIGSATAQTIIRKNDGAWRGFFELLKIKKEGRLPPFVKKIRPLGYKKKRRSRTLWTAIRKDQYKMDCDRIVLQGLGAIGWIEVRYKGLIHLRGERGGIEIRYDADRGKWYAHIAFEVSEKMMKGKWMRVPLQPKGNLTAGIDVGVDNLMAIYVENGLTKLVNGRPLKAISHYWRKKIAKYQSTLNGYGLRTSRKLRQMYMKWRRQIKHYIDTKVRGP

SEQ ID NO: 36150 - protein, 319 aa, unknown
  TnpB Polypeptide
MFVLEFKAKGKTTQYSAIDEAIKTAQFVRNKCVRYWMDNRGVGQKDLYRYNTALRAEFPFVNALNSHACQASVERAYSAIVRFYDNCKKAIPGKKGYPKFKKNCRSVEYKTSGWKLSETRKQITFTDKKEIGKLKLKGTWDLNFYQLDQIKRVRLIRRADGYYVQFLISAENKVETKPTGKTIGLDVGLKEFYTDSNGHREPNPKFYRTSEKRLKFRQRRVSRKKKGSTNRKKAINRLGRVHLKISRQREEHAKKIARCVIQSNDLVASEDLRIKNLVKNHCLAKSINDAGWYQFRKWLEYFGVKFGRVTVAVNPAYTS

SEQ ID NO: 36151 - protein, 414 aa, unknown
  TnpB Polypeptide
MEVRRTLPVKLVVADSDRDALLETIAQYKHCANETSDHCWNDDGYKKTAKYAVKDELYHDLKTDHDLTANLVQQAIFQAVEAVRSGVERLEKNEDTSQPEFTADTARYDKRAATFHDDHVSLSTVAGRIEADYVLPEDDTGTPFETYLSDDDWEFRTSTLHYKPFEEEFWLHIGFKRSDEDSGTEQGDADVPEHSTVLGIDLGVETLAVSSTGRFWTGDELDHWHREFQQRRTDLQQTGTQEAHRTLQRVSHKETAYYKQYLHTVANEIITEALDNECSVIAFEDLTDIRKRCHGATWHHRWRFNRLYQYVEYKANAHGIDVEELERSPQAKTVPAYYTSQRCSSCGFTHEDNRPEQEMFACQKCGYENHADYNAAKNVAVRYCRRSLRRTQTGGGGGAPVNVALNGGTMTVNV

SEQ ID NO: 36152 - protein, 514 aa, unknown
  TnpB Polypeptide
MRAQTPSYVVSTKVLLSESIIKRLEKSFRISNSAYNEVLSFGLKRFEALKQNSEYQELLEARRPAVEKLAALKKAKKKDKALSKQVKNYNDALFELRKAYGLTEFELHKYLAQQRKKPCSPYQQFNAGEIQVIGTQAYKALEKVLFYQIKPHKVRFRSKLDLDVSFRNRVNTTGTRLEPSDKKDIAYRLYIHKASTFVDIPVKAFNKYQQMSLLRSEKIKYVQIIRKTIRGKKVYYLQIVCQGFPPSKTTKGNSVVGIDPGISTVAFASPSEVALVDLVPKNITWKEKHLKRLDQRIERSRRMNNPECYKENGTIKKGARFKRPSNRQVRLRNRQRKVYRSLSEERKKLQGQLVARLVSQASIIRIEELGVKGLQKRSQDIRINPKTNRPYSKKRFGKAIFRAAPGSFRAALETRASQLGIEFEVISPKDVRPSQYNHITQTFEKKPLSTRVYDLSDEYTGVQRDLYSAFLIGHVENGHYQQEQLNQDFPDFYQQMKDFLRRPVETKRLAWYLN

SEQ ID NO: 36153 - protein, 293 aa, unknown
  TnpB Polypeptide
LQHDAPPLEVRADGTGQKVGFPKFKSKKNRYKSYKTNMTNNNIVFLGNKIKLPKIGKIKIRDKYCQIEGRILSATISQTPSGKYYIALCCTDLPQPEFIRTNKYVGLDLGIKDFVITSDAVKYSNPKYLQKSLTRLAKLQRELSRKTKGSSNWEKARVKVAKLHDRIANQRHNLLHQVTCQLIRNYDVICLEDLQVENMMKNHKLARNIADVSWSEFMRQLTYKAKWFGKIIVKIDKFYPSSQLCHVCGYKNTEVKNLNVRKWNCPKCKTYHDRDVNAAINIRNEGLRILNIA

SEQ ID NO: 36154 - protein, 363 aa, unknown
  TnpB Polypeptide
MHKAFKYRLYPNKSQEIILNRTLQFCSYLYNAALQERRDAYKMNKVNISYKGQSCQLPFIKQNNPEYQEIYSQVLQNVLNRIDKAFDNFFRRIKNKETPGYPRFRSSKRYNSFTYPQSGWKLQGNHLILSKIGSLKLKLHRPIQGNIKTIDIKKENDKWYAIFVCETESSPLPQTNKFIGLDVGIESFLVTSDSEFIENPHYLKKSLDKLKDAQKKVSNKKLGSNRRKKSVKLLAKRHNKIKNQRKDFHHKLSRQFINNYDLIAIEKLKISNMIKNHNLAQSISDVGWGQFILLLKQKAEEAAREIIEVNPRYTSQTCSSCGQIVKKDLSERIHICDCGLQIHRDINAAINILRLGMSLQLKN

SEQ ID NO: 36155 - protein, 476 aa, Bacterium sp.
MRVTQAFRFELDPNVAQRVALAKHVGTARFAYNWGLARCLEAIEQGRRVPSAISLHKEWNRWKRQHAPWWTEVSKCAPQEAFRDLERAFRSWWRRLARKPRFKRKKLLLDNKARLTGSIRVFPRHVQLPRIGKVRTKERTDKLLVLLEARKARILSATIAREADRWYVSLACEVERPDPELRQGEPVGVDLGLASFLVLSDGTRVNAPRPLRKMLRLLRRRSRQLSRKRRGSQNRRKAILMLARLHRRVRNIRRDFLHKVTTELARTKPVIVVEDLAVKALAGGRLARSIGDVGWGTFRWMLEYKCRWYGARLIIAPRGFPSTRLCSACGHLNGRLPLHRRVYACAACGLELDRDLNAALNLRFYGLAAPKGPTESSSGSDACGDPSGGGTGESLVYEPRVEEAGSGRLSLSPAWAKETTMRHRTDQPLTRWTPGGSFCTKRPSGRFTLSCISSSFRSVSSRLASTIFWTVGSQSW

SEQ ID NO: 36156 - protein, 429 aa, unknown
  TnpB Polypeptide
MNVRRTCTVGLIVDEGTEKRLRRLCDLSSKLWNEVNHIRLKMWREKRPVDFKATYREFYEKYKPLIGAATAQTIIRKNNDAWKTFFRLLELKKEGRLPPFMRKIKPPGLGKRNSSRTLWVAVRKDQYEMDGERIVIKWLGAIGWIEVKFKGPVYLRGERGELKICYDADGKRWYASITFNVSEKAVRGEWRPVPKQPKGNLMAGIDIGVINLMAVYVENGLTKLVNGKPLKAISFYWRERISKYQSMLNKYGLETSKRLRRMYTKWRRQIKYYINTKVREVIEWLYDVGVSTIKVGYPKYIAQENGDFDNNNCVWTYGLLLRRIREIAEEYGIKVIYVDEGGTSSRCPWHGDGCGVRIYRGLFKCMTMNKVFNADIAAARNILMTATSNNTSMTPVTPESRRGIGGNGRRPGQGLNPQKGDVAQTSPPK

SEQ ID NO: 36157 - protein, 471 aa, Geoglobus sp.
MSKVVRTVVVKSAPLPRKVFRVFVELEGIYRNMVEQLTMFAVRSSTTSFIRLKALKYRELRAMYQLPSHYVYTACQDASTRAKSFLRLKKRGLAEKECPEIRNVSIWLDDHLWKPNGLTSIRIATHRGWVEVGFEPHKQYWKYINGGWKLASEAKIKLDKRNRQLFIYLTFFKEAEEYKPKGYLPVDVNENNVTILVDGTAYLFETSMEKLVLGYYYRRKSVQEKYDKLHGASSREKKVLRKLKERKKKSDIKWKIANIVVRTAHEKQHAIVLEKLGKKPANNMVKRIKDAQLRHRIFQASFKGIQNAIKEKAREYGVPVVPVNPRNTSKLCPVHSSHIAYDDSSRIGECSVGGELWHRDVAACWNILFRALRSDGSDAPSFAGLNVDGRLIPLASTAIHEPSALPKGLWARWKSLPQTLRYGFEQNEAVGINGVFSKVVELPHYSFGYSFGRKVYRYKIFKVYRIRGCHV

SEQ ID NO: 36158 - protein, 406 aa, Streptomyces sp.
VIVMQLRYGFRLYPNAVQEAALAKAFGCARVVFNDAVRAREDARRAGRPFPTGGELSRKLITEAKRTAGRAWLGEVSAVVLQQSLRDAETAYRNFFASLKGAQLGAPRFKSRKDHRQSVRFTANARWKITVAGRLDLPKIGAVKVKWSRTLPATPTSVTVVRDAAGRFFASFVIDTDPAADAARMPATDRTVGIDLGLTHFAVLSDGTKIDSPRFLRRAEKKLKKAQRELSRKQKGSRNRAKARLKVARAHAKVADARREFHHQLSTKLVSENQGIAVEDLSVAGLARTRLAKSVHDAGWASFVNMLEYKAQRYGCTLVKIGRFKPTSQVCSTCGAKDGPKPLNVREWTCSACGTVHDRDHNATINVHQAAGLAVSACGAPVRPESVLAQREETGSHGFPTGCCAA

SEQ ID NO: 36159 - protein, 420 aa, unknown
  TnpB Polypeptide
MASGGEGLLTISIGMRVSPEPGAIELLRRYNTALNYAINKILRLDLKKIGEVHNALYRELREWFGLPSRIALDCYRDALANANAWRNNPKKGKRPRVKKLSMLLHPGSGYRIEDGYIEIIGGVKLKIIGWDRRYDGYENGEARLVYRGDKMILWISKKIPRPEPYKPRDAIAVDINEKKIVYGDDKINKERDTKIDEAHRWKKLAESLQKKYSSPRYPAWRRRKAILNRIRSYHRKARNILEDWARKTSLRIVELSKKLGHAVAREDLTGLINTLRRIKNKDHRTKLIIMGYSRLVKWIDWQAMKHGVPLAIVNPNGTSSECPKCNSKLEENGYRRLKCPRCGFEADRDIIGKLNIRKRALKKLKIKVIPGGVLAPLTAPQMTDVNPNRWGEPMNRPQRGRGTPALQGGEEVRDAREYHS

SEQ ID NO: 36160 - protein, 390 aa, unknown
  TnpB Polypeptide
VRRCRSFRFLLSPTVRQRTALVGLLGLQCELYNAALEERRGAWRWEHRSLSYVDQCRTLTSLRDVRPEVLTGGVAVCRGTLRRLDWAFAGFYRRCRAGQRPGYPRFGPRSRWDSLQWEDRNGWRLDPAAMRLHLMGIGGIKMRAHRPVRGTPKAITVRREGRRWWVTIRCVDVPAEPLAPTGRQVGIDLGVTVLVATSDGTLITNDRHAQRAAHRLARAQQDLATKQRGSQHRRRAVERVAAAHRGVRNRRRDTLHQLSRRLVNDHDLIVHEQLAVSNLVRRPRPRPDGAGGFAPNGAAAKAGLNRCIHDAGWGQLLAMIAYKAESAGRAVIAVDPRNTSRTCAHCDHVSAGNRRGAVFECHACGHEAHADTNAAINILRAGRAQQPKAA

SEQ ID NO: 36161 - protein, 424 aa, Tychonema sp.
MQKAERHIIKSTDARFDQLDNLAFQSKNLYNAANYVIRQNFLYGWGYLTYNRMASLMKSHPAYQALPAKVSQQILMILDKNWQAFFEANKAYKNEPTKFTGRPKLPKYKDKVKGRNLLVYTLQAISSKQLKKGIIQLSGTDISIKTTVRREGICQVRVVPKCDCYVIEVIYNEPESTRERDNSATVASIDLGLNNLVALTSNQPGFIPLLINGRPLKSINQFYNKRKSQLQSVLKGYLKTSSRIQRLTRCRHQKVDNYLHHTSRLIIDILSERQIGTLVIGKNRQWKNCINLGKQNNQNLVSIPHARLIQMLEYKAKLVGIEVVIQEESYTSVSNFLALDPIPVYGDSDAKRVEFTGKRIHRGLYKTASGLLINADVNGSYNIMRKALPNALSNGIGSCVVQPRRVNPLEVKVKGEGLHASHVM

SEQ ID NO: 36162 - protein, 665 aa, unknown
  TnpB Polypeptide
MSPPQPQLVTTQDGAHGRPKSVPGNGQKSKLAARTDISSFGSWEAKVTARQLIVAALAWVYGETVMEVYRRVVIHGEQWIAPSSRKNGPAGGVRAELIGRGWLQREATSMLVQAQAAQASAVESAVNAVQRLREALVQVDEKLAWAKAGSSPRRVRQRHGLARRHDTLISGITRLQRRLDNNDIRVCFGTRKLALAGNNPAAHQYASRQQWRDQWDRARHGNWYCQGDKQAVGGNYAAQVVLDAAGKDCVRVHVPRFLAEQLGCEQSVQIPLQGGDHGRAELARAMERDRQDYQDRVKVWEQSQAHYRAQRALGFSEAGLGAIGLARPRKEKPDLFCYEAVSVRLCWRERKQAWYVVASWEKEAPVVLRPSRALRRKYEHILGVDLNPDNLAWCLTDSQGNPQRWGKIPLDLTGTAQQNADQIGRAAAELVKLAKLYGAPIAHEILDFTRKRAELRYLPRRLAKLLSNFAYTKFATTLASRCVREGVARIPVYPAWTSVLGQANYAGVYGVSVDQGAACVIARRALGFRERPRPSVAAAVACQHPRSGVDRHTQSGLRALAKALPQRRSTWEPNGLCTRNPSGVHSASPATVGPPGKGKDKCPAPALNSFPAPNPACSGSKAVPRSEAVVAAHTGLHTPTQAGCKSLSGQTLAQHQRINNDQPKK

SEQ ID NO: 36163 - protein, 665 aa, unknown; identical to SEQ ID NO: 36162
  TnpB Polypeptide

SEQ ID NO: 36164 - protein, 285 aa, unknown
  TnpB Polypeptide
MILTYKIKHNSNFKIELQKARTVAEFALETKSTSSASVKHIGLKSCIACQILRKYANNKKIKKINSVLLAVPGQATKQKGGKLWIACLKLNLDISHLPKFSKINQVELNDEYAFISVTVAEQPEQKSVDYLGVDRNATGHVVVASLLNSGKVLKLGKQALHLRKKYQGIRRHLQKTGQFKTLKSISNKEQRILRDLDHKMSKAIVDFSVKHKSVIVLEQLFGLSKGTNKKNKFNKPAKRIVNNWSFLGLNNLFYIRPNWLELRLCLWIPVSHHKYVFAARRSEAG

SEQ ID NO: 36165 - protein, 301 aa, Rhodococcus sp.
MLAAVKAVMNQRQAERTYGIAEDELTPALGWPLPALRKQWNARKGKRAGKTIGFPRFKTARSRRSVRFTTGTIRVETDRHHVTLPRLGRIHTCESTRKLARRLEAGTARILSATLSEDSPGRWHVAFQILVHRTVTVPEHVGAGEPVVGADVGVKADSLIVVATPDGRELDRVPASKSLTAAQGRLRALQRRAARQHSRPVFLFQQDVFGMWQAKTEPDPRGPNICVRPRKWSTPQAMKRRPGTSSRWVRPGLPHQKVRLPDGKASTACLCLLTRRQRLREAIPSAGNPLPTDPKWRQQRG

SEQ ID NO: 36166 - protein, 444 aa, Halonotius sp.
MKRANTFAVRPLCDADEQVLRQVLDASAALWNEINYQRLMRYNDEDGFEGDVWDADTGQLEGQYKGVLGASTAQQVIATNSEAWRAFFRTKDQFHDPDNQQVTDHPEPPGFRSNDDGRVLKGVIRKDAYTVEWGDRSRLEFVVGEELRDKHNSPKSRFRLELVGEPNWPEYDDQGRLELWYDETDGTFRASQPVTVSEQATPLADETAALDIGANNLVACTTTTGQQYLYEGRNLFDRFRSTTREIARLQSKLKEGRYSSQRIRRLYRKRTRRRDHAQAALCRNLIERLYDEGVDTVYIGGLTDVLDTHWSVETNAKTHNFWAFKQFTERLATTAEEYGIAVEVRSEAWTSQECPQCGSTDRTTRQQDTLTCPCGFEGHADLTASETFLARQTAQSVRPMARPVRLEWDSHEWLEASHSHRPKQQRTDPSTVHGDGNVAAGESA

SEQ ID NO: 36167 - protein, 336 aa, Halonotius sp.
  misc_feature (158)..(164): Xaa can be any naturally occurring amino acid
MEVRRTVPVKLDVDSADAVLLRETVAEFLCAANYVVDHAWQGDYKTTSKAQLQEETYDEVRDRTQLHANLVQNARNKAADAVQGVVGRWKQGEYAGKPHFSQPTVVYDKRCATFHDEYVSLATVDGRIEIEYVLPDANRDTPHSRYLDDDDYEVTGAXXXXXXXMMLHRTANGIIEEAAENGCTVIAFEELTGIRNRLSGASWGHKWAFERLYEYVEYKAELHSIDVEQVAPENTSRRCSTCGFTHPDNRDGEDFECLKCGYENHADYNAAKNIGLRYLRRNQTGDGGGAPVGVRLNRGALNANGEYEPPAGDSGQSGSPRESPTRNEANGEAVSE

SEQ ID NO: 36168 - protein, 397 aa, unknown
  TnpB Polypeptide
MRLVEQHCIGAHDPRFAMIDDAAFRFKNLYNAANYLVRQSFIHHGIYLNYATIFHQMKTHEAYQALPRKVGNDALRLLDKNWKSFFKAMKAYNKDSTKFLGHPKLPKYKEKDGRNILIYDKQALSKTALKQGIIAPSQLGITIPTKQTNVVQVRIVPRGNHYVVEVVYEQKEEQAPVDPTLVAAIDMGLDCLATLTSNKPGFTPRLVNGRPLTSINQHYNKQRAKLQSKLGTRGTSRRLDRFMNKRTRKINHYLHTQSRRLMDLLVEEGIGTPVIGKNPNWKQEVEMGKRNNQQFVQIPHARFIDMLVYKAQLVGMQVVITEESHTSKFSFLDLEPIHHHDRYVGKRVKRGLFRASNGQRIHADVNGSYNILRKAIPKSFGQGIEGVAVRPVSLPTY

SEQ ID NO: 36169 - protein, 346 aa, Escherichia sp.
  misc_feature (263)..(293): Xaa can be any naturally occurring amino acid
VKRLQAFKFQLRPGGQQECEMRRFAGACRFVFNRALARQNENHEAGNKYIPYGKMASWLVEWKNATETQWLKDSPSQPLQQSLKDLERAYKNFFRKRAAFPRFKKRGQNDAFRYPQGVKLDQENSRIFLPKLGWMRYRNSRQVTGVVKNVTVSQSCGKWYISIQTESEVSTPVHPSASMIGLDAGVAKLATLSDGTVFGPVNSFQKNQKTLARLQRQLSRKVKFSNNWQKQKRKIQRLHSRIANIRRDYLHKVTTTVSKNHAXXXXXXXXXXXXXXXXXXXXXXXXXXXXXXXLSTSSSGVAVRCLLFRQRTQASVARAVVIQRKKIACHKVNSDARYVDIQRTPM

SEQ ID NO: 36170 - protein, 433 aa, unknown
  TnpB Polypeptide
MQLVERHCIGKSDPRFALIDRAAFASKNLYNAALYEIRQHFIFTGKYLSYNAMDKLMQKHEAYRALPAKVSQQVLKLLDKNWAAFFAARHSYQEDPSKFKGRPKLPGYKDKKEGRNILVYTTQAFSKPARKRGILKPSQLGIEIKTSQKPGSIDQVRIVPRSGFYVVEVVYQKQEQAASSNEQYVAGIDLGINNLAALAANKPGFVPVVVNGRPVKAINQFYNKRRAELQKQSGGRGRTRRINQLTTKRNRRMEHYMHAASKHLIAILLSEQIGTLIIGKNDGWKQEVEMGRRTNQTFCQIPHARFIEMLTYKAELVGITVKLTEESYTSQASFLDRDSLPTYDPHRKQDPKFSGKRVKRGLYRASNRRDINADINGACNIIRKVAPKAFDAEGVEDGEALLASLVVHPRRIVVLRPTQKEKSKASRAKARKR

SEQ ID NO: 36171 - protein, 418 aa, Pseudomonas sp.
MDLSHGTILADDTEKRKVSYKLYPSKQQEILLLELLRSHQQLYNAALQERTEAWQKCGKSISYADQCKSLTLIRQSLPEWTFANCSSQQMTLRKLDKAFQAFFRRIKAGETPGYPRFKSLQRYPGFSFKGHGDGWRFTPGADWKHGSLRIGGVGHIRCRGRARQGGRVCASDLLFRNGTWWLSLTVEPKLIERTRTSDAAVGIDWGVAQFLTIADEFGGHRVIENPRYHRCSAEYIAALQQAVSRKKRGSQRRKRAVKALGAARAQQSRQRLDFLHKVSASQAEHNALIAMEELQVRNMTRSAKGNLEAPGKNVAQKSGLNREILDTAPALFNQLIRYKVKETGGEFVDVPTRKAKPSQTCPACGQVVKKTLAERIHQCPCGHREPRDAASARVALNWALHGKPVAPIRCGTGRDGSC

SEQ ID NO: 36172 - protein, 210 aa, Pseudomonas sp.
  misc_feature (72)..(72): Xaa can be any naturally occurring amino acid
  misc_feature (89)..(89): Xaa can be any naturally occurring amino acid
MPREAQAALGIAQRARKKKRVRAIHARIANQRKDALHKETAALVKNHAAIFVGNVNASALAKTSMAKSVLDXAWTTFRTQLQYKAMRQXTAALVKNHAAIFVGNVNASALAKTSMAKSVLDAAWTTFRTQLQYKAMRQGVVFAEVNEAFSTQACSCCGVNPPSSPKGRAGLGIRQWTCSSCGSVHDRDVNAARNIARLGLQALAEGIPAL

SEQ ID NO: 36173 - protein, 437 aa, Spirulina sp.
MAKTFAAQVNQLPNDPPLRAALEFLCTASNNLYNCTVYLARQLYFKAGKFSNGRWLSSQMKHNAHMKALYTSAAQQTCISVGEAFNGYRKLLNLWRSGRLAEKPKPPNYRRSGGLFQLSYPKQWLKLVNGQVRVPMGTACKVWFNLPEIFLPFPSNLDWAEVRELQIVPRAGYFDAVWICTGKPVEPVALAPEKSLAIDHGIDNWLTCVDSEGHSFIVDGKHLKALNQGYNKRVATIKEGKVQAFWCRLLDKLTGKRNRQMRDAVNKAARLVINHCLNHGIGTIVFGWNQGQKSGANMGRKANQKFVQIPTAKLKTRIAQLCEAHGILFIEQEESYTSQASALDLDAIPVYGEKPEGWKASGRRIRRGTYRCGAGVEVNADANGAWNIGRKAKVTGMQCTPARGVLTSPKRLRIWDLPGRSTLAQKCCNLSGESPSL

SEQ ID NO: 36174 - protein, 463 aa, unknown
  TnpB Polypeptide
MPARVARTYRTTLSGPLLQTVSENAPGLDPGVESDRQGYKPLSKHITNKETAMEYSHRYPAYPTQQVAVELERRIDIHRQAYNYTLYEYENVDADNTGSAYKHHYRLPGWKDEFPVFSEVNSKALQRTVTRFYQNLTALSEQKQNGNKVGKLKWKSPREFQSMTFSQSGFELKNTSGRHATLWLSKIGDIKISYHRDIPNEPDIKEVTIKKETTGDWFVSFGLETDDGALPEKPEVDSLDASNNVGIDLGILNYVHTSDGMTVEWLNLDDEYDKLRREQRKLSRKEKGSNNWEEQREEVAKIKRHIKRKVEYFQHKLTTWLVREYDAVFVEDLDLKEMLEDSHNARNKQDAAWRQFITLLEYKAELYGTHVVQVEPEGTTKECASCGVETVKPLWVREHSCPSCGFETGRDCNASLNALQRGFQELGMEWPESTPVEPALPTDTDDFREVSAKRVIETGSLGA

SEQ ID NO: 36175 - protein, 550 aa, Solobacterium sp.
MAVRTLFSRHISKGSLDPEELNALLCDIALFNQIKHTATAMQEIQNTSAREATGVPDRRKKENRTKEHPVSAHVQLKQKYHADDHFVNSAITEAKGALQSAKELKKQNISEWQEQLKDNKNKIRSTKQQLTRMQNLRKKLKSWSKKKDPAYELSGVKERYDKETECFEVMNLRTYKAMQSYENAYLFEVQYIIPRIHELKNRLAHLEQRKELLKDRIARENEPASVCYGGKKLFRQQNNGKYPNHATWKRAWQKKRSHALMITGRKDASQGNFRFSYSTETRGLIYRSQQMKNGEPVLVHLKNVVFPYKQEFVNQAVGLPAHERHAVSWRIIETSGSFLIQCIVTVPEKRMVEFIGDGCIGMDANYDNLSISETDGSGNILRHKVIRFDLEGASSGHAEQIISSALDEAYCWCRKSAKPLVMECLKLKHTANRYGSKKKNFVTSRFAYSTVTALAESKSYKYGIALKKVHPAYTSQVGKLIFMKRYGMSVHEGASAAIARRGMGIQEKVPLLIKVIDPSINWNQPRRQQWSAAYKITKQLRASEMYALAI

SEQ ID NO: 36176 - protein, 431 aa, Solobacterium sp.
MKKMSDYMFHIGLQMRVYPSDRQKAMIRMNGGASRFVYNRLVAVHNEMFRLRKSASLSPTDTERLAYLASAYGDAKSIKNAIPFLWDCDSDMVLHAIMNYKRAWSQFRKVKGTSIPTFHKFDNTYCYQTSNHYAGKKLNTIPHVVGLYEGSVRFTDRNHLVLPMLGTIRMKGSRKLIDALLNRVAETRIGTVAIRMDACGDCYISLALASDEPFHTAYASTGRAAGMDLNLSNFLMDSDGCVIESPRYLKRAEKKLRKAQRALSRKYEAARRDGRDYRTCRNYQEARLKLAKCHRHVANQRLDFIRCTADKEVKSHDYLFAEDLKVRNLKKSHKLAKAISDSGWRTFLTELQNTASKRGKICLLVNPRNTTQTCSSCGYVMSDDNRIVLGQEEWACPICGTHHVRDYNAAINIKNAGLALLQESGIAIDIR

SEQ ID NO: 36177 - protein, 390 aa, Solobacterium sp.
MQMPKIKKGFVIRLYPTAEQMQQIRRTAGCARWLYNEIVAVNQKRRDLDPKASLLYGRNLNYLLPRLKEEHPWLKEADSTSLTGAVDNISNAYARWLSGLGRKPKFKKRSTHTDSFISKCVNGNIAVIDAHHIRIPKIGVIYYKSGRMPHGRICSVTVRILPSGNINASVLCDYEEEELLKTGKAIGIDLGLKDLAILSDGTKYGLPRWDKESADRLHYWQRTASRRLLRAKEAMKKDSALTLEDFRNYQKARRMVARIHEHIANQRQDYLDRLTTSLVRDFDVIVIENLKPSRMVHNHNLSGAIHNAGWGMFAQMLAYKCAFYGKRLVTINPAYTSQVCSDCGVINERLGYNAYGWLKVREWTCPVCGAHHDRDVNAAVNILHTGLFAA

SEQ ID NO: 36178 - protein, 521 aa, unknown
  TnpB Polypeptide
MFVSLQFKLGLKKEEKEKLTQLMRKQSSAIRVAYNMLKELEKEKAKNPHSQIYHRLRQLFPELSTKYIDSAVYKAKQYPTDKTVVFGGKRLFEKLCKKHLTGKAKERLKKQWREQRQGTLISIGSKSKEDKGNRLLRFEDKEGQLHLRITTGNREFIYAKVLREPSNSKDKWITFMLMLLESWQTKNYFAYTVELKLRNGEVYGSVSFELPTPEVKYTKEKGVIAIDTNASPIHLAIAEVSKTGELLSYQTISLHHLLGLSQNSKDHQEWILAHQLLDLAIQKNKAIAVENLKKLRKGKRGDGKAELRKRLHHWNAKKFLQKLKRVAMIKGVEIVEVNPAYTSVIGMLKYAPQLNIDKDVAGAYVIGRRALGFKEDMPENYEKLLKDKAYLEFALKRYEDREKELTEHIEKETNEYKRNALESELRSVEDARKLLTNLIQSLQSEPSGCEGANGRNPEQRRGNLASSVAWQVLRVALLFPILGRVLPRDLSPLKPVLVEGVWYRVRRSNGLVPLEAGGTSR

SEQ ID NO: 36179 - protein, 284 aa, unknown
  TnpB Polypeptide
LAKKIFKHLLGNNRRPRFEGISLHLDGKVAELEPRKEGKAKAFDYWLKLSTLDKGKPVLIQLKKNPYAESLEGEFRNFYQLLEENGNIKVKVVKELKKRNYVPATDTIAIDLGLNPLIATNSGDLIGRQFFDFLKRMDEKIVKRMAQVQRNGGLPSRDNKYREYVRRLREFLKNEINRVLNRLINLYKPMKIIVERLDFRSPELSKRMNRLIQNFGKRYVKEKLERLHQLYGIEIVEVNPAYSSQECSSCGYVDRENRKSTQEFECKCCGNKINAQVNGAKNLL

SEQ ID NO: 36180 - protein, 512 aa, unknown
  TnpB Polypeptide
MENVRSVRRAVAVAVESPPPELSAVEEAYRRIVEEAAVYVAERGTLEREKREELYRRFRELYPWLHSQLVQQAMNQGVEAGRSFLEARRDGRVRKPRPEVRRVSMRFAKDSWSYRKAVASIAPIRLELQLFGRGAKRQRYELWIKPHRRFWLYWWKTLRGEAELASTLMLKRRRGRWYAIFAFDVQPKRKPPAEAVAFDVNENSVAVARVSLLSTVDAVARWNRRYVDPAVYSIRTDFGRLAKRYEAVRGKKLEELRRRYPFAGRDGEERAQNVADTREFKRFAGRLRERRRKEGRVKQTAREVARSPAIIVTEDLGENPQEEMIGVEEKAKKGVRKKVKRKELRHRIKQTPFRKLIRAVEDKARETGSVVVYMSPYRNSKVCPIHFALLRDNGGWHTLWCPHGHDVDRDHAAVLNMLWKTAPAGWVKGVWWDVKEVGKRLKKEAVRRANPIIPRPAAYAVWTSLKALQAGDKWPAVLARAGPTTPAGGAYEGGARAPPRGAGTPALGEEVS

SEQ ID NO: 36181 - protein, 398 aa, unknown
  TnpB Polypeptide
MYKVYKIQIKENDYLKDITTMSNNLYNVALYNVRQHFFNHKTYLNYFNNYPICKENENYKGMPSQAAQQVLKQVDNSFKSFFQALKDYKKYPNKYKTCPKIPRYKEKGSKSVVTIPSQTIYRKDNYIQFPKTKFKVFLGELKIDKIIEVKIKPYNKYYEICITYEQEDLKRVEKNENYIGIDLGVNNFITVSNNIGKRPFIVKGGIIKNMNQYYNKKKAMLMSFIGDKGVSNRIHKLSRKRNNKIMFYLHNVSRHLINYCINNNVSNIIIGYNKEWKQEVNTGKRNNQNFVSIPFNTFINQIKYKADEVGITVILNEESYTSKCDALALEDLKHKEQYFGSRVKRGLFKSRTKEILNADVNGSLNILRKVIGNDFVSLLNRGLVKNPFIVKYDKEFVY

SEQ ID NO: 36182 - protein, 396 aa, unknown
  TnpB Polypeptide
MAKVTRTVVVPSVALSKGKYEVLKELEEMYKQMLVELVEYGFRYGVKSFTGLKKRMYHVFRDRYPQLPSHYVHTACQDAATRIKSFMELRKRGRAYTEKPVVRKVSIWLDDHLWKPLGYTAIRVATHRGWIVIELQLHKLYWRYVNSGWRLRTQPRLKLDHKERRVYVHFVFEKDVEDYKPRGWIAVDVNENNVTVLVDGKVYKLVTMLRKTIERYHEHRMRLQKRLVIQINGKKYPLFMLWGKKMTCLREREKKNDWRRKIAVAIVKTAKSLGYGIVVEKLPKRASEKMINGVRDSELRHRIYQAAFKGMVKTIKEVGEKHGVPVEEVDPKYTSQTCPLCGFRPMTRSAGRVLSCPRCGFSHDRDVVACMNLLKRLVDDRPQIYSSHLILYDWGT

SEQ ID NO: 36183 - protein, 413 aa, Mycobacterium sp.
MRYRYRIEPTCAQQRMLARVFGCVRVVFNDALRVRNEVYRAGVKLSDTEIQRRVISQAKKTTERSWLAEVPSVALVQWVNDSRRAWRNFFDSNTGKRRGRRLGRPKMKSKKDHRQSFRLTRNGFSVRPTGQLFVAKVGEVRMRWSRELPSEPSSVTIVREPDGHYYASFVVEVAATPLPMVDRQAGVDVDISQLATVATSDQTRTDIANPKHLGRKLRKLRRLEREKSRQQKGSSNRDKTRRRVAIAHGNVVRARRDYHHKQALVLVRDNQVIHVEDLNIVGMVKNRRLTRAISDAGWGQFVRIIGEKAQRYGRTLHRVSRWLASSKTCSTCGHRLNELPLHIRTWTCPACRTVHDRDHNAAVVILAAGRAERINASHESGRNRESGSGGAPVSPSTTGKARDNEAGSTPTAA

SEQ ID NO: 36184 - protein, 240 aa, Streptosporangium sp.
VRIPKVGWVRFHWSRPVEQAKSFRVSRDAAGRWHVAFAVIPQPIPGPGTGEIVGVDRGVTVSAALSTGDLLVVPLLSAAEKKRLVRLRRTLARAKRGSKRRGKTKTAIAKLKAREGDRRKDWVEKTSTDLVRRFDVIAVEDLKISNMTRSARGTLEVPGTNVRQKAGLNQGILANGWGQLVTRTEHKAPGRVQMVDPRYTSQTCNACGHIARESRESQALFRCVACEHRDHAARTPSSTS

SEQ ID NO: 36185 - protein, 416 aa, unknown
  TnpB Polypeptide
MQITRGYRTELDLNNKQITACKKHAGAARYAYNWGLKRKQEVYQATGRSISAMELHRELNQLKQNELPWMYEVSKAAPQEALRDLDQAMRNFFRRVQLKKEGKWKGPPGYPTCKSKKKGLGSFRLTGAIGVYEQAIDLPRLGRLRLKECGYLPTSGVHILSATVSEEAERWYISLQVQEEVPDPPPATGESIGVDLGIKTLAQCSNGMAIKNPEALRSELKRLGRLHRRLSRKAKGSKNRTKARNKLARKYARIAHVRRDALHQATSHLTGARLSKEERRARYEEIASTLPEPKAKVKARKGRSHMRRWTEAPPLPEKVAKQVKQKQSKRLLRQARAADAAVRPSVAVLEDQSAGRNETESQAGACDQRCGLRRVPATDDLQDLMAGRKLALCGSLVSFDEDVFALWQRQRRHGPL

SEQ ID NO: 36186 - protein, 401 aa, Kribbella sp.
MARYRLYPTSAEEHALLEHCAHARFVWNLAVEQHRRSTEGQRRTQGFGEHCRQLTEARAESAWLASGSCTVQQQALKDFAVCTAAWRSGRSGRPSWRKRGRHESFRIVAVRPDHVRRTSRRFGSVFVPKVGHVRFRWSRPVRVAKSFRIKQESDGRWYVAFATVPASVPGPGNGAVVGLDRGVVSSVTLSTGEMYRCPMPRSADITRRRRLQRRLARAERGSNRRQRTKRALGRLTVREVDRRRDWIEKLSTELARRFDLIRVEDLRIGNMVRSARGTIDHPSRGSRCKARLDGRILSNGWGLLVRRLEDKAAGRVERVHPAFTSQRCSVCSYRSSENRKSQAVFLCGRCGHRANADVNAARNIAAGRVVTARGGGPTGPPVNREPRHSASLVAVSEPSHR

SEQ ID NO: 36187 - protein, 182 aa, Geitlerinema sp.
LKNKQKGSANWLKLQKKIARVHQRIADTRKDWHFKLAHHLCDSAGMVFVEDLDFRIMAKGMLGKHTLDAGLGQFTNQILPWVCWKRDVYYEKVDARGTSQECPDCGIQVHKALSVRVHQCPECGSTKPRDVAAAQVICTRGQRGIENACGVKAAGAEVTQSSWRAVKQEIFGATQGISLHTH

SEQ ID NO: 36188 - protein, 137 aa, Symploca sp.
VLVLEYKAVVKKPQAVAMDEAIRTAKFVRNKVLRYWMDNRGIGKKQLYQYNTQLRAEYSFVKELNSHACQVSVENVERAIKRFFDNCKNQKPGKKGYPRFKKHSRSVEYKTSGWKLHPSKRRIQFLDKKGIGELKLH

SEQ ID NO: 36189 - protein, 498 aa, Ruminococcus sp.
  misc_feature (110)..(142): Xaa can be any naturally occurring amino acid
MGTWKSKNRHKYLLQYHIIFVCKYRKKLLVSRQISDDIKQFSYEICQRHSVIIRYMETDKDHIHYMIETEPTMSISKIVNLMKSYTTYHIWKRYPQYLRKQFWKEHTFWXXXXXXXXXXXXXXXXXXXXXXXXXXXXXXXXXNNEQKIQIAKTFGCCRFVYNQTLAYRKEVYEKEKKSVSKTDCNNYCNRQLKKEYEWLKEVDKFALTNAIYNMDAAYQKFFKEHAGYPKFKSKHDNHKSYTTNFTNGNITVDFGCNRVKLPKLKGIKAKLHRNFIGQIKSATISQVPSGKYYVSILVETEHVELPHINQNTGIDLGVKELCITSTGKKYENPKIIRKYEKKLVKLQRQLAHKEKRSQNYCKTKKKIALCHEKITNTRKDYLHKMSHEIISENQVIVSEDLQIKNMVKNHRLAKSISDVSWYELTRQLEYKAKWNGRKYVKIDRFYASSQLCSVCGYQNTETKNLSVREWTCPVCGTNHDRDINAAKNILEKGLRQIA

SEQ ID NO: 36190 - protein, 223 aa, Halovenus sp.
MQNMLPDLKDWWGELNDVYSKVLQMVARRVSDNLDRLKEKKENGRKVGMLKWKSPREYRSLTYNQSGFELNNTSDQTVLSLSKIGEMPIHLHRDIPNDACVKQVTVKQEKSGEWYAIFGIETEDDAPEKPALDEIDREDMVGIDVGIIKYAHDTDSTMVGSLDLESEYERLKREQRALSRKQEGSQNWHEQRRRMARIHARIVRKRRDFLHKLSAYYAREYDL

SEQ ID NO: 36191 - protein, 367 aa, unknown
  TnpB Polypeptide
MLKAYKYRIYPNNEQKIQIAKTFGCCRFVYNQTLAYRKEVYEKEKKSVSKTDCNNYCNRQLKKEYEWLKEVDKFALTNAIYNMDAAYQKFFKEHAGYPKFKSKHDNHKSYTTNFTNGNIAVDFEDNRVKLPKLKNVKAKLHRNFSGQIKSATISQVPSGKYYVSILVETEHVELPHTNQNTGIDLGVKELCITSDGKKYENPKIIRKYEKKLKKLQRQLAHKEKRSQNYYKVKKKIALCHEKITNSRKDYLHKISHEIISENQVIVSENLQIKNMVKNHHLAKSISDVSWYELTRQLEYKAKWNGRKYIKINTFYASSQLCSACGYQNAETKNLSVREWICPVCGTNHDRDINAAKNILEEGLREIA

SEQ ID NO: 36192 - protein, 369 aa, unknown
  TnpB Polypeptide
MSANSQIVPSKEDELLTISHKIELIPNNKAITHFKKAFGCSRLAYNWGLAKWQEYYKQGIKKSHLELKKEFNAIKKEQYPFVYEVSKYATQQPFVNLNLAFNKFFKDLKQGKLSYPKFKKKKENFGSYYIGGDQVVIKDNKYLKVPNYGLVKMREAIRFNGKINSVTISCKANKFYASFSLQITKDEYNDTHKINVNCNDDVVGIDLGIKEFISLSNGLQINTPKPLNKLNCSIIKRARQLSKKLHPKTKGEVLQGVKKSNNYLKASQKLNKLHSKISNIRSDFLHKLSSLIVRNFTYVGLESLNTQGMMRNHKLAKSLADVSFYEFNRQLEYKASYQERQNYRVGNFYPSSKNLWQLRKHKTRLNFKR

SEQ ID NO: 36193 - protein, 439 aa, unknown
  TnpB Polypeptide
MERLLTFSTIIEKEKNIDLINYFENIVKKYNYIKRVTLHILRNNPDMKENLLNRYLQNRFIITKRTANSCIKNIKGVINSSISVLKLTINNLKYKILKKERLVKNKWNKIHRIYCDRKTNTKKLKLLKFQIYNLNNAINKLKQKIIIFKNRIQNKKPNICLGGKNKLKKDTLLFLLQRDTQINYVGSSEETSGNQMFQLSYNKKINNYSIKVRKDFDNWKNSKSKDRYVYGRCYFKYKNKDLKNIIDDKLSPVSYMMLKKNNKYYLYVTITLKYENKDLLTRKHYGTLGLDFNKGFINLSETDNKANLINTKKYFYKFGVSNKTKNELYKVINKIMKYSLETGKSIVIEQLNFIKTKNNSSYNKSYNRMLHTLPYSMYSQIIENLTFNKNIELIKVNPYNTSKIAKQKFCNKMKLNIHTGASYVIARRGMGITDKYNIY

SEQ ID NO: 36194 - protein, 390 aa, Synechococcus sp.
MLRAIKVRLYPDEQQKQRLSQAFGNCRWLWNYCLSLMNETYKETGKGLSGYAVKKQIPQLKKEYEWLKLTYSQCLQQVCLNLGVAFNNFFEGRAQYPRFKSKHHQQSIHFPQNVKMLGSAIKLPMLGEVAAKLHRPIEGKIKTVTVSMNCYGQYYASILTDDGKDNPEQSVKGKAVGIDLGLTHFAITSDGSKFDNPRWLVRHERNLKCKQRRLSRRVKDSNNRNKARKQIAKIHSKISRCREDFHHKLSRRIVDENQVICVESLNIRGMVKNRSLSKAISQVGWGSFCTMLNYKAEWEGKVYIEVDRFFPSSKTCNDCLYQVSSLPLDVRHWQCSNCGAKHDRDVNGAKNIRDEGLRIISLGSRDNAYRPDVRRDSRGRKKSTVALSVG

SEQ ID NO: 36195 - protein, 407 aa, Synechococcus sp.
MLILEFKVKGKPAQYNAIDEAIRTTQFIRNKSIRYWMDNPNVTKYDLNKQCAVLAKEFPFANDLNSQARQSAAERAWSAIARFYEAVRLSAHVEACKKKVLGKKGYPKFQKNSRSVEYKTSGWKLEDNRKYIVFTDKNKIGRLKLLGSRDLNFYQPEQIKRVRLVRRADGYYAQFPVSVDRQESVMPSGKAIGLDVGLKEFYTDSNGFAVENPRFLRKGEQRLKRAHRLVSRKQKGGSNRRRAINRLGRVHLKISRQRKDHAVKLARCVISSNDVVAYENLRVKNLVKNHCLAKAINDASWYQFRVWLEYFGKVFGKITIAVPPHYTSQNCSACSQTVQKSLSVRTHVCECGCELDRDHNAAINILRLGLSTVGHTGMYALGDLTTTLAESVLSGQVESLSKESPHL

SEQ ID NO: 36196 - protein, 417 aa, Synechococcus sp.
MSMLTRRVTYKIYPNRQQEKKLHYWRRLHCSLYNAAIANRKTQYQKFHHAVDYFEQQNSLPEFKKVWPEFKELGSHALQATLKRVDFAFNRFFKGLGGYPKFKASRRYSGWTYPCGAGWQVETDGEHGFLKLSNLGRMPMRGKARTWGKPTTCTIFCRQGKWYASITVKCEPKRETEGGSVGIDLGCKEAITLSTGEQISKPDFIKVGEIAVKQASKQLRRKRAPNRNKRVKASRRWRKARRQVSMRQRKITRQREDWLHQITSNIVSGNSLVAGEQLNVKNMTRKAKKGSKRKAQKTGLNRSILSVGFGMIGSMLEYKLAEAGGFYVESPTRKLKPSQRCAKCWELTPKTLANRVHICSNPKCGHVEDRDINAAQVNLAWARGQELASLVAEPPRTTDCGSMRQLGTMKRRKLHAS

SEQ ID NO: 36197 - protein, 422 aa, Synechococcus sp.
MYRAYKYRLYPTSDQQVSLTKSFGCARWFWNYALHLCQQTYRATGKGLSRGYLQGLLPTLKKEHEWLKEPYSQCLQVVALNLSTAYKNFFEKRAMLPRFKSKHGKQSISYPQNVKFEGDYVHLPKIGAVYCRVHRPLEGTIKTVTVSRTPDGKYFASVLVDDRQEKVESGPTDKAVGIDVGLTHFAITSEGSKFANPRHFAKHQRNLKRKQQRLSRTRKGSRNRQKARLAVAKVHGKIARCRGDFLHKLSRKVVNENQVIVVENLNVKGMVRNHNLAKAISDAGWGMFCTMLKYKAEWEKKQYLEIDRFFPSSKTCHVCLNRVKSLPLDVRTWNCEGCGTHHDRDINAAINIRNEGLRILRLDSVQVLSLGTSDTACGGNVRQPGKTSVLLDAVPVESGSPCSSLGVEHQVVHVRIKVPILK

SEQ ID NO: 36198 - protein, 384 aa, unknown
  TnpB Polypeptide
MIKTHKIALRPNRDQIAWFYQQCGYAKFAYNSALSDFKTELASDNFLSMYDLNKRFNHKKKAFDWTKAQDQRAAMYAVHNLGCAIDNWREKRAKFPRLKKRGCQHSYTTDEQSVRVEGKRIKLPKIGWVRTFEGLRFVGKIVSVTISRTAHRWFASVSVEVQPPICRCPASLEFVDWFASKVEVGTPHQIERSIYPTIGIDVGISTLATLDDGRKYENPKALERYDRKLKREQRKLSRKVFLSQNWYKQKRKVERIHYRIACIRGDAHHQTTTEILKRASKIGIETLSVANLLKNRRLSKSLSDAALGGFLEKLKSKAEMLGIPIVQADRFFASSKICSTCGYKKDDLTLSDRQYHCSQCETRIDRDVNASINLRTLAVGYTES

SEQ ID NO: 36199 - protein, 556 aa, unknown
  TnpB Polypeptide
MKKAYFSERIYKNEIDASVVVRLTEQIERFNQMKRTSYQSMVKEKRTGKSSFPVSLHLAMKNLFHTNDYYANSAVREAKALMSSQNELQTLYKKQKDEKIKNTNDKIKKDGKYLKKLENTKSSFVKGKPKVQKRMGLTILPDGSVRYQKKDKILIWNNLFLFEHQFLDVQIKRIQAKLGRIRHRQQRLTEEKEKLSSTINSVVFGTKKLFKHQHSKEEYVKDQQLWREKFLQQRNKQMLISGRKDGKYGNFVFHYNPADHQLRITLDSGVVVSLKVEIPYGQKIVDDILTQQLNCKNKKLGGQPISWSVEDHGAYYIFKCLVETELNPHINFSTADGVIGVDCNVNHFAWANVTKDGNYLNSGVINFNLSGKTTGQTTKIIELEVIALVDIAVKANKPIVIEDIDTTISKTGDAYGNKKANRLKSVFAYRKMAQAIHSRANKMGVDVKEVNPAYTSISGKQKYMRKFGLSTHCSAAYTIARSGLGYKEKVPKVLRYLLNGSRERQWKQWSILNKKLNVRTVAFYEMYDVKKPTLRLNIFVPCLSSTETNHLAKTLS

SEQ ID NO: 36200 - protein, 410 aa, unknown
  TnpB Polypeptide
MAKRMFEFRIYPTIKQTNRLKKQFFLVMKLYNLLLLLGRDQYHANGENLSRNDMNHAITRIKELDTEFNKVHSQVLQNVSDRISKAYKHFFRRLKEKRMGKSIKAGFPRYKKFLKTITYPQSGFKFVSDKLLYIGKVGNVPIVRHRPVIGTIKTMSVKWTRSGKWFVVFCCDISDDPKIAEKLEVSKKEWNFKHEVGIDMGLEKFLATSDNGIVENPRFLKKAMKRIKMLQRRLSRKAKGSKNRKKGRLKLAREQERVANQRKDFHWKVAHILIATYDLIAIEGLNIKKLLKDNPLARNISDAGWGEFIRILGYLAGSAGVLIVVVDPAGTSQECSRCHAIVPKDLSVRIHNCPYCGLVLDRDINSARIILYVARRTAGLAGTYACGDVANTLWLDCKASDVCETRTIFG

SEQ ID NO: 36201 - protein, 418 aa, Lyngbya sp.
MLKAYKYRIYPTNEQKDQLIRSMGSARWFYNYALNLTSQTYKETGKGLSRNDIIKLLPGLKKEHEWLSEPPSQCLQQVALDLSSAFLNFFEKRAKYPNFKKKHNQQSIRFPQSVKLQGDYLKLPKLGKIYCKVSRLPEGTIKSVTVSLTPSGQFYASCLYENGKEKPSVKASGKAVGIDCGLSHFVITSDGSKHGNPKYYRKYETKLAKKQKQLSRKVKGSQNRNKARIKVAKVHAKITRCREDFLHKLSRKLVDENQVIVVENLAVKNMVKNHPYGFASRFKSGNPPNALAHKLAKSISDAGWGQFCTMLKYKAEWEGKVYIEVDRFFPSSKTCHVCLNQVGSLTLDVREWTCEKCQTKHDRDINAAINIREEGLRLLSQCGLDGVRRRATGVAGGHLATASGVRVRPSKGTAFTRR

SEQ ID NO: 36202 - protein, 259 aa, unknown
  TnpB Polypeptide
LNIAYRFRIYPTEEQKILLGKTFGCCRFLYNQMLNDKIQEYKKSKTMLKNTPAMYKKTYSFLKEVDSLALANVQLHLEKAYKNFFRDPKVGFPRFKSKHHSKNSYTTNVINGNILVEGNRIRLPKLKWISMKKHREPAENCRLKSVTVSMESSGKYFASLLYEGYSCENQAADKDYSNAKILGIDYAMQGMAVFSEEIELEKAGFFRKNEKRLAREQRKLSRCVKGSHNYVRQKKKVARCHEKIRSQRRDYLHKLSVSG

SEQ ID NO: 36203 - protein, 426 aa, unknown
  TnpB Polypeptide
MEQVRSEDTKAKIRASMSATKAKRKTQVCRVFELKVSVRHNPKEVFQKLANCFKEAKWVINDMLSKSKDSSMFDYKYTEHKEVTHFDKEMNEVVSTITLPSVLHRATVAQKLTDICNLSKARQAGRKIGALKYKRQVNCIPIITGFTKIIDGCRITIPGFRKLRVHGIHQLHQFEEFEIADAKLVRKTSGYYVKISVMLPKSSRKPTNREVGLDFGIKDSITTSFGDKDNCNVQESEYLKFLSKKLNRNKKQKDSKRRWRCKCQLAREYEHLANVRKDIANKIYHRLVTDYDVIYFQDEQIKNWHKGWFGKQVQSSCLGSLKQRLVALEASGRSFKISKWEPTTKLCPNCGCINPIGLGTRTYKCDCGYILDRDTHSARVVLMIGSSKRAECLEQASAEVATSMPNSTASVAQVAPSKRKLEAHTL

SEQ ID NO: 36204 - protein, 630 aa, Streptomyces sp.
MAAPFVVPGPTGVTVRTRLEHLTPEDEKVLGLVGAYLGGLASLDLKARCADGPEHSAEPWADRKRELTPLSSSRWAGSITKATHDQWALARRGQAAHVQSLEAGIRTIRHRLSLPIGEKGTKRAPGGYRSKKEWFQKSRRLHVLQDRLSVVRADREAGVVHVVRGGRHLLTTRHHLEEAHLTEAQWRERWEAGRWFLQADGESGKRHGNETIRVTPDGEVSIKLPAPLTEYANCGHGRYVLTARVSFPYRGTEWADRVEANRAVAYRIHHDTARGRWYLTAAWTVPVTRTVPLAAALAEGVIGVDTNADHLAAWHGRRKKFRHLVSGIPTGRLRARLTSMADATGITVIAVDPAYTSKWGAQHWQKPLTTKNRRTTRHDAASIAIGRRAQGHPIRRRTAPPRDDQSDRHGHRTVQARPETTGREEPRPRVPGPRTRCVPPDAASTRATRAPNTVRDARNGAGADPRPASALAQEERGRGPEYRCPGPCLPGRMPTRSPQKRLDTMSSTVELTKENFDRTVTENEFVLIDFWAEWCGPCRSFAPVYEKAAEANPDLVFGKIDTEAQPELAAAFGIQSIPTLMIVRDQVAVFAQPGALPEAALTDVIGQARKLDMDEVRKSIAEQQDKPAEG

SEQ ID NO: 36205 - protein, 454 aa, Salmonella sp.
  misc_feature (332)..(425): Xaa can be any naturally occurring amino acid
MMLILKAYKFRLEPTPEQSQRLRQLCGCARFVWNLGLAETKRILGSGEKLPSAFELNRMLTVWKKMPGHIFLQDAYTDNLQQKLKDLHTAWKRCFDKKLAAKAPVWKRKNEGRDSIRFVNFEKYCRLENRRVKLPSGLGWVKFRQSQRVNGKIKNATISQLAGQWYISFQVEVETAEPNHTSTTIVGLDAGVTKLATLSDGTVYQPVNSFKASQRKLATLQRQLSRKVRFSSNWQKQKRKVQHLHSHIANIRRDYLHKVTSEISKNHAMIVIEDLKVSNMSKSAKGTAEQHGRNVKAKSGLNRSILDQGWYEMRRQLEYKQLWRGGQVLAVXXXXXXXXXXXXXXXXXXXXXXXXXXXXXXXXXXXXXXXXXXXXXXXXXXXXXXXXXXXXXXXXXXXXXXXXXXXXXXXXXXXXXXXXXXXXXXESRSAKVGEDVNVVVAVSVLRNEYFRASR

SEQ ID NO: 36206 - protein, 332 aa, Aphanocapsa sp.
MTWEFKLEPTAEPVSEIEHILDVCRNVWNFALRERKDWLDSRKSPVNACSIQQAFLLPADAPFPNYHVQAKRLTAVKANFPRLKTVNAQVLQQVLRKLDGAWESWRLKRSGFPRFKKPNRMRSFGFPQMLKTCISNEGMKLPQLGWVKVRWSRRISDLFEVKQARIVRKASVHQRIADTRKDWHFKLAHHLCDGAGMIFGEDLDFRIMAKGMLGQYPLDAGWGQFTHQILPGVCFKREVYYGKVDPRGTSQDCPDCGAEVKKDLSIRISHCLECGSIKPSDMAAAQVVCTRGQRGIENACGVGVTGSSVMNSSPLALKQEIFGATPGSSLCP

SEQ ID NO: 36207 - protein, 546 aa, unknown
  TnpB Polypeptide
MLIQSKYTKIFHSKDLTRQKYDELYDFAVLIQNHKNTVSQYVNNNLLHFLEYNKFQFLKVMRERFKNVIPSSFDAQLYTQVFTCYQNKFDAIQRKLVFEASVFKGFEFYKRDTKNHKKCDLKKVIVEKKHTPLSNCLTYLERYGNENTLQYINSNISNCDKNKRGFYNNILRCCEKYGFERLYNLALSKRKRITKQYSEYPIEFKSLTFSGRCRKKRIIDYNSRFGSKINSFVSLSGIGRKSFDIPVTFNKGWHGNIKDYKKKNPDYEYTLTFNERGHQVNIHLCNDGERYIPQVNGNTIGIDVNCKHNLLSLSDETTYDYDRKLVNDFCKLSIEIDKLKENNKEYKVSKRKQQKLDTLKSKMVKSEQQLISTMCKTLQSQGVGHIVMEDLNNWFGKCYVKDKDNGDINYNRKVKFLGLSSLKQEVEHIARKYDIAVSTVQASYTSKMCPICGCIEDENRPNQETFECIECGHKDNADFNAAKNIRNRVLVTVLRESLLKQLGNGAFEPKNLKRDKVKEVLLSFRRSLQNVESECIESSSTTFDYI

SEQ ID NO: 36208 - protein, 428 aa, unknown
  TnpB Polypeptide
MQLTERHIITKNSPYFKEVDDLCFRSKNLYNRANYLIRQTFIETSKEVEAGVQEHALWLRYYVLDKRVKEEKWEEYKLLPAKVSQQILLLLDKNWNSFFQAMKSWKLNPSNFLSRPKLPKYKNKDGRNILIYTVQALSSKLLKQSIINPSKTSIKIKTKISQELIQQVRIIPKLGHYVLEVIYDKVAMPDKDLDINRVASCDFGVNNLAAITFNQLCLNPILINGRALKSINQYYNKITSYLRSKLPKKVFLSKKIIKLLNRREFKISNYLHHVSKFIVETCVKNTIGTLVLGKNINWKQESDVGKQNNQNFLSIPHDKLIKQIVYKAKLLGIKIILQEESYTSKASFVDKDDIPIYGSENGKVSFSGRRVKGKRGLYKTKLGVLINSDVNGSLNILKKAIPKAFDKVYGIGVFVVNPHKINLCKQFI

SEQ ID NO: 36209 - protein, 369 aa, Staphylococcus sp.
VITKKVRLKPTKQQKLKLCKSAGIARFIYNWTIAKQQENYEQGKKFIQDTVLRKEITQLKKTKEFSWLHEVSNNVPKQAVKDACNAYKKFFKKKSGFPKFKSKKKTRPSFYNDTYALVVKEKKVLIEKVGWVRTSEQLPIDTKYYNPRITFDGKYWYISISIEEENKYEDLTNESLGIDLGIKELAVCSDGTIYGNINKTIKVKKLEKRLRRLQRKVSFKYQKNKEGSTFVKTCNIIKLEKQIKLLQRRLSNIRKNYLHQVTSSIVKTKPRRIVIEDLNVKGMMKNRHLAKAIQKQGFYEFRRQLEYKCERQGIELVIVDRFFPSSKTCSTCGSIHKNLKLSDRVFKCKCGFSIDRDLNASINLANYNI

SEQ ID NO: 36210 - protein, 416 aa, Natrarchaeobius sp.
MEYSHRYPAYPTKEGAAELQHHIDIHRQAYNYTLYEYENVDADDIGSAYKHHYRLPDWKEEFPVFSEVNSKALQRTVTRFYQNLDGLSEQKQNGRKVGKLKWKSPSEFQSMTYSQSGFELKNTSGRRATLWLSKIGDFPIRYHREIPDEAAIKEVIIKKETTGDWFVSFGLETDEADLPEKPDVDSLDTSNSVGVDLGILNYIHTSDDKIVDWLDLEDEYALLRREQRKLSRKEEGANNYEKQRREVAKVKRHIRRKVLDYQHKLTTWLVCEYDAVFVEDLDVKGMLEQSHNARNKQGAAWRQFISLLEYKADLYGCHVVQVEAAGTTKECAKCNVETAKPIWVREHSCPSCGFECARDANAAVNVLERGFSELGLGWPEDTPVETALPTDTHSVSAKRVIETGSPTFSEAAVMIR

SEQ ID NO: 36211 - protein, 426 aa, Natrarchaeobius sp.
VKRSNTFDVAPRSPQDEELLSRVLDASACLWNELTYERRQRFFGELDGSVWDTPRVHGRYIGVLGSAAAKEMKHKNDEAWRSFFAAKEKGEPAGPPGYWGNEEDGRTLRWYGRCDQYTLELGDRSRLEIPVGKELKDEFGLGHTERLRLEVRGRPKWDGKPGRLELYYDELDDRFRAIQPVTTDNSRQDSPLADETAALDIGANNIVACTTTTGQQYLYEGRDLFERFRETTRTIAEHQSKVKREEGRYTSNRIRRLYRRRTRRRDHAMDALARDLFERLYEESVSTVYVGDLTDVLETHWSVRANQKTHNFWAFRAFIDRLTCTAEEFGITVEVRPEAWTSQTCPNCGSTDRTTRHQDTLTCSCGFEGHADLSASETFLRRHAADVPRPMARPVCLKWDDHRWSASPRAHRPNEEHTDQSILRSA

SEQ ID NO: 36212 - protein, 224 aa, Salmonella sp.
MKTAYKYRFYPDKQQEAFLAQSFGCVRFVWNKVLGYRNEQFEVGNKINSSTAMKYLTDLKKESEFTFLNHVSSVALQQSVRNQNKAYDNFFAKCAKFPRFKKRHNRQSLQLMANAFSIKNDEIYIAKSKNPLNITWSRPITGKISSLTISKEPSGKYYISFIAEREQKLLPVINKTCGIDIGLKDLLCFDNGEKVPDMKAYLLYEKLVLRAQRKLSPLMKDVKS

SEQ ID NO: 36213 - protein, 203 aa, Trichococcus sp.
  misc_feature (75)..(78): Xaa can be any naturally occurring amino acid
MRTKPSSRIRSSSERWNRNWRRNKKYCPAAWSKPARTARSCSRRKTTRSRNARSPVSTRISPINGTITCIKSPPXXXXKISTAVIKNHDVIGIEDLQVANMVKNRKLSKAISEVSWSQFRTMLEYKANWYGKEVVVVAKNFPSSQLCSCCGYQNKDVKSLRVRKWTCPECGSHHDRDLNASINLKQEAMRILASRTVGATGLA

SEQ ID NO: 36214 - protein, 348 aa, unknown
  TnpB Polypeptide
MILTYRYRLKATSGAAQELSRQARAVNLVWNFCGETQETARRWNRLWPSGFDLISLTHGSSRDLGLHSDTVQAVCKQFAHSRDTDRRRPRWRGRRSLGWIPFQAARAIRLNSDAVIFLKRRYRLWLSRPMDGTIKCGSFAQDARGRWYLNLQVEVAERQDCGAGEIGIDLGLKHLAVLSSGEKITNPRHLARHAGKLASAQRAGRKVRARAINAKIANCRKHFLHELSTRLVRENRRICVGNVNASRLARTSVAKSVLDASWSQLRSQLRYKAIRHGAEYLEVDERFTTQVCSGCGALGGPQGREGLVVRDWRCTECGVQHDRDINSAINILVSGRNAGLQLTEIPAL

SEQ ID NO: 36215 - protein, 417 aa, unknown
  TnpB Polypeptide
MRLVYKFNNYKHNEELFRLCRFSKDLYNQTMYIVKTNLKDGKFLFYNDLDKILKVTPNLEGEINYRKLKSQVSQQCLKLIDKNLKSYFKSIKDWSKNKNKYKGIPHLPNYLPKNGMFQLIYTNQSCSIKGGRIYFSKDLSVPIPQWEKFSSVLKNFKQIRVNPKNEYTEIEIVYETELENYDLDKSRYSSIDLGFDNLVTMVTDFSEPIIYSGKQIKSKNRYFNKTLSERKSVLEKENKKKTSKFIKRLCDKRTKETEDVYHKVSRHIVNLLTQNKIGNLIIGYNSGWKDSVVIGKVNNQNFVMISHDKLISMLEYKCRMVGINVIKHEESYTSKCDGLCLETIGRHETYLGKRKKRGLFQSSVGKLVNADVNGALNIMRKVVDDSEIVSRIINSGRLFRPLKFNNLYSLRNIEVYK

SEQ ID NO: 36216 - protein, 455 aa, unknown
  TnpB Polypeptide
MTLKIKYECDEVQEPLVSYRRQYSSCLRFAYNRFLEGKSEKEIRNLCKSLNHIETLGSWLIQSAIKESKQIQETNLNKKVIFGSRKNFLKRVKGIISYEEFQKNRLSKLYSIGEKLQKGNRIFKMKDFDTVVFQPSRTEHYTLKLKQIFRRKDILNQIYQLSNNKKISLTYSLDDRFIYITFDESQLSHFNSYKIKNRVMGIDLNPNYIGWSIVDWKSESEYNIIKSGVYIIKDLNDKEKELKKLKLSSEDPKRIFISNKRNFEMIEISKNLMNIALYYHCELISLEKLDIRPKDNNKGKKYNTVVNNQWIRNKFINNLKKRCVLNSVNFLEVAPDYSSFIGNFLFRSEKLPDMILASIELGRRGNEYYNQYITKFKDQKKNIIQPEIISFLGLYSKSLEEFGLQNQFGTDFIKLYYIITKDSKQKYRVSLDSFLNESRVLRFSSTKSFIKTISF

SEQ ID NO: 36217 - protein, 393 aa, unknown
  TnpB Polypeptide
MEYMKSALSTCDGKKRMFYEMMLGVCERFTLTRLLRLAMQRRERVIRKYSENPIEFKSLTFGGRSRKGDIIAYNSRFGSVINAFVSLSGLRRKSFDIPVKFSKDWHGSMRDYHKKINNYEYLVTFDERHREVSVLIAKQGMRYIPEAGDNVVGVDVNVKHNLLSLSNGMTVDYDRKLVADYCWFALETDRLKARDKDYHIGRRRQIKMDTLKRKMVKSEQESIAILCKSLQAQGVNHIVMEDLDNGFGKCYVKDKDNVDINYNRKVKFLGLSSLKQEVEHIARKYDIAVSIVQASYTSKMCPICGCIEDENRPNQETFECIECGHKDNADFNAAKNIRNRVLVTVLRESLLKQLDNGAFEPRKLKREKVKEVLLSFRRSLFKAGCESSSLLFG

SEQ ID NO: 36218 - protein, 388 aa, Symploca sp.
MLVLEAKLKGKQYQYDCLDEAIRTALFIRNKALRHWMDNKDVGKNDLQKLCAVLAKEFEFAKKLNSMARQASADRAWLAIKRFYHNCKTNKPGKKGFPRFKKRGHSVEYKTSGWQLGTEGKYITFSDGFNSGKFKLVGTRDLSFYSLQQIKRVRIIKRADGYYCQFCVDVKRQEEHQHSGHQVGIDVGLEFFYTDSNGDTVENPRLLRKAEKALRRQQRQVSQRKKGSSNRRKEFNTLAKKHLKVSRQRKDFVVKTARALVQSSDLVVYVSEAGRSPDLQVKNMVKNRRLAKSISDASWSLFTDWVDYYAKVFDTWAIAVAPHYTSTDCSVCGTRVKKSLSTRTHRCHTCGTVMHRDHNAAKQILLKGIHSVPQGIRYLKLVDRTTSV

SEQ ID NO: 36219 - protein, 395 aa, Acaryochloridaceae sp.
MKQKAFKYRFYPTPEQETLLRRTIGCTRLVYNRALSERTQAWYERQERVGYAETSAMLTDWKKEEDLQFLNEVSSVPLQQGLRHLQGAFTNFFAGRAKYPNFKKKRNGGSAAFTRSAFKFRDGQVFLAKSSEALPIRWSRQLPEGVEPSTITVKLSPSGRWSVSLLVEVEIEPLTESPNSIGIDLGITSLVALSTGEKVANPKGFKAKRAKLRRVQKALSRKLKGSNNRYKARLKVAKVHQEITDARQDFLHKLTTQLVRENQTIAVEDLAVKNMVKNRKLSQAISDASWGELVRQLEYKCDWYGRTLVKIDRWFPSSKRCGHCGHVVEKLPLNIREWGCPQCGAHHDRDINAAKNILAAGLAVSVCGANVSLDRGSSKEQLRKTRKGKKQKSES

SEQ ID NO: 36220 - protein, 368 aa, Blautia sp.
VRKINRAVKIRIYPNAEQRVQIEKTIGCSRFIYNCMLADKIEHYKKEKKMLRNTPASYKKEYPWLKEVDSLALANVQMHLESAFRKFFREPSVGFPRFKSKKSARKSYTTNVVNGNTFLEGKYLKLPKMAAVRIKLHRPISEKWKLKSVTVSREPSGKYFASLLFYCENQTAEKGLAEKFIGIDFAMQGMCVFSTNERAKYPMFYRHAEKKLAREQRKLSRCQKGSQNYKKQKKRVALCHEKIRNQRKDFQHKLSTSLAESYDAVCVEDLNLKGMAGGFHFGKGVHDNGYGLFLSMLEYKLEERGKYLIKVDRYFASSKICSVCGKKKEELSLSDRIYCCECGNRMDRDVNAAVNIMNEGKRIFAECA

SEQ ID NO: 36221 - protein, 549 aa, unknown
  TnpB Polypeptide
VTHLRSIALPFVVVHPAAARVRTRLRVEAADEDVLRVVGRHLGSLAGEDLAQRCREHKLSAKQRAQSRRERKRAITAASSSRWAGAITRTSEDSWQLAWRNLVAERRTLASRIHRIERRLTVPVGERRGFKTRQESYEKRRRLQHLRTRLAGVERRLEDGRVSICRGGSRLAKARHNLDAAGLSEAAWRERWEAERLFICADGEAGQLLGNLTVRWHPDEHWLELRLPKALEHLANRPGGRYRLSCPVVFAYRGEEVAAQAESGAVRYDVFFDPGKHRWYLDASWSFSDGEPRPDMEHLRSGPVIAVDLNHGHLAVCVLDPSGNPIGAPVSVPLELTGLKASTRDGRIRQAISCVLALARTHGAGAVVIEDLDFVAWREEGRERSGRRPSRGKRAKGFRRLVAGLPTGKFRDRLVQMAANNGVAVIAVDPAYTSRWGAEHWLEHLGQISPEASGHHAAALVIGRRGLGHRARRRERCDSTRAVHRDERAADSVVSGDRRPHTEPEDREAGGQPRSRQRTLPGERAPSGDEATEDRSWSPAGQESVLLSV

SEQ ID NO: 36222 - protein, 549 aa, unknown; identical to SEQ ID NO: 36221
  TnpB Polypeptide

SEQ ID NO: 36223 - protein, 369 aa, unknown
  TnpB Polypeptide
MKTIVKIKLLTDEIGKKRLLDTMEAFNQACDYIAISCFEQQSASKFRIQKLVYHDVREKFGLSAQLTIRAIAKTCDAYKLNKKVKCEFKKHGSITYDPRILTFKGLHDLKYPQVSLTTLDGRRSFNIEIREYFAGRVSRIQGQVDLIYKKGEFYLYATCDMPEDTPISPDDCLGVDLGVKNIAVDNTGKSFSNDKVEACRVKTLKLRSNLQSVKTKSSKKKLKEISGKESRFRTDVNHCVSKHLVEKAKDTNCSIVLEDLTNINKRTTVRKKQRAERLSWAFYQLRSFIIYKAKLAGVPVILIDPRNTSRTCNCCGHCEKANRKNQAEFVCKKCGHNENADLNAAKNIRIKGLHQSTYSRPLSDLLKVA

SEQ ID NO: 36224 - protein, 394 aa, Caloramator sp.
MIKTYKVMLLPNNKQKTKLFECASVARWAYNFALEQEQINYKNGSRFLDDKELRKRLTQLKQTEKYKWLNSYSNNITKQAIKDACIAFKNFFEGRSKFPKFKSKKRSKQSFYQDTDKIVITETQVKLEKLATSKKKNKQKLNWIRLAETNRIPIGKNIKYSNPRVTFDGLNWWLSVGVEIQETVDRNYTEGIGIDLGVKDLAIVSTGEKFKNINKSNKVKKLEKRLKRLQRKLSKKYEINKIQIEGGEIRYRKTKNIKKLEFLVLKTRRRLKNIRHNYIHKITTSLVRTKPEYVVMESLNTCGMLKNKKLSKSIQEQLFYEFKRQVEYKCALSGIKFILVDRFYPSSKTCSKCGHIKGNLSLTDRVFICDECGYIIDRDLNASINLKNYGKSIA

SEQ ID NO: 36225 - protein, 367 aa, Acetivibrio sp.
MLKAYKYRIYPNNEQRAQIAKTFGCCRFVYNHTLAYRREIYEKEKKSVSKTDCNNYCNRELKKNYEWLKEVDKFALTNAIYNMDSAYQKFFKEHAGYPKFKSKHDSHKSYTTNFTNGNIAVDFENVKIKLPKLKEVKAKLHRNFSGQIKSATVSQTPSGKYYVSILVETEHEELQHTNHNTGLDLGIKDLCITSDGKKYENPKTIKKYEKKLVKLQRQLAHKEKRSQNYYKTKKKIALCHEKITNTRKDYLHKMSHEIISENQVIVSENLQIKNMVKNHHLAKSITDVSWYELTRQLEYKAKWNGREYVKIDTFYASSQLCSTCGHQNTETKKLSVREWVCPVCGTKHDRDINAAKNILAEGLRKIA

SEQ ID NO: 36226 - protein, 232 aa, unknown
  TnpB Polypeptide
VILYSKKVTVKADRYYVSVLVEIPDVKIANNSNGGIGIDLGLKDLAIVSNGKTYKNINKSTRIKKLEKKLRREQRCLSRKYENLKKGESTQRANICKQKLKVQKLHHRIENIRTDHINKVISEIVKTKPSHITIEDLNISGMMKNRHLSKAVASQKFYEFRTKLKTKCAEYGIELRVVDRWYPSSRICHCCSCIKKDLKLSDRIYRCTCGYIEDRDLNAALNLRDAETYEVA

SEQ ID NO: 36227 - protein, 401 aa, unknown
  TnpB Polypeptide
MNVNRVERIWMKPNDTIGELCHLSKNLYNQGNYLVRQSLLKNSKWMRYVKLYDELKLSSNYKELPSQTAQQTLKLVDKNWTSYFKSHKEWKRHPEKFYSEPKLPKYLDKDGQYILKFTNQQTYIENGKVKFPKVIDLDITTRLSDDTDLQEVRIVPKGVGYVMEIVYGKEVPKVKGKPKRICGIDIGSTNLVAIGNNIGLKPIVIKAGVAKSINQYYNKERARLDSVYAKHKIGWGISGQKLTNKRYRKVTDCFHKTSRLVIDWCLQNKIDTIVIGHNEDWKQNINLGTRTNQNFVQLPFNMLIEQIEYKGEDAGIKVIIQEESHTSKCSFLDNESVKHHKKYKGKRFQRGLFRSMKGTVINADINAAYNIIKKAIPKAFKREMWDGIEGVALHPEVLHYV

SEQ ID NO: 36228 - protein, 403 aa, unknown
  TnpB Polypeptide
MEQTLTFNLAHTIRLYPNKAQETFFRKACGCARVAYNYGLSEYQRLKKEGQKPDILEIKKQFNSNKKILYPWMSETNKDANQQPFANLQSAFNRFFKKTAKFLTFKKKGRKDSFYISNDKFGVEEKKFWIPKLGWVKGAEELRFKGKITSATVKRKADYWFVVISVETENTHTACDNQAVVGVDLGIKTLATLSDGKVIEAVKPLRSKLERLKRLQRWASRKIKGSSNRHKANRRVAKVHYEVACLRKDVLDKLTTYLCESSQVICIEDLNVSGMMKNHCLALSIADCGLGEFRRELEYKSVLHGNTLIVVDRWFPSSKTCSGCSAVKETLLLSEREFVCESCGMVIDRDLNAAINLRNYGLNKLRAVSPEVTPVDKKALVFSNENETILDETGISECSVMST

SEQ ID NO: 36229 - protein, 257 aa, unknown
  TnpB Polypeptide
MSKEKSTHIRTQQIVIRKPHEAFRGAGVCTQIVRRIKNATSYLMQHHPEGKDQTLSHRDADKWLKKNNRELYAKLPPVKTQFRFSQNWNALVGDTVALEVRIVPKGNCFIIELIYDESKIVEAGRFCRLLDKSRKAGIDLGINNLIALATDQPGVRAVTNKRHRRMKDLLHRASSKVASKMALWRPKAVRSCSMSRSSTASEPGKVPLGIKALRQAMEVGRYFFQSLVTIACFRNAFQAFILGTGSKGSDDLLNGFG

SEQ ID NO: 36230 - protein, 476 aa, unknown
  TnpB Polypeptide
MILEFVNARVVTSFHRKFTLYKRLTPIWSSRNIINMNNEKSTHIRTQQILIRKNHEAFRGASVCTQIVRRIKNATSYVMQHHPDGKDQMLSHRDADKWLKRNNPELYTKLPSAIAQRSTQIVGQEWKAFFAALAAFKKTPSAFKARPQKPRYARKAATVHIGRNGFKFVDGTLYFANGVLPPIKTQFRFSQKWNASVGDTVALEVRIVPRGNCFIIEIIYNESKIVEAGNFCRLLDQSRKAGIDLGINNLIALATDQPGVRPVLINGKALKSINAWYNKRVAKLRSQGKYAHIRAVTNKRNRRIKDLLHRASSKVIAYCLENNIGTLVIGYNKHWKQEVNIGRVNNQKFVGIPHAILISQIQYKCQSLGITTVIQEESYTSKASALDNDFLPVYGEKPKNVLPLFSGKRIRRGLYQSKHGIINADINGALNILRKATGEALGLACKGCVSNPITMDLLPRKSVVIRRENTAQPMAA

SEQ ID NO: 36231 - protein, 475 aa, Chloroflexi sp.
MGQATRTTKLLLDLGKRDQGGANTDKQAALTATVEVLNRARAFYIHFFLAHPDKLAERVSYFSEKHQEERERLISPNELLTWAEALTVSTRSHPHPLPSYNFSDQFPEFPFIYRRSVIKDAIGKARSYLSHLTNWKASGKNKGQPGLPGATNHPTLYDEAFRLDLDGTDLRPNPRTCFARLKIYTGTAWEWQNYPVNLNRYFEARWRDPAWENQSPKLILRKHSAALHFPQVKEVKAKKVKESKGDPHLVTVAVDLNVKNLAVITVRQDGRIIETAFVTDHGLDRHRYGHLKCIAKKQWQSGTPVKGEHSNQQIWRHVRRMNEDAADKVARIIADVCAKYPGCVLLFERLRKIKPTGRSKSARMNRRQANQLRGKINNSSKDKTYAVCSTVTVEVNPHGTSQYCSRCGAKGERFSHRGGKRITEKWGKLFFCPVCHYVANADFNASVNVHRSFYREWHWKPRDKPPRHRLLESQP

SEQ ID NO: 36232 - protein, 166 aa, unknown
  TnpB Polypeptide
MYNFYIAHNKELYYKGIGIDLGIKDLAVVSDGTKYKNINKSYKVKRLEKQLKRQQRSLSRKYENLKKLKKGEATQKANIRKQMLKVQRLYHRIDNIRTDYINKTILKIVKTKPSYITIEDLNVKGMMKNRHLSKAVAGQKFYEFRVKLKKKCSENYVIVVVLLRRT

SEQ ID NO: 36233 - protein, 393 aa, Lactobacillus sp.
VFGLGGEAMIKTQVVKLKVNKTMQKHLDALCDYRRYCWNKGLETWQLMYEAHTLTTKDNPSPNERRVRDELVAGKADWQYDLSARCLQLAIKDLANAWKNFLDKAQPDWGKPRFKSKKAPRQGFKTDRAEIVNGKLRLDKPWSIAKDNWFDLASYEALKMRKVKIASIFKEKGLYYAALTYEENIPAKAKTHKKTAIDVNVGHFNYTDGLINVLPVRLQKLYKRIKHYQRMLARKREINGKLATKTNNYLAVRAKLQRDYRKVVNIQNDLLQKFTTRLVNDYDQIVIEDLAVKEMMMTHVASKGMQRSLFGKFRQILTYKCDWYNKELILASKMYPSTQRCAKCGYVKKGDEKITLQGNQKHGTKHNEYICYRCGYTNDRDENAVLNLLALAK

SEQ ID NO: 36234 - protein, 464 aa, unknown
  TnpB Polypeptide
MLARHAGASRFAYNQCLRLVLDALEAKRVDPQFPVPWSRFDLINGFNAWKRSQAAGRIFVAASDGTVSEQITGLAWRHAVSAAVDLGRALAGYRDAKTGMRKGRRVGFPKNKRKGRCRDSFRLRNKRSKDGRLTIRIGEVHPRSLILPKIGAVRVHDDTRRLRRLLRPVEHLDGDTGQSRVAPRAKVMFATVSRHGSRWYVSLNVRAPDFHPERRHRPGLVEHRAHFVGVDRGLAAFAVVATADGTEVGRYDSPKPLQQGIASLRRRSRAAARTRPGSRNRAIAVRRLSRQHARILNVRQTFLHEVSSQLVQTHHRLCLEDLAVANLVSNRYLARAIADAAWAEFARQLRYKAEWFGAELAVSNRWLPSSKTCSKCGRVNQQLRLAERIFRCDACGLSVDRDRNAAANLAAWAEAADTAGAQAPDRQAGGRATNALGGEGAGHRHGDGESVPVELGTDAHAVVA

SEQ ID NO: 36235 - protein, 390 aa, unknown
  TnpB Polypeptide
MRRSFKYRIYPTRGQAQRAEACFSDHCRLYNAALEERRGLWEWNQKSISFYGQSAQLKYVRTDDPDQSRWSARSQEATLKRLDRAFQAFFRRVRAGQTPGYPRFKPVQRWDSVTWPSDGDGCKWKPDYSQVYFKGIGVLKVMMHRPQLGVVKTLTLKREGRQWFVVLSCDDVPARPLPVTGEDVGVDVGVARFVTLSDGQIVENPRFTRNAAVELAEAQQTVARRVKGSQNQKRARRKVAGIHHKTRRRRLDFHHKTALKLVEDYDVIVLEDLKITNMIKRAKPKPDPKAPGQYLPNGGAAKTGLNRSISDAAWGQFTSILEAKAESAGRRVMFVNPAYTSITCHICGLKGERPQQDTVICPVHGPLDADLNGALNILSRAGLGSVLTQA

SEQ ID NO: 36236 - protein, 343 aa, unknown
  TnpB Polypeptide
VSSYQTRLAQWKAKPGQKGRQPGLPKAGRSFPVMYRDNTFIRAGRNSVKLKVRIRNTWDWVDVELDKHDVDYIALHCAARNELSPALRKRGKKWYLDFSFEEKVILDKVSLDTQRVLGVDLGINNACVCSVMDSKGTIIGRRFKKLPVEQDSLERALRRIRKAQSNGAKRMPRLWARAKGVNKDIAVKTAGFIMTVANEFKVDVIVMEHLDLAGRKRGSKRQRLHHWRAKYVQQIVEHQAHRCGTRIRRVCSWNTSKLAFDGTGDVTRDTDNYSMCTFQTGKRYSCDLSASYNIGARYFLREYEKSISATRWRCIAAKVPSCAKRITRTLDTLIRVNAELRSM

SEQ ID NO: 36237 - protein, 381 aa, unknown
  TnpB Polypeptide
MLRATKFRLYPTPEQEKFLWGQWGAVRFVWNKALWLKRRFWKQKGESLSVIMDLKPLLAVAKKSKKYAWLKQYDSMALQESLRHLDGAYQRFFKHEAGFPKWKSRRGEQSSYHCVNVSVGEDWIKVPKISRIKAVVHRKVEDKVKSITLSADTAGAYYAAVLYDDGLEEVTPVVDVYEDQVTGIDLGLKDLAIESNGTKEPNPRHLKKAEKHLRRVSKKFSRTKKGSRRHGKARKRLAKAHKRVANARNDRLHKISKRLIDENQAVCAESLKIKNMQKNRHLAKAIADAGWGTLCRMLDYKAKRAGKRFVQIDTFYASSKTCSVCGHKLKELSLSVREWECPHCHARHDRDVNAARNIRAEGIRKMKAEGQSVLKRTATYA

SEQ ID NO: 36238 - protein, 318 aa, unknown
  TnpB Polypeptide
MRLVYKFYIQHTEQLDNLFRISNNLYNQALYHFRQRLDADGTWLWYNDMYKLMKQALNLEGQCNYKLLKSQCSQQILRVLDKNMKAYCKSIKGWKTHKDKYKAMPQMPHYRKRGGMFNLYYTNQSCTIKEGVIRLAKDLSVQIPQWEKCGGSIKSFCQVRLIPDNRNIKVEIIYNKEIKKVDIDKTKYAAIDLGLDNLATMVTAEDCTIWSGKYLKSYNNHFNKTLSRLQSIKDMQGMKRTTRRINLMYDKRDRYIEDAFHKVSRQIVDTLVRKKIGTLVVGYNAGWNRMPTWARGTTKSLFRCLLRDWLAISVTSAR

SEQ ID NO: 36239 - protein, 730 aa, unknown
  TnpB Polypeptide
MNAENEMVDPNRPYTVGCRLAHLVPDRTHAAAIEDAVTRVHRATFLATELANLHLRRCLEDHTAVEELFSANWLTNIYNEVTVGQGNPRVIAALRQTKAQHMPTFVPPSRTGLSQCIMYECRNLAAVAANNVWMHFSKRVRTHVRHCLALDETAYAALTKEQKTARRLLLLQLVRDILRNPTEAHAAPTVHHPWITTERATLGIDTAVGQWDDKPILYHLKAHPHRFVAAMAHMSTVREQGGGRAFALFPLRRTYTPRHVRFDQHALRELLKLGGSEHRKKKQRKAKTCSETSDPRPDEFDLPPLQCAHHTAPMQSNPAQDEGDPWDLPPLQCSHQSEHILADLAADEPELPPLQGSQQDLIQASLLCASSPETPAAVMPPLRAKRTRRSRTELVGEKAELFHRVLDLRAANVHRRHHFEFAFTTDGVCARLAMKAATKAHVTPLAAMPKRGMWSIDELKRVSRLEQLHVVGVDPGKRELVVGVDMDDPNACTPVRYTQRQRQFETCSKQYAHEGKRDKPLVVCQAEEELCNYRSRSADLATFEAYCAKRREGFERALCFYGDLGHRRRRWKTVIKAQQSEARLYRRFEALRKPDRPLVLAYGAWGLVAGRADMACNKGNAPCIGVGLMRKLARRFVVAPTPEAYTSKTCCKCLGECGPWAAMEEQRGKRIRGLRLCQTENCRLRINRDRNGATNIGTNFKRLFEGQGTIRALSEDELQLHRLQSVFDVS

SEQ ID NO: 36240 - protein, 377 aa, Salinibacter sp.
MRKTYKYRLYTCERNKHLVESIELASVVWNHFVALTRRYYEIYGEYPGYYALKKHLTKLKQRDKGHWYDLNSQALQNVIERLDQAYQRFFEIDSAGRPGFKKREKYTSFTLTQTGWKLLGGNRVRIQNHNYKFVKSRPIKGEIKTVTIKRDACGYLWICFSVEKEPPTPELPRTGDAVGLDFGFKDFLVTSDGDRIQAPEPLQESLEEVQDLHKKLSRKERGSNNRKEAKRRLAKKYRQIDNQRKDFHFKLARRLFSRYDVVCIEELNVGAMKELWGRKVSDLGFASFVKILEHVAQKEGKEVRKIDRWFPSSQTCSDCSHRYEDLSLEERTWTCEECGSLHDRDLNAARNVLERALSSAEAGVRPSGAAARVARSS

SEQ ID NO: 36241 - protein, 423 aa, unknown
  TnpB Polypeptide
MLKGLNIRIYPNVRQTRVIERTFGCTRFVYNKVLGMKKELWEDYRLSFNPKIKSLKEEWNFLKVVSSQSICNSYNDCMNSFKNFFNAKSGKTKNQQNFPKFKKKGKSKDSFRIGCTYPSKLKEPNTGDIRIVDRNHIKIPSLGIVQFANYNNLDWKTVHINNVTISKSHCGNYYASICVEMEEPEYKEPKFYATGFDLGLKDFALFDDGTVIDNPKFFRKSQKKLAREQRLLSKMEKSSKNYEEKKLKIVKLYEHIKNQRKDFQHKISTRIVNENQVIVSEDLNVKGMLKNHNLAKSIQDASFSSFCNMIKYKSEQKHRIYLKVDRFFPSSKLCHHCGYKYTGLKLDERFWICPICGEKLDRDENAAINILNEGLRILKEKYPDGTGESGTHVPKPIDTGLATNLESELLIKDLYRRSSAIAE

SEQ ID NO: 36242 - protein, 510 aa, unknown
  TnpB Polypeptide
MAKATTTIRQCLNYQAHYAAYFAATQSLFNRVVAFYFAVIAAHEGVLDLPTKEALTALEKLTHVTKKNPSPVLPLTAIAEAIPAFFRRAAINAALGSARSFSSALKAWRRRKEQHEAKLPRKGKKQQAFSERPPVPPRSWNKSVPLYAGMWKERTGSSILLKVWTGTCWSWVKVRTCGRELPDGSQMQSPVLVRRGTQWWLHTSMEKTFTSPPTIAEHLTNAQTRICAVDLNLDQHVAVCTVQTVAGTILATRFIGEGRAIAGFRKRQLGRIARHRAQTGVIAEHEQDNADLWRKIRHRDEHVAHLVSARIVQFACEQGASILVFEHLGNLRPEKGKYSHRGNSKRAYWMKGRIFTYAKYKAWTQQIITSRVNPRNTSRACHRCHAPVIRYAQGHPIAGYTRGAPLVLCPACSMRGHADRNASLIIGQRLIARSQDPCKEKPHALAQRAKRESRDSGVGISQDAKRTSRPSTDDARRGECPNGHGTAQEGRLWMDEHPSAIPTQLRVCNE

SEQ ID NO: 36243 - protein, 400 aa, unknown
  TnpB Polypeptide
MTFRCYPTDRQVRQLAREFGCVRHAYNFALRLRTDSFKAGKPVNYNASSAAWTKHRNDGEFAFLRESSSIPQQQALRHLQTAFSNFFAKRTAYPKFASKHGKQSAEYTVANGFKWDAANRNLTISKVGRLHVKWSRGFTSKPTTCTITKGSDGRYFVSLCLDEPAKAALPKTGSMAGIDLGISRLATLSTGERIANPRHTARYAARLARLQRVLARRVKGSGRWNQQRLKVARLHAKIANCRKDTLDKLTTDLVRRFDVLAIEDLNVRGMVKNHKLAKHINCAGFGQFRSMLTYKCAWYGRELRVADRFFPSSLRCNSCGHIHGSLGLEVREFNCENCGEHLDRDQNAAKNILQFAGVSLPTTAGQAGSKGHGERVSRVKASASARNAHRSVNQPSSANV

SEQ ID NO: 36244 - protein, 400 aa, unknown; identical to SEQ ID NO: 36243
  TnpB Polypeptide

SEQ ID NO: 36245 - protein, 390 aa, Virgibacillus sp.
MLAKKAYKFRIYPTKKQMELINKTIGCSRFVYNYFVGKQKTKDAYWHIANEMVQNGQLTENNWKGEFFNKNQSIKAVRELKKHYSFLKEVDSIALQKSVEIVNDSYTRYYKKQNGEPRFKSKKNPVQSYTTKWVNGNIAVLDKHVKLPKLGLVRFAKSREVEGRIMNATIRRNPSGKYFISILAETEVEVFEKTGSAIGVDVGLKDFATLSDGTVYANPKFFRSLEEKLVRAQRVLSRRKVGSSNWKKQKTKVARLHEKIANARKDMLDKISTDIVKNHDIIGIEDLSIKNMLKNQHLAKAISEVSWSEFRKMLEYKAKWYGKQVVTAAKNFASSQLCSNCGHKHKDVKNLALREWECPMCKTHHQRDINASINLRNEALRLTAGTAGIA

SEQ ID NO: 36246 - protein, 471 aa, Virgibacillus sp.
MVYKSHNKTPSFIATIRLLVNSVQEKEILVISECARQIYNSCLAEALKRLNQVRRTNLYKETVKLSKTNKKDKKLRTNNFKYLNKKFNFTDLSIEAYATKTRNASKYINKHLGSPICQKIGLRAFYTAQKLSFKKIKKVYFKSKAQFITLEGKSNSAALRYKEGYVFIGNLKLKCLFKKNDKGLKYALKHRIKYCRLICKRIRGKNQFYVQLTLEGIPYQKYEVGKGEAGIDIGPSSIAFVHEQYAFLKEFCDNIVYLDKEKKRLQRMQERRRRRMNPNNYRDDGTCKTGKLTWNYSNRYIKTREEIAELERVYAAKRKQLHEIDANLILSYCNKVLLERLSYKAFQKRYGRSVGRKAPSKFVAILKRKLEAQGGTVQEVSTYKTKLSQTCQCGTVKKKPLSQRWHICECGVISQRDLYSAFLLKCVTESGDLCFDEVNKKWPSIEPILIQAIERLKETKEYNKILSSFGI

SEQ ID NO: 36247 - protein, 378 aa, Microscilla sp.
MLQVVKTYKYKLRNLSVAQTQKLNSWVGACRFVYNLALETKQYVYKAYGVNLSRFDLDKELKTLKDVEWIKDVPSQSLQDVLQRLEKAYQSFFKGGGFPKWAKKGKYNSITLKSVNWDNCEKGRFVLPKLGEVKTFYSREIPKEAKLRRATIIKESDGFYISIMFSTTIQPLPSNNQTVGLDWGVEHFLTTSDSEHIANPRLFQRYQKKLRVEKRSLSRKKKGESNFKKQARKLAKLQTKIARIRNDFQHKISTGLILKYGSISVENLKVRNMTGSAKGNAEEPGKNVKAKAGLNRAILDTAPSMFLDKLEYKSKWHGRTFVKINPKHTSQICSECGHKDKESRITQAKFVCSSCNTELNADVNAAKNIEARAFASIR

SEQ ID NO: 36248 - protein, 587 aa, Streptomyces sp.
MADLRPIDAPFVTPGPSGVAISDRLRGLSPEDERVLRMVGAHLGSLASRDLKARCTDGLGHSTETWASRKRELTAESSSRWAGAITKATHDQWALARRGQAAHIQGLEAGIRTIAHRLSLPIGEKGGKRAPGGYRSTYEWFYKTRRLHVLEDRLAAVRADREAGVVRVTRGGKRLVNTRHNLAAARLTETEWRERWEAERWFLQADGESGKRFGNETIRVTPDGEVSIKLPAPLAEHANSKHGRYVLAARAHFPHRGQEWADRVEANRAVAYRIHLDVTRERWYLTASWALPVTELIPIETALADGVIGVDTNADHLAAWRLDTHGNPVGQPRRFSYDLSGSADRRDAQVRHALARLLNWAKGCGVAAIAVEDLDFATEKTREKHGRKRRFRQLISGMPTSRLRARLTSMADATGIAIIAVDPAYTSKWGAQHWQKPLISKTRKTTRHDAASIAIGRRAQEHPIRRRTTPPREDQSDRRGHRIVQAGSLTPGSEEPRPRIPGPRTRSVQPDAESTRATRTPKTVRSVRSDQVWVQDSLLLTDEERCVGGPPPAKQAGQVRQVRRDVGRPGPAGLPRPGPLTSSASCR

SEQ ID NO: 36249 - protein, 378 aa, Clostridium sp.
MIKALNIRLYPTQEQAALMYKHIGCMRFVYNWALARQIDSYKHSGKKISVSELGKELTVLKNTEGYEWLYEVSNATLKEGIRDLDKAYGNFFKGRGFPKFKSKKKSEPKFYSRYEKVYFKDNLVNLEKIGKVKCKVDYDIDLTTIKKFKNPRVKFNGRVWVLSVGIEIPAKKVKLNDFSLGVDLGIKQLAITNIDNLDTLNINKTNKVKKLNKKLKRLQRQCSKKYIMNKKGGSYQKTKNIAKLELKIKKLHSKLKNIRLNHTHQTTSKMVKAKPYRVVMEDLKVSNMIKNKHLSKAISEQGFNIFINQMKYKCQKYGIEFIQVPTFYPSSKTCSHCGTIKKDLKLSDRTYKCDCGFTCDRDKNASYNLANYGLEISI

SEQ ID NO: 36250 - protein, 364 aa, unknown
  TnpB Polypeptide
MLLSPKEQKIFSVWFYVCDYYYNLGIKYYKKNKGINLSSFTFRDLIKKEGNKNKEIRKQIKKFSIPSHVINDYILDVYKAYISAIKAVGSNKCKTKHFRLRYKKHDARRKTIPIPYEKNGNSNYFSRNKLWKNIKFEGNFKVSEINHDCRFQYDRLLGKYYLFVPYDKKCSNEHSNNLIALDPGVRTFLTGVTNNYDFYELNISKKLDKLLSKISKKDRLFRSDKAKTKFKRKINKKISNLVDDFQWKTCKYLCSNFNEILIGKINTISILSKKNNCLSPETKKKLQTLSHYSFRQKLKSKAEEYNNKVYEIDEAYTSMTCFNCKWKNKKLGGNKDFHCDNCGITVSRDFNAAINIREKHFKRF

SEQ ID NO: 36251 - protein, 388 aa, Megasphaera sp.
LLRQMTEQYRQACNFVSQYIFDNQFDLTYQSLNKKLYSDLRGLFGLKSQLAQSSIKTTIARYKTVKQQLFQNPYRYKDEDGRWQRIPKTLEWLWNPVFFRRPQADLVRNRDYSFVDDGQVLSINTLGKRTKCTFEGEHFAGYLNVSYQLGTAKLVELKGRWYLHIPVTKAVEDFQKECVRQVVGIDRGLRFLAVSYDEQGKTKFVSGKKIATKRHKFQEVRKQLQAKGTKSAKRKLKAISGRENRWMSDVNHQISKTLVQKYGKDTLFVLEDLAGVSFEESNLSRTAKQNYDLRSWSFYQLEQFLTYKAHENRSEVLKVSAKYTSQRCPKCGIIRKANRDHHKHLYSCQCGYKSNDDRIGAMNIQLLGTMWISGDTHPRYERVTTTLE

SEQ ID NO: 36252 - protein, 533 aa, unknown
  TnpB Polypeptide
MSAADAKVLEAAGKHLGVLAGRDLAWRCSQGRLDAKASSQSRVVRKQALTATCTSRWAGAITRTSEDTWGSAERNLLAEQRSLRTRVGRLRRRLAIPVGGRQGRARGYATRGERWEKQRRLQVLETRLRVVEARLTEGTLSVCRGGRRLARARHNLQAAGLDEQGWRGRWEAARWFLTADGEAGKRLGNETIRWDPAAHTLEVRLPEPLAHLANADHGRYRIGQVRFPYRGEEVAAQARTGAVRYDITYHPGKDRWYLDASWKTVPQPPVEFRQLRRQPVVAVDLNAGHLAAVVLDRSGNPVNGPWTIHLDLAGVAASVRDGRLRAAISELLHHAERHGAQAVVVEDLDFADARDEGRERSGRRPQRGGQGRAFRRQVAGIPTGKFRRRLVEMATNAGLTVIAVDPAYTSRWGAQHWLHTLKQQSSSDVTGHHAAAVIIGRRGLGQRARRWERCDRTLPADGERRATNPAVRPTPAAAGLPAPRTRNPGDHKAQGQPHPRHRTRPADRAPPGDQATHDRSGPPTKQGSFLLGA

SEQ ID NO: 36253 - protein, 431 aa, unknown
  TnpB Polypeptide
MKLTFVYPMYPTKTQEQKLLLWFDHLCELQNSARHDRLVAYETEGIFVSLSDQQTLLTAAREKYDDFRAVPQDFQNHTLRRTDKAFAAFRKRCKNGDTQKGYPRHKRRVRSLTWSLRKYTKVVRQKTKNTDKQTIRIHENPIIETTFRHNRLKVPKLGEVKIRMHRPLQGDPKEVTLVKKASGWYAHISCEIPDTPKVEPTHAIAVDVGIAHYLTTSEGEKEENPRWYRQAEGLLRKHSKDLSRKKKGSNRRKKQQHKLALHHERTTNKRKDFIGKLVYKLYHHQKNNVLVSEDLSVSNMVKNKHLSKSISDASWGTFFQWAGNIAERDGFHFHRVNPKETSQTCSACGEKSPKKLSLAIRTFDCSFCGTSLDRDHNAALNILLRAACAHRGERWVPELYEARNTNKARDSGLENTRQLLLFDGLLTSQSL

SEQ ID NO: 36254 - protein, 316 aa, unknown
  TnpB Polypeptide
LFIFTVVTDNPVVQFSGDYVIGVDVGINNYATVVVRDVKTGRIAHETTLSQRVHSLWNSVRASEQQVRDLRKKAATLLHNRQERMAALDEARLHREAASRKKRELAILAAQEIAYLSHVWDNAVVAVEYLGWVANTMQRGRWNRGALVQWLTHYVSQNGGWVVSVNPANTSQKCHKCGAKVSHPTHKDSVCHEHGVMDRDVNAAANIAARAVPRVVKARLTRAKNRKLQPQTVLRTPPARTSLKYPGRDRTKSKPTPKRKKRRRVSREVILPVCPARAQAPRLEASILADQGAMCPWGPARRHSNKETRTINVGFA

SEQ ID NO: 36255 - protein, 442 aa, unknown
  TnpB Polypeptide
MKVTRIIKSKNLNRGKYKQLEEQAKQLGQIRSDIWHGYGSIKGVSIKNDRKIRDLWLKEKRKFKVSANAWKETLRDSFGDIKANRSAAKEKVRKVIYKQISNEKQRVDFYKKLKYDNWTSNNYLRRLMRQYWKHGRNHTNNQIVVRSDNYKTFQLGGHAWIKIPGLERGKRIAIPLNTLVEPNGTLRLILKEGEVEVHYTIDLEETHYCGTATIGVDKGYTEVFVDSDGEHYGDGLGKILTHHSDKLKKKYQARNKLRVITNKKPHKRQNIIKNNLGRQKLNRQNQKVQSQIKDTIYQATHKLVDKASVIAAEDLTSAITSKKFGKNVTRRLSAWTKGVIAKALDMISRRRGSSVILVNSAYTSQMDSRYGILKGKRSGDSFYCFDGVVLQADENAAQNVLARLHDSEIDRWTPFQKVKSILLERTERLRLGLLNQDSSCSS

SEQ ID NO: 36256 - protein, 381 aa, unknown
  TnpB Polypeptide
MKDWWPDLKQVYSTVLQKAVERIRDNIQNLGKLKAKGYDVGSLNWKKPREYRSFTYRQSGFELDKKSGPDGRGLLILKKLKGETREIPIRLHRDLPDHEAIKEVALKKEPTGAWYVSFCIKTEAPEKPAIGDIDPEDTVGLDLGILSFIHDSDGRSVERLDLSDDRERLEREQRSLSRKDYESNNWEKQRRRVAKVHARMSNKKRDYKHKLAHFYTTAYDAVFAEDLNVKGMLESSQNARNKAEVGWRDFITILEHHGEKNACHVVEVDPRGTTKECASCGVSTWKPLWVREHSCPSCGFELDRDWNASLNVLSRGLEKLGVVHSEETPSEPAGSDWLGKSPRDFRTPVETAVTVDTANVSANRVVETGSPALKEATPVAE

SEQ ID NO: 36257 - protein, 396 aa, Cyanobacteria sp.
MITVTYEYKLKPSAQQIETFESWLDACKKVYNFALRERKDWVNSRKSAVNSCSLVSEYIIPADAPRPTYASQCKALTSAKKMYPSLQLPHIHVLQQTLRQLEAAFVAMWERGHGFPRFKKKMRSFVYPDVKQNAVEPGRVKLPKIGWVRMRMSRPLPVGAACPKGLGFILKQIRVVKRVSGYFVMLNYQLGVQVPDARVHGHFLGVDIGLDKYLATSDGELVSRPRFFNALQGKLKLLQRRLKHKKKGSSHWLKLQKKIARIHQKINDTRKDWHFKLAHHLCDQAGAIFVEDINFKAWAKGLFVKHTLDAAYGQFFKILSYVCWKRDVFFLKVDKDYTSQICPNCGTHTGKKDLSERIHRCDRCGYITNRDVAAAQVIRDRGASAVLALCVEEHLA

SEQ ID NO: 36258 - protein, 664 aa, unknown
  TnpB Polypeptide
MAKRHEPETGKEKQSINKKKKKQKGKRRETCVKTALASRCHPLVREEFENRSTFLSYLRWRADLLLHLYLRWCIENAITPQIEGYNDDGSLCQSEDMHKRKTQTFFRQLMLLGNNTNSTTICSTLSEFWQDIGAQYAEENGLPPPSNFEKNHSTQQITFLAQKMQTNFYTMLWRTYFGRQRKAYKDAEQAKHGKKTKVHQGVLWNQSKRDNGHWDGFRLFYGREPRTYAWDDEQKTWYEDVNKRGEVTSQFLKCNPVVALKAQYDLCRFRERRGLSGFDLAPLSTLQMHSNFYDLSCLWEVAKRIRDKLGKNEIDAVNQSNHQNKVRLANLRLQNLSWPEQARTLNQAEEELGKAKFASEFGFQCPKKKEHFQKEFAESMLSTKKNIGGKHKKEFTGGIDTDGVAVSFHFEADSEELTRYKRAGGTEQNKLQNLTNEEIAGCDPGRSRPVTIATEGGAMIMHKWKYNQATRRYKNQNKQRELDSNVREELRHLSENTSKVSSLEQFHQHIMAQISTWQRRHEYGMRRSVKRRHLDTDIAKNSFVDKFWQMVQNKGITTVMYGNAHVEPTGKGEVPVPVKEIAQSAKKYVKVLMTPEYNTTKKCAACWETAKKKGNGRRIKCRSIVCICRNKGRRDRDLNAAKNIRMKGIMLEEAGDVPAQFQRA

SEQ ID NO: 36259 - protein, 405 aa, unknown
  TnpB Polypeptide
MMNRGFKFKLKPTPLQEKTFRAFSGVCRLVYNLALEQRRDWWREYERSTGSRLNYVAQARELTALRAEVDWIAAVSQTCQQQALRDLDRAYQNFFSGRAGYPSPRKRGVNDAFRFQGREVSVRHLNAKWSVVRLPKIGEVKFRNTRALPPNGTVKNVTVTLAANGWHVTFACECAAPPFQTMLFPLAVGIDRGIANTLTLSTGERLSVPGSLARIERCTRKAQKVLSRRKRGSKRYAKQRVRVAKLRARQSRIRTDWHHKASHSIATRFSQVMLEDLRIKNMTSSAKGTIATPGKNVKAKSGLNRAILNQSWFRFETLLAYKLEERGGQLVKVNPAYTSQTCSVCGAVDRLSRESQARFVCTTCGHHEHADINAAKNIMRRNAAFMPVEDTGYGSVETGTRRLAI

SEQ ID NO: 36260 - protein, 418 aa, unknown
  TnpB Polypeptide
MLLSKKTSIKVSREYANLIGHMCYAASKLWNVCNYERQHYKETGIEQHPDWYYQKKAHKEDLWYKQLPSQTAQEVCKLLDKAWKSFYALKRSGGIETPRPPRFKQESIPITYMQMGIVHERDTDRVRLSLPKTLKKYMEETYQIHENFLYLENKIFRGMDQIKQLRIYPPEKGNCKIIVVYEVPDQEELPQNGHELSIDLGLHNLMTCYDSGNGKTFILGRKYLALERYFHKEIARVQAQWYGQQSGKGVKYLATSKHIRKLYKRKHDSVTDYLHKVTRYLAEYCREQGITCVVAGDIRNIRREKDLGHRTNQKFHSLPYNRIYIMLEYKLKRYGIRFIKQEESYTSQCSPLSPEVGKRYAEPSKRKERGLYRDGNRTYNADAVGAYNILRKYHSVSGVKRELSVTGLKTPEIIKVAV

SEQ ID NO: 36261 - protein, 247 aa, unknown
  TnpB Polypeptide
MQYAKGEADLVYINDKFYLYQTIDIPDEEEEDAENFLGVDMGITDIVSLSDGTNISSDKVKYIRNRYNKVRASIQSKGTRNCHKLLKRLKGRERRFATIINHRISKQLVAKAKEEHKGIAVEDLKNIRWGINSKKRNKTFRRRSNSWSFYQLRSFLEYKCKAAGIKIVAVPPAYTSQTCHECGHIGVRKGKHFHCTHCGNVADADVNAALNIATWGYVNTHERWELLSCPIHDDLSTSKAHKSLACG

SEQ ID NO: 36262 - protein, 545 aa, unknown
  TnpB Polypeptide
MRSITSPFVVAPPTGTRVQTRLRPSQQDAAVLHLVGEYLGGLASADLARRCAVGAGADGRTGRKRALTVQSSSRWAGAITRTSNDQWQRGWRNLLDDRAGLRRTIKAIEQRLAVPVGGRRGRTRGYATRQERWAKQQRLQHLQARLARVERRLRQGRVSVVRGGRRLAKARHRLEDARLTEGQWQARWAAERWFICADGEADKPLGNETLRAHPEQGWLELKLPAPLAHLANAPHGRYRLSCPVRFAHRGDEWAAQVVSGAVRYDIGFLPDRGRWYLAASWRQPAPPAATVQEAVAAGVLAVDLNAGHLACWQVDPDGNPVRTGIDLPLVLDGLPASTRDGRLRGAISTLLDIACQRGCTAIGIEDLDFTDTRASGRETLGRGRRGKRFRRTVSGIPTRQFRNRLVQMAANRGIAVVAMDPAWSSKWGAAYWQRPLQARYPQRQITRHHAACVVLGRRALGLPARRRPGVPTPHRRMEAAGMLPAGVASYRPGRDHTQVRAGHDPPATRLGSPIQERKTGSGDRDRAGGQVAQDRSVLPVSADRR

SEQ ID NO: 36263 - protein, 293 aa, Cyanobacteria sp.
MTKRSSLWGAFSLFYREFEVPHNWWVDEAGKLHIPKLASGINVVWHRPLGQHNKQRYPYKVNYIVIARSPSGKYWASFCCVVEVPDPVINPAQDRVGVDSGLKDLVIGVNQTGFVKYQVAAPRYFRKAEARISRLQQGLASKQKGSHNWRKVKKKLAIAHERVAFKRADLAHKISYQLTQENQLVGLETLNIQGMVRNHCLAKSVSDAAIRALHGYTTYKGKWYGAAVQFIERWFPSTQLCWVCGSLNDTLTLTDREWMYPTCGQQHVRDVTAAWTILQASVRLLPGNPELSP

SEQ ID NO: 36264 - protein, 251 aa, Oscillatoriales sp.
MKRLEFVNSFATNQSDCGWMVALNLGSIFLSIVRFGQKNLTSANKLGAMARQASAERAWASISRFYDRVKKGIKGKRVGFPKFQKDSRSVEYKTNSWKLSFDRKSITFTDKCGIGRLKLKGTRDLNFYQPDKIKRVRLVKRADGYYVQFCISVERLETAPMTGKTIGLDVGLKEFYTDSNGFMAPNPRFLRRGEARLKQAGRLVSRKVKGGSNRRKAKVILGKRHLKISRQRKDHAIKLARCVITSNDVVV

SEQ ID NO: 36265 - protein, 442 aa, unknown
  TnpB Polypeptide
MQTVSSYGVELRKQNIPVRQTLEIYRSAVCYLTEIYEQVWEELAEIPDAKRRFNAAEHLVHTTKKNPARFDFDLRFPKMPSYLRRAAIQHALGSVSSYETRMDLWEKSGEKAGKPRLAYENHAMPVFYRDVMYREEKEGKDEAYLKLYDGHDWKWFCVRLNHTDMEYLRRNWSGKKASAPTLEKRHHKYFLRFSYTEEVTLTKTPVKEQIICSVNLGINTDAVCTIMRADGTVLGRKFIDHPSEKDRMYRTLGRIRRFQREHGSAQSRGRWAYTKRLNIELGRKIAGAIVKNAEENHADVIVFEYLEMQGKISGKKKQKLHLWRKRDIQKRCEHQAHRKGMRVSRVCAWNTSRFAYDGSRSVSRDPKNHSLCVFQTGKKYNCDLSASYNIGARYFIRELLKPLPVTERSLLEAKVPSVKRRTSCVYADLKELHLQMEILKAA

SEQ ID NO: 36266 - protein, 672 aa, unknown
  TnpB Polypeptide
MRKIKIFSNSIGMEIKEKPPDEFFKCVKVSLKHVLKHHEINQPKINQTAIKAHKIVIHTLQFMKLYLLDYYDKNNNVPNINKEFINSCMKIVCKEKATGRPPKKEIKELKEKLTTFYNLHYKSLCQNEELDYTYMNTILDYLTIDILTMYENNIKQHYIEYVERYVNVVWRKKEMIEFIRRVKKSKKERETSVKQLCNQLRRIKNDLLNIENANYKSNSFYHKWIQEHHTLVVPDKDKFRKNNLYYDLQCNPQDYFSCMVFMMKEVEKNDYSVNNIFPLRNDIIPKHIRLDTTTLVHLLMTKKQGKKSDYLFKGNLKRFEDKIWNFFFRTEKQCFSKKWYSFHHMIETDGVSCSILLLRKDKVGKRIRTNKIPNQEQYIDELKDYSNLQDKTIISIDPNLSDLVYCVDGDTRERNHFRYTQNQRRKETKQKKYQNIILEYKEETIDGKTIIELETETSFYNRKTLNIEEYKKYLKTKNEVNSKLFQFYEKQLFRKLKLNGYWNRLRSEQRMMNRFSKIFGKPTDAIICIGDFEQRKHRKFKEPIKGKGFRTLFRRNGYKVYLVDEFRTSCKCSNCEGGECSKFRKCRNPKPMKNNSILSHGVLMCKTCSALWNRDENSSRNIYKIAYNAIHQNERPTYLSRSKVVSGATSVGKLQCHSFSGKERETAQPQFT

SEQ ID NO: 36267 - protein, 380 aa, Hassallia sp.
MAELTLTLKLPFYRLNQNKVLEFERLTSVNTQVANELLRLDKKERYKLTSSAFVHVEIGSAWINQTIRNTNAKTKVKRFKRMWLETNNQNFEISKQGDLYTIAFNLLRGRKGRLPLSIHSASHSQVLDKIIARTAKLGSLKLCKSKKGIWYALVSVSMEVPDAISVEHWIGVDRGQNNIAVAALTRGFGKFWKGGRVKGLRRQFQRTRAQLQSAKQLKEVKRLEQRERRIMTHINHVISKQLVQFAIDFGMGLRFEDLSGCRQTMRQNKKTKSDAAKSLDSWAFYQLELFTRYKAIRSGIPVQLVPAAYTSKSDHRNGVIGKRNGDWFKGFDGYRCNADWNASQNIGQWLGFSCPLNLQTAVTAMVATDVEGGVNDSPLN

SEQ ID NO: 36268 - protein, 392 aa, unknown
  TnpB Polypeptide
MIKSIKVRLNPNNKQLTKLFQYAGCARFAYNWTIAKQQENYKQGNKFLSDNELRKEFTQLKKLQKYKWLNEVSNNVTKQAIKDACNTYKRFFKGRCKYPKFKSKKQSTLSFYQDNVKIQFTGTHVKVEGFSMSKKRNKQKLNWIKLCEKEKIPIDCKYLNPRFIYDGLYWYVSVGIEVDDNTTLPSNEGIGIDLGIKNLAVCSDGNTYKSINKTQKVKKLEKRKCRLQHSVSRRYEQNKKGECYCKTSNIIKIEKELLKMIKRLTNIRQNYLHQTTSEIIKRKPSFICIEDLNVSGMMKNRHLSKTIQQQGFYEFKRQIKYKSEWNNIPLIIADKFFPSSKLCSCCGTIKKDLKLSDRIYRCECGNIIDRDFQASLNLKIYGENVLKQQSVA

SEQ ID NO: 36269 - protein, 382 aa, unknown
  TnpB Polypeptide
MKLIQTAKLVIDCSPKEFQSTILAYTNAFNYICKTGFESKDTNGVSLHHKTYEECRKTLPSQLSCSARKKATETLKSVQAIIKKGKKATCPQSKQTSIRYDANSYTLWLNKKAISISTCEGRKKFSLIIPKYFEQYLTWKYTTADLFVKNGKIFLHVVFEKEIADIPSNGQFIGIDRGINKIAVLSTNKFFDGKKIKTISRRYEKIRSMLQSKKHSGKRHLRKIKSKEQRFRRDVNHCITKKIVNSIDSGSTIILEKLTGIRNAKARKEQRKELNKWNFFQFEQFLKYKAMAKGIMVEYTPARYTSQKCSRCGTILKSNRKSQSIYLCKHCSFSLNADLNASRNIRQNYLDSITYPSMAPVNEPIAPSTVLRIVEQAPMSLG

SEQ ID NO: 36270 - protein, 502 aa, unknown
  TnpB Polypeptide
MTNNTDGSSVGRMPMTYPHAGRRYAFKTIRCKLEQEDVTAARPDLDALFKEYAAAVRCFLHLMPVRAPYRDAFRMEDMAAAKAVAPGLEPGLRSSALDKAIEMWRSFEAKGGLSYGSRTGIPCSENAKKAKGIAMNGHGHDLFAVRLTRKDLMLVAGGESQGGPIKVSIPTPLRAVVLGIMGQDHQVPILRKVLKGEEGLIRCVSELLWKDHGGTKVKDLILDIHIGKPIGRHIQSFPDIPGPAQMFVPIGVDIGVRNILVAVAPGRGGKGVLFVKGGRWREKHRRFARSRSLRKALGDDDGWAASRQNEGNYVRDMAHQASRELLDLAARIADRKKGELPIIVLEDLDFGDGGQQQGTSGGIENTGPIRKEQAEELNAWPRTLLHDIIIEKAAWEGVPVMVVSPNGTSVTCPRCGSADAVRRRDVHRLVCPDCTYKADDDYCAALNIARRGLARLLKDRGLARPVRHHDNELRGVMCPADGGAVDAPRGPDREGRGASTQA

SEQ ID NO: 36271 - protein, 530 aa, unknown
  TnpB Polypeptide
MFISLQFKLGLKKEDKEKLIQLMRMQSSAIRTAYNMLKELEKEKAKNTHSQIYHRLRQLFPELPTKYIDSAIYKAKQYPTDKSVVFGGKRLFEKLCKNHLMGKERERLKKQWKEQRQGTLISIGSKVDKGNRLTRFEDLNGQLHLRITTINREFIYAKVLREPSNSKDKWITFMAMLLESWQTQNYFAYTIELKLRDGEVYGSVSFEIPTPKVRYTKENGVIAIDTNASPIHLAIAEVSKTGELLSYQTISLHHFLGLSQNSKDHQEWILAHKIVDLAIQKNKAIAIENLKKLKRGVRGDGKAELRKRLHNWNAKKFLQKLKRVAMIKGVEIVEVNPAYTSVIGMLKYAPQLSIDKDIAGAYVIGRRALGFKEDTPENYEKLLKGKAYLEFALKRYEEREKELRELIEKESNEYKRNALKSELNNVEKAKKVLTHLIQSLQSEPSSCKGANGRNPEQGETKKVSQSAWQVLRVALLFPILGGIPPRDLSPLKPVLVEGVWDRVRSRLVPLEAGGTVPMRDFQNSLPRPDV

SEQ ID NO: 36272 - protein, 308 aa, unknown
  TnpB Polypeptide
VNGRVECDYVIPDDPEETPIGEYLLNEDYEFRMSTLQYDRSTESFYLHAKMRRTERDEKEQSTTTFDDAKHRTVLGVDLNVDGSLAVTSTGVFIGNADEMNHRRREFEKTRGSMHQTGTRSAHLSIQSMNDREHRWMQDELHRASNRILEEAHEHDCTHIAFENLTDIRKRMAGAKRFHAWAFRRLYQYVEYKAEMIGIEVEQVSPAYTSQRCSSCGFTHETNRQSKHQFVCQKCEYELNADYNASKNIGHKLLKRLRSGQKSSSGGAPCQCALKSGTLNLNGDFYASVESTAEGESTDKPTTSVVGN

SEQ ID NO: 36273 - protein, 403 aa, unknown
  TnpB Polypeptide
VVSTSAKTKRAYRYRFYPTQEQAGQLARTFGCGHFVYNWGLATRKHAYFHEGKSLSYNDLAAMLPALKEEYPFLSEVSAVPLQQALRHLERAFVNFFEGRADYPVFKKKRNDQSATYAANAFTWDGSTLTLAKMEAPLDIRWHRPLPKDTKPSSVTVSRDGAGRYFISILVQEEIAKLAITPKTVGLDLGLTSFVVTSDGEDIPNPKYYRQNERKLAKAQQRHARKKKGSKNREKARKKVARLHARIADCRRDYQHQRSTRLMHENQVVCVESLAVKNMVKNPHLSKSISDVGWGEFTRQLGYKAAWYGRFLVKIDRFFPSTKRCSACGYVLEELDLSVREWVCPNCGVTHQRDHNAAKNVWAEGLSVLAACGGSVRHGEVRASHAAPGEAGTSAREGRSPAL

SEQ ID NO: 36274 - protein, 550 aa, Mycobacterium sp.
MIVGMRTRSQAEKVVALTGGVQLPGKPKRDGSHTVSRYVDVGADFEHHRAGVESVSVLFELYDGDAGSYAATGLPGVKLPTGWGVTAAKFEVQWPCDEDRAALVRSHFGARRKAFNWGLAQVKADLDARSVDPEHESVGWDLGSLRKAWNRAKEEVAPWWATNSKECYSAGLADLAAALSNWSASRNGKRQGRRVGFPRFTSARRDPGRVRFTTGTMRVEDDRRTITVPVIGALRAKENTRRLQRHVASGRAHILNVTLSQQWGRLYVSVGYALRSPTTERVVAQPTVRAGVDLGVRTLATVATRDSVTGAETVVEYENPVPLKATLAARRRAGRELSRRIPGSRGHRAAKAKLTRLDRRCVHLRREAAHQLSTELAGTYGHVVIEDLDVAAMKQGMGRRAFRRAVSDAAMGLIRPQLAYKTLRYGSTLTVADRWFPSSQIHHGCRHTDGTECRLKGTGRIDKHLLCPVTGEVVDRDRNAALNLRDWPDTASRGPVGTTAPSVPGPTTTVGTGHGADAGSSGAGGASVRPLSSGAGRGEATTPTPQGDAA

SEQ ID NO: 36275 - protein, 415 aa, Halorhabdus sp.
VRPRSEQDERLLRDLLDASASLWNELNYERRQNFFDGESVWDTADYRKQYVGVLGSATAQQVIRKNSEAWRSFFAAHEDGEDTAPPGYWGNEDEGRELRTYIRNDQYTLEMGDRSRLEIPVGSDLKDEYDLGHTERLRLEVAGAPKWDGKQGRLELYYDELSDQFRAIQPVTVDKSRQDSSLADETAALDIGANNIVACTTTTGQQYLYEGRDLFERFRETTREIARLQSKLQEGRHTSKRIQRLYRRRTRRRDHAMDGLARDLMDRLYAEGVSRVFVGDLTDVLETHWSVRTNQKTHNFWAFRAFIDRLACTAEEFGITVEVRTEAWTSQTCPNCGSTDRTTRHQDTLTCPCGFEGHADLTASETFLRRHETDVPRPMARPVRFEWDDHQWSELPYSHESPKEVRTDQSILQSV

SEQ ID NO: 36276 - protein, 571 aa, Halorhabdus sp.
LLKEEYWRDRHLEAIQSRDSNDHTYVRDDEYEPFEDTDAYLYNRFKRCIYHRVTRILKAHREKYRAFQFIVETVEERKIRRVGWQQLRSRLFDSGDSPYIQWSNIETVVEQLNNHYDRNGRFPEAYTDLVDCPQPDDTVPFGPDSRGDIHEVQAADGEVVVMLKAPDSLSPNSYADWTEHEIRFPAHQRFNEMLEAGELKAPTLHSSEYGYTLDVPVDVPETSVDTTSDRVLAVDLGVKKQATAVVLDGSEDGKDESQIAPPNFVDHHAKDKLFRVKADAEGIDSRLAELRQQGKSHTEQFAHLLSEYRRTRRKERRLRDQIQHDVANQLVWLAAVHECETIVLESLGQFEAEETGGVTAWSISTWAHGKLLERLRYKGDLLGLDVETVNPWGTSRYCPRCGERGKTVKAPTDHTELRNGGHFYCPSCEYECDRDVVGAVNVGRKHLSGSRMETANPCVYTARGNHASFPSRPTCERVRSEAGTEDSETVSVPGVQSAANSEQDPASGRQTRLSEYRSSSLTTTRSRAEEGLQQNQSRKTGLRCPSGSITRQCLLVSTNDSHEVLPNPAEN

SEQ ID NO: 36277 - protein, 363 aa, unknown
  TnpB Polypeptide
MTYMAYKFRMYPNTEQENLIIKTFGCVRFIYNKMLEDKIKFYECTKKRLNNTPAQYKKEYPWLREVDAFALCNAQIHLQAAYNNFFKNPKSGFPKFKSKKTGKNSYTTNNHSENIRIVDKTIKLPKLGMVKIKQHREIKQNQKIKSVTITRKPSGKYFVSILVEYNIVEKSVKLNKEKSIGLDYSSHSFYVDSQGVEADYPRFYRASQDHLSKEQRKLATMKKGSNNYYKQKVKIATIQEKIANQRKDWMHKLSTELSNKYDYICVEDINLQQMSQHLNLGKSTYDNGFGMFRDMLFYKLKQRGKKFIKIDKWYPSSKMCRYCGTINSNLTLSQRVWTCECGKVLNRDENAAINILNAGLSMI

SEQ ID NO: 36278 - protein, 213 aa, Bacillus sp.
VKTSQQLPRNKKPSNPRVIFDGRHWWMSVGFQEDFESQELTNESIGVDVGLKELFVASNGMKERNINKDAKVKKLLKRKKSAQRDMSRRFKKGVKIQSVGYEKAKTEHLRLSRKITNIRNNHIHQATANLVKTKPMRIVVEDLPISNLLKNTKLSKAFSFQKLNFFFQCLSYKCEKYGIAYVKADKWFASSKICSCCGVKYTTIQFNQKDSGV

SEQ ID NO: 36279 - protein, 436 aa, unknown
  TnpB Polypeptide
MKLIGDLKALETSIGIYRQALSYLIPIIDDDWNTVRTCSTNKHKVNLVEKWIHSTKINRARFDFDEQFPKLPSYLRRSAISKALGIVSSYRSNLENWEKDPKGQAPRLSLTHYAYPAYYKANLFRNFDLVNRTIELKVFKNGDWVYEVYQLKRSDCTYYQRYLTGKKQNVPIIQKKGRCFYAAFSYEEETQLLPEESIRKICAVDLGIGTDATCSIMDEDGTVYARKSISFSKEHDRLHTELGRIKRNQKRGSRHNKTHWRKVAGISMDIADKTVKEILEFGNEYGVDAFVLEYLDFKGKNMVKRAHFWRYKRIYKVLTQRAHQYGLRVARVNARNTSRLAFDGSGWSKRGREITPETPYALMQFATGKIYNADLNASYNIGARYFIRSILKTVTATQRLALEAKVPQVAKRSTCTLSHLINLRSEFAALTAKTQA

SEQ ID NO: 36280 - protein, 534 aa, unknown
  TnpB Polypeptide
MGKDYTNKYISTVKHATLTNQGKIERLDPLWSHYQNLLVHFMHDMNSSLTRGQEVLKYTKAKAYQGDMTVLFERATKAYQKAIDKGDELAPLEDVLTDIEANAVQTPLSARYVQCCYSQAYEAYSSWTALLAEQVKTYLGFSSVDDVLIDGQPFLTTCYRINKDKGWYQKPFLGWALDADDNLVVPTKENPAAIKLEVPTEIMKFIRRLVKQARKSIALPDLSNVRTLKLDEKVAKLEISNNAHHVNFWLKLSTLDKGKPVYIPLKNNPYYMELLKTGERVPFVQVGLNDGKLTVSPVLAHDKAPLRTDGSEIGLDFGMVTMFTTSTGERHGITSFNKLKIWDEILLKRTKELQTRGKPLKSDPIYNSLQSKIRSFIKNEIGRILNKLANKGYAVFMVEKLDFRGGGLSRRMNRLLARTYRKVIKDKLARLEEKYGITTVEVNAAYTSQECSKCGFVSKGNRKSQSAFHCACCGHKINADVNAARNIVKRRSFDVELRTYAREHNVRITRCLILERLLHKHKRFCRNNLASCHL

SEQ ID NO: 36281 - protein, 519 aa, unknown
  TnpB Polypeptide
MDGIFMRVQTPSYVISVKLHLPEQIKNRLEKSFRISNSVYNEGISLGLKRFEAMKRNPYYQELLTARRLAKAGIDKLKKAKKKTKGLVQEVKLYDKALFELRKAYGLTEFDLSAYFCQQRRKPGSSYQQLAACEIQVIAKQAMKTLEKVLFYKIKPHKTRFRSKFDLDASYQNNANKQATRLVPSSKKDIAYRLYIHKKSTFVDIPVKAFNDYQQISLSRSEKIKYVQIVRKSIRGKKVYYLQIVCQGFPPSKVTKGDSVVGIDPGVSTVAFVSQKEVALVDLVPKNIMQREKLLKRIDQKIECSRRVNNSECYTENGTVKKGARFKRPSNRQLRLQNRRCKTYRSLSEERKKLQGRLVNRLVSQASIIKIEDLNIKGLQKRSRDIRINPKTNRPFSKKRYGKAIFRAAPSVFRTALETRALQLGIDFEIISPKEVKPSQYNHITQTFDKKPLSTRVYDLSEQYTGVQRDLYSAFLIGHIEKGRYQQKQLEQDFPAFYDQMKDFLQQPIKTKRLAWYLN

SEQ ID NO: 36282 - protein, 386 aa, unknown
  TnpB Polypeptide
MLVPNNKQNTLMFQNAGTARWAFNWALGREKENYASCGKFISDNDLRKELTQLKKTDEFSWLNSVSNNVPKQAIKDACIAYQRFFKGQAKFPQFKTKKKSSPKFYQDNGNIQFTSTHVKFEGFTKSKKKNKQQLNWVKLAEHNRVPFGKGIKYMNPRISYNGLNWFISISIEYPDSLDTPLNEGIGIDLGIKDLAICSNGKTYGNINKTKKMKRLEKQKKRLQRQVSRKYESNLDGLKYIKTKNILKLELKIKSVQHKLNGVRKNYIQQTTSEIVCRKPSYITIEDLNISGMMKNKHLSKAIQQQSLYEFGRQLKYKGLWNHIEIRIADRWYPSSKTCHECGNVNKLLTLNDREWICTGCGSVLDRDLNASLNLRDTENYKIFKVS

SEQ ID NO: 36283 - protein, 452 aa, Halorubrum sp.
MRRVNIFRVSPLSERDELILYEVLDASAALWNELTYHRRQHFFNNRDVWNVDADEYRVKYKGVLGSATAQQLIRKSDEAWRSFFALMEDGENPSPPGYWKDEDSGERTLQTLIRNDQYTLKWGERSRLEIPVGHDLKEKYGLGYHERLRLEARGNPRWEGSQGRLELVYDKDAEAFRARQPVSEATPRRDEPLAAAAGDDGVVAALDIGANNLVAVTTTTGYQRLYHARPQFHRFRRTTNQIAALQERLEYGTWSSRHIRQMYRRRTEHVRHLQDALVRDLAEWLAEHGVGEVIAGDLSDVLQEHWSARVNEKTHQFWSHGRFRRRLQEVLEGEYSIRVREVSEVGSSSTCPDCGSENIHREGDLLTCYDCGFEGHSDLAASENLLIVNDGSMARPAVSRENTTERAHRSVARLEWNDHRWRRRDHSTKAEPENQSTHGDAGKFASGGAGIA

SEQ ID NO: 36284 - protein, 598 aa, unknown
  TnpB Polypeptide
MFQAAISRKSFIFLPARSTAGPTTVVLPAFARPAASDSTPATMSTSSSALSSCPPKRKSATLESAAPSSVPTSTASAPTSAKRIRITKSSVKLAAALTTTVPSLRPFWTASTAALSARCALPVATGSVDMGSSLSSSSLPRPTAGSWFTCSTQTRPRTTSSLRISSLLSTSSLPKTTAARLQRKGKCEKPAAEKSMKIRLFPNSEQRQMLSSWFNTARWTYNRTVDAIRNGCERSKKALRALCVNNDLWASDELEWVKDTPYDIRDEAMNDVLKAYKTNFAAKRTQFIVNFKSRKAKSDSIALLAKHWKASGLFHPTVWGKTPLKAAEPLPDKLDYDCRLQRTNLGHFYLCIPRPLEFRSERQAPVQPSVIALDPGVRTFQTGYCPDGSVIAFGDKDIGRISNLCRRLDQLQSKASQPEVRHRQRHRMQKAMRRARERITNLVNDCHHKVAKQLCQSYTTILLPLFETRNMVSRIKRRIGSKSARMMLTWSHYRFRQTLLSKSREYPWVEVIVVDEAFTSKTCGQCGELHQTLGVSKVFVCPKCKFTADRDVNGARNILLKFLTEHERAEAIRRWGLAPGGGANANPPAELDMNVHFG

SEQ ID NO: 36285 - protein, 355 aa, Lachnospiraceae sp.
LSSLNRQIDIAAEIWNHCIALHRRYYKWFGKHLSANRLKVFLTSLKKMDRYAHWRLLGSQAIQDIVERIGRAYDAFFDHLKKKRSGRKAPPRFRKQRNYRSFTLKQAGYKFHDGNHVTINGVDYKYAAHRPFAGTIKTLTVKRNAMGEFFIFLSCIQEWPDVPARTGKAVGMDFGLKHFLTLDNGRKIDSPVWYKSSLNEIRKAHRSVSRCKKGSGNRKRALMHLDRVHEKVSNRRKDWFFKLANELTSEYAVICIEDLNLDAMKQLWGRKVSDYAFAEFVSILDWVALKNGCQVIKIDRWTPSSKACHVCGVLTESTKDLRIRTWTCPACGTVHDRDVNAAINIRNMGLSMLSA

SEQ ID NO: 36286 - protein, 376 aa, Pantoea sp.
MKRAYKYRFYPTSEQVELLAQTFGCVRFVYNSILRWRTDTFYERKEKVTYTNASARLTAMKESPELSWLNDVSSVPLQQALRHQQSAFAHFFSGRAKYPAFKSKHHRQSATFMNTAFKYRDGKLYMAKSKAPLDIRWSRELSSTPSSVTISKDASGRYFVSCLCEFESKSLPVSAKTTGIDVGLTDLFVTDTELKTGNPRHTAKYAKRLALLQRRLSKKKKGSSNRDKAKQKVAKLHAKIADCRLDNLHKLSRRLINENQVVCVESLKVKNMIRNPKLSRAIADASWGEFTRQLEYKADWHGRTLVAVDQFFPSSKRCNSCGFTLSKLALNTRSWVCPECNTDHDRDVNAAKNIKAAGLAVLAPVESVNPKSHQAA

SEQ ID NO: 36287 - protein, 391 aa, Gloeocapsopsis sp.
MIRTFQFVRNKCLRFWMDGFQVKLSEVNAEATRVRHNSEFPWAGKLESSAAQAASERAMSAIRRFYENRKAKIPGNIGFPKFQKNNRSVEYKVAGWKLSPDRKRITCTDKFKAGTFKLVGTYDLNFYHLKAIKRVRIVRRSDGYYCQFCIAVERNISIEPTGRAVGIDVGLAKFYTTSDGQTVDNPRHLRTAERSLKRAQRRVSSKFRRPNKGEKVKQSNNYKKACKWLGKKHLTVQRRRKDFVAKTAKALLESSDFIAYEKLNVKNLVKNRKLSKSISDAAWTQFTDWIERYGMLYKRPVVAVPPQYTSQDCNECGTRVKKTLSVRTHICPKCNLVIDRDENAALNILVKGLNQAGLALNLSTSGHEGINAWGQNSLYFVGENLQDKLTG

SEQ ID NO: 36288 - protein, 403 aa, unknown
  TnpB Polypeptide
MVIYEYKVAGTQAQYAAIEEAIRVTQFIRNKALRLWMDTRGINRNDLQCYCSTLAKDYDFASCLNSQARQAAADRAWSAIARFYENCKQHKPGKKGYPRFQHDNRSVEYKQTGWKLEPDGKHLTFTDGCGIGMLRLVGNQGQRIEDYPIKLIKRIRIVRRADGYAVQFVVQAERHIEHISTGKQVGIDLGLKEFLTTSEGNTVANPRHLRKAEQRLKRLHRRFSRTQKKSKNRAKARQRLAKGYLKVSRQREDFARKTANALVTSHDFIAYEDVKIRNLVRNRHLSKSISDAAWGRFLSWLTYYGGIHDIPVMAVEPAFTTQDCSACGHRVKKSLAVRTHICPKCGLVMDRDHNAAVNILARGLELFRTGGQSGTGLSSKRRNASGQPPATRSGRATTGKVTG

SEQ ID NO: 36289 - protein, 414 aa, Streptomyces sp.
VIVKLVVLVKLEPTPKQAAALEATLHACNEAATWVSEIAFARGEFKNFALRKQVYGEVKSRWGLGAQAAQHVIKKTCDAYATLKANLRAGNLGRSGSRRYRRAAEKPIAFRPEGAQPYDDRMLSWQIPDRTVSIWTTTGRVKNVAFTASPEQLATLALYRRGESDLPQRDGMWFLNATCQVPEAPLNTDPVDFLGLDLGIVNIATTSDGEIMAGRELNRIRVRERGLRTKLQKKNTPSAKRRLKKRRRKEARRARDINHKIAKRVVAEAERTGRGIALEDLTGIRERVRFRKPQRATHSSWAFHQLGAFIGYKARRAGVAVVHVDPAYTSRTCAECGHVDKANRVSQAWFACRNCGFVDHADRNGSRNIRARAWELWRRGAPSTAPAPPRKPGAGLDANAASHPVMPVVQARRL

SEQ ID NO: 36290 - protein, 444 aa, Ruminococcaceae sp.
MILSEEHRIKKHNNKKLLHEIDDYCYKVKNLSNSVNYLIKQCYRIHKKIVNGKALEDWEKELIQEINKALEKYNAGRSESKQLRYINADNGYIADAYFLSWYLKGTEVYKDVPYSTCSQICIQEKCREWKSFYRAKAEYGKDPKKFKEHPHVPGYLDPKKGRGSLVITSQIFKVDEAGNVTMPKFLSGIHIRARHRNIRQIRIKMFKDSILISLMYEKEEKQISGTKIMGIDLGVNNLIAAAWDSEDRPVIINGKPLKSINQYYNKARAHMQKEAKVYNGKNRTKRLNNLTAKRNRKIKDYMHKASRKLVNLAVSSNVGLIVIGANQGWKQKVHMGNVTNQNFVSIPYKTLINMIEYKARLEGIEVKTVRESYTSGTSYLDGEKPDPTHYDKTRRIERGLFRSNSGILINADVNAAYQMMKLGDTRAIPINTRRTDNQDKSSLN

SEQ ID NO: 36291 - protein, 427 aa, Okeania sp.
LKARYKYRIYPNHVQITKLNQLFGCCRYVWNQSLAYCNQLYANGQKKPSYVDLTKQFITQVKQELVWLKEVASTPLQQSLKDLDQAYKNFFDSCKGKRKGIKVKSPLFKSRKSKQTARFVGANYKIGQDKIYLPKVGKIKIVWSRKLPAEPSSLTIIKDSANRYFASFVVDTKSEPLPKTNSSIGIDLGISTFATLSNGDKINAPKPLKHNLEKLAKFQRKFAHTEKGSKRRERRRLKIAKLHGKIKDIRTDFLHKLSTDLAKKYDTIVLEDLNVSGMVKNRKLAKAISDLGWRQFRTLTEAKCEKYGREFRVIDRWEPTTQKCSNCGFKGGKKQLNVREWTCLNCGTSHDRDVNAAVNILETVQPKTKVETKATENPVQLSLFAEVAEGHSETIKRTRRKGQTGKPAFSSDVSTHSELFVQLSLFE

SEQ ID NO: 36292 - protein, 301 aa, unknown
  TnpB Polypeptide
LRNARFPRFKSRKRDTARFRIPQRVSLTDGYLTVPKIGRVTVRQSRDVEGTTKSATFKRDACGQWFVSLVVETEMPTVALPTPTSDKTVGVDLGLTDVVTTSDGARVAAPRFYRAAERKLRRAQRAFSRKEKGSHNKQKTRVMVTRVHQKIANKRHDFCHKLTTSLVTQHDAVCIEDVSIKGMAKTKLSKSVLDASLGTIRRQLTYKGAWYRRPVVVVDRFYPSSQIHNRCGWRNHALTLSDRSWVCQECGEVVDRDLNAARNIKDEGRRLLSVAAGHADTQNACGEGVGPAMPATLAIPV

SEQ ID NO: 36293 - protein, 620 aa, Deltaproteobacteria sp.
MYQVAYQVRRALQRDAQARSRAYWAAHHERDKDPAAVRDRLGLSRSGFEHAAYEHLDAAPHLREFVTKAQAMHLADSVWSATERHLFRDSAGRRHGASRIGRWYDFKRIPGRARSHRTARKWETFRLHGTLAGHRAAYTRHGKFMQPHRMRPVTSGSWWSYDGPLAVVFSGLADGTLVLPVRLPTAPSNQPILDHCLGDASRWHKIDLVRRQDPHVTGGWRYEAHLIVLTQQYVSPSAVARRARVAIETIDRVAGIDVNVSNITVVSHENGRAMHLTRVERDETQKQRDRSRARRERRRERNLDRSRRSMNRAQYRLSKRQEKRARRHAEARRAPVNVIPMGPRNARVDGLPLQSYRRDQLSASYHHLRAAQVAEAASTTQARHDRARQTAANVVGTHGYRLIVENCSIAAWSRSWGRAVAAFSPGMLITAIDREAQAVAAIAGTSGGVQRAATRTTAMSQHCPCGERVAKSLADRVHVCPNCQLRGDRDAVSAVLASFVSLERGVPSSARVDYDASADALAEIRRAVDPSYSGWQDTLSESTDLSARDGSFITWSTSTPDCVLVARRIVGTVACPNLNETGYRRTTSERARWRTNLFQASTSGQLLAETASNVIFSPLV

SEQ ID NO: 36294 - protein, 437 aa, Lactobacillus sp.
MKAMKHLAYHYGIKMRFYPSNQQKEMIKRNYDAQRFVYNSYVGNNRIIYQIKKLSYLQQLTSNLPFVSPLPTKHQLDLINYMQTLQNLISTPKHLRDAYNFLRVKQIDSLAIANAVQNYHKAWLNYHKIGQGIPQFHKKSNEWSYQTNCLYTNNKLKNTYLTNGITRFIDQCHLKIPKIGIVKVKNVRNFIQKRINKQIPTRIGTVTLRKTVDNQFYVSLQLASDIPFVKPMKLVGNPIGIDLNLDNFLTESNGSMVKNPKFYRKSKKKLAKLQQVLNRRERHVKKLGRNLKNASNYQKQYQLVAKLQAKIKRQRRNFLNNLSTILVKNHDLIVAKELRSKNMLKNHALAQAISDVGWRTFLSMLEYKAKLYVKQFVTINPKYTTQRCHNCGTIMGHNGYPKLTLKDRIWTCPICQVYHVRDWNAAINILAKQQNVW

SEQ ID NO: 36295 - protein, 385 aa, Streptomyces sp.
MKLVVQVKLMPDAVQATALGATLHAVNEAANWVSAVAYEHGVPREYELREHTYAELKVRGLGAQAAQHTIKKVRDAYTTLKADTRAGNLGKRGSKRRIKAESKPVTFRPNAAHPYDDRCLSWQYDAQTVSIWTTAGRMKNVRFACSADALKMLRECRQGESDLIERDGVFYLVAVCDVPEVAPYEPDGFVGVDLGITNIATTSTGYRAAGRGLNRYRKRQLELRRKLQAKGTKSARRLLKRRNRRERRHAANQNHIISKKIVTTAERTGRGIALEDLSGIRDRVRLRKDQRTKLHSWSFHQLAAFTEYKAKRAGVPLVYVDPAYTSRQCSECGHIDRKNRVDQATFACRACGALMHADDNASHNIGRKGEVAWIAGRESRVPATP

SEQ ID NO: 36296 - protein, 651 aa, Streptomyces sp.
VSRKLPLAEGETARIACARGLLRTGVEEKTGEVLSAATLAERVGWAADLVSGMVAGLLAEHWHAADVDLLAAGEDAAGRALPSNAWMALRRLGWTVAPPGGVRANDRIVRMAQEQAGRTLRSATWRADVIAGVLATWPDEPARRTAREWDAVRATVAGGHHLPSGVIKSRTRQIITFVTRHGRMPDDVFEVEAVPRVARMLLLSACDGQQATIERADEPGRALLRLQVPTRPDPRCYTDWTWVACPLRLPPTVPAAVVLHLPTLRVHQGRVRVDLAYSHAVPKARWSGHVVALGVDWGLNTLLSAGAVRLQEDGRITALGSGGMFRAAGVLAKQHRLRRHGEQLHAKIARYQRLTGGNEQHALVARQAVLTQEIRHVSDRRSNLNDALAWAAARWAVDQAIAAGASVMYIEDLRSMEARGMGRTHNTRMSQAVRGQIVARMRHLAAESGIAVVTVPARNTSRHCPQCLEVLRHRKAPDRPTTPGWKWALCGSCGWQGDRDTGAWRRIAARGLTHQSKTATDRATHAMVIRSVVDTLEAGAVITPPAPKTSRTDRSKTGPTRRHTTRPTPRRRRTPSPARPQGLAGKRPEGHAHTGRRRLPRAAHRNQGVTTISTPTTAGQRPRGTALGAGFHLHAHATPPRWAKPEPDHHV

SEQ ID NO: 36297 - protein, 353 aa, unknown
  TnpB Polypeptide
MKVKKTVRCKLIGLTRRKLELLNREYDNFQHYLRTGEDRGVYSATKQQGKRTYRKIDPEKEYPLVIRKDLMDIRKTDNKLATYWARIPVHGVRGGVKVALAHQPFDFEEWEICGSKLVRTKDGEFYLHVTVEKEVELKKEYSSIVAVDVGARWVAVSVARHRSRPKFYGKRVRKVRGKYFWLRRKLGRAKKLRAIKKVGDRERRVVNDELHKIAKDIVEEAERHDAVIAIGDLKGVRKKDKGRKVNRKVNSMPFYRLKEYIRYKALERGILVIEVPEHNTSKQCSRCGSLRTKRPSQGVFICEDCGYQINADVNGAKNILKRAVGYMLTVGAAVTRPEGERFALWQATLPNLP

SEQ ID NO: 36298 - protein, 406 aa, Lactobacillus sp.
LVKLGRTIKLRLYPDTNQAEQFLAMSQEYQRLANIISQWIFDNGFQLSWLKINHQLYKIFRQESELNSQMIQSVFRTVSARYKTVREQMRQHSYRYKNEEHKWIRAPRDLTWLVKPIQFRRPQADLVRQSNYSFVDKMQQISITTLGKRTKLGFTNKGFEKYFTDDWKLGTAKLVHNRDKRFLHIGITKEVSDFDVKANPKIVGIDRGLRFLATTFDSEGKTLFFDGQKILRKRKKFLEIRCRLQSKGTKSAKKKLRQLAQRENRWMTDVNHRLAKTLVALYGPHTLFVLEDLTNVTFNTDDLPKSLRNSHRSWSFFQLESFLMYKAQAIQSTVVKVSPAFTSQRCPKCGLIEKINRHHDTHEYWCKQCQYRCNDDRLGAMNIEMLGQYWLNGVKRPKIKKLTTAG

SEQ ID NO: 36299 - protein, 406 aa, Lactobacillus sp.
LVKLGRTIKLRLYPDTDQAEQFLAMSKEYQRLANIVSQWIFDHEFQLSWLKINHHLYKTFRQESELNSQMIQSVFRTVSARYKTVQEQMRQHPYRYKNEENRWIQVPRDLTWLVKPIHFRRPQADLVRQSNYSFADGLRRVSITTLGKRTKLNFTDKGFEKYFIDDWKLGTAKLVRNRGKWFLHIGITKEVSDFDTKDNPQIVGIDRGLRFLATAFDSKGKTLFFNGQKILRRRKKFLEIRRQLQSKGTKSAKRKLKRLAQRENRWMSDVNHRIAKTLVVLYGSHTVFVLEDLTNVTFNTDDLPKSLRNSHRSWSFFQLELFLTYKAQAIQSVVVKVNPAFTSQRCPKCGLVEKANRHHDTHQYWCTQCQYRCNDDRLGAMNIKILGQDWLSGVKHPKIKKLTTAG

SEQ ID NO: 36300 - protein, 696 aa, unknown
  TnpB Polypeptide
MEYVVKVPIERFLCGTALERVEHLVTVVHKARLLASKLLNLSLRSDVESELLHKGSVDFRPYFEGNWIKKAFVGVSAGRDQVDDPRLERVLRDYMPPHRPELLAPGADQAFMYAARNVAATAGTHVSFHLKDRIRRFITRTFKLSRGEYRELTSDARKQRIRDLKLVCLDALRLSDQPMRSPLKYHEWVDSERGIMQIDGISSADVRAIWTPVQTDGCPGLGFYAKKRPHLFVMAMVRAMNGHAKSSSIYPECQSCVPGYVHIDQRILSALIPKTGGRGQKQKLDPSLTATPSAPKPSGRRSRRPKGDPQLIAEKHFIFAGSEQDVLHPDVHKVIPRFWERFAYSFDTDGVATSVHMRRGSTAAAPPSLRASTAAAPPSLRQGGHWCARTTRWVTADELPAHGLYASADDFKERAGWRGGSEGACIVGVDPGVIEIISVVAIDSARHVKYTNRQRRAESGVVVNMRRLEQEKTPMVRGAEVSLGAFDSRALGFAAYQTYYTESLRTLEVRLKFYGDIQYRQRRWKMHLMRQKSESKLFRAIELLRPKEDTRPLLIAYGAWRLKTGTICRMGNPPALGVGMARKLSKQFRVIWTPEFMTSKTCLSCSSRCGRCAWLESSRPLNQRGRVPEIRGLRQFLNPDCGPKSGLLGHLFNRDRLGATNIGRNLARLLNGRPLISTPRGHDLELMDLDAEFHNN

SEQ ID NO: 36301 - protein, 229 aa, unknown
  TnpB Polypeptide
VFGAVRSALAPALLSRGPCGDSRAAAATPITSCSGVPQRTVLRFFTSAAMSSKEVRHLREGAVHPGTTTAPAEDGAPPQGHPGCCRRFRTRDDGQQRRLRSRYRQHKLTTRLVAENQRIVIEDLSVRNLVRNHSLARAISDASWSELRRQLEYKADWYGSEVIAIDRFYPSSKTCSVRGAIVEKLPLNIREWTCPCGARHDRDVNAAKVIHAVGLAVSACGDGVRPARV

SEQ ID NO: 36302 - protein, 185 aa, Salmonella sp.
VKRACKYRFYPTPVQVELLAQTFGCVRFVYNSILRWRTDAYYKRQEKIGYTQASARLTALKKEPEFAWLNDVSSVPLQQALRHQQAGFSNFFAGRADTRHSKANGHTQAATLTGAAFKYRDSRLYMVKSKAPLDVRWSRPLPSVPSTVTVSRDAAGRYFVSCLCGVKRFVRHRYRIQVRLSPPYR

SEQ ID NO: 36303 - protein, 359 aa, unknown
  TnpB Polypeptide
VKDKHVAWLCGLAREVNIVFNYCNELSVKMFERERRFLSGFDFWPFLKGATRGDCALNLPVQAVQEIAEEFARRRRQHQKIRLAWRKSGGARRSLGWIPFKVRTIRYRAGQSYFAGRWLSLWDSFGLGNFELRAGNFSEDSRGRWYLNVCVPGVQRAGDERNKPTAQSILDRSLPSLGIDLGLRTFAAFTDEAIPPIEAERFYRDLEPVLARAQRARHRYRARAIHAKIANRRKDFLHKLSTRLVKTNGAIFVGNVNASALAKTRMAKSVLDAGWSTFRTMLQYKCADAGVWFDEVDEAFSTQDCSVCDSRAGPKGRKDLGIRGWQCTVCGAVHDRDVNAAHNILAAGHRRLAEGILGP

SEQ ID NO: 36304 - protein, 353 aa, Thermoproteus sp.
MECVRRAVAVEVESPPPELSAVEEPYRRIVEEAAVYVSEKEMLEREKYSELYRRFRELYPLPAQLVQQAMNQGVETGKSFLEARRDGRVHKPRPEVRRVSIRFAKDSWSYRKAAASAAPVRLALSLPGGRREVWIKPHRRFWLYWWKALRGEAELASTLMVKRRRGRWYAIFAFDVASKREPPAEAAAFDVNENSVAVARVSLLATVDRVASWNRQYINPAVYSIRTDFGRLAKRYERIRNAKLEELRGKYPFAGKDGEERAQNVADTREFRKFVGRLRERRRKDARVKQVAREVARSPAVIVTEELGKNPQEGMIGVEKKKVKEGGLRHRIKQAPFRKLKGLLRTRRRRGVL

SEQ ID NO: 36305 - protein, 290 aa, Microcystis sp.
MLLRYLPKIGEVHCQVSRQPEGDLKSVTVSVNPSGEYFASCLYDDGQDLPQKLTEGKTIGIDVGLTHFAITSDGTKHGNPQYYRKYEQRLARRQKKLSRKQKGSNNRNKARVKVAKVHSKIVRCREDFLHKLSRKLVDENQVIVIENLAVRNMIKNQNLAKSISDAGWGQFCTMLKYKAEWEGKIYLEVNRFFPSSKTCSNCLNRVDSLSLDIRSWQCPKCGETHDRDINAAKNIRDEGLRILAVGHTATASGGRVRPSKGTAFARHLPVNEESLASVLRGVSTHSLPMD

SEQ ID NO: 36306 - protein, 499 aa, unknown
  TnpB Polypeptide
MHVIVLAIAFNHSGAEACGDFLEGTFKTLMSISVKKTTPGLGYKDQVDMKVANNLSSRSIFHIENPKTKCYNLTMQTIRGHVYRLKPTPEQEVLLAQTAGVTRLVYNLALEQRRTWGGRPFAGGDPRNFGAKGLSRELSELRSDFDWIRAISQTAQNQALIDLDRAYANFFEGRAGYPRPRKRGAADSFRHVGREIALRKLNAKWSEVRIPKIGWIRYRDTRPLRARADGTVEIRNATLRRRPDGGWEISIATRCEIEERLVPAAAVGIDRGVAVPYALSTGEMVHLPKTVKRRRAAIRRAQKTLSRRKRGSARYARARRRLATLRARDARARAHLAHVLSRRLARGHGLVAIEDLKIGAMTRSARGTAEAPGRNVAQKAGLNREILNVGWHALERMLGYKLEETGGILIKVPAAYTSQTCAVCGHVDARSRESQALFACTACGAQTNADINAAKNILARALARDEDRRGNAPLLDVEAQASAAHEASTHLGPERFDAA

SEQ ID NO: 36307 - protein, 213 aa, Bacillus sp.
MDTQVKGSYLLCIPKFQEGISIHLHRKLPIEGIIKKATIKREGTNYIVSLSVDSFCPNEKQVESITSEEVIGLDYSQSELYVDSEGRTAQYSRYNKIIEKRQRRMNKSLARKKNRAKTDETGHIIYSQNYEKQVKEYQKVTTKAKNQRKDFLHKKSNQITNDYHAIVVEDLNLNNLAQCLRLGKKLHDNGFGMFRTMLQYKSKKKGKHYLDNK

SEQ ID NO: 36308 - protein, 439 aa, unknown
  TnpB Polypeptide
MPSGCHFFLIAQVLHPPLLLFPSLAPPLHFIDYRRLKPPSLEGGYRRRSPIGLVSFLESCYTEYGARQMKKAFKYRIQASPHTLQQAEYWLDLCRSLYNTALEQRIIIYKQNKGSISCFDQIKQLPELKDAFPEYREVGSQVLQDVLEKLDKAFAGFFRRVRKGNCKAGFPRFKGKNRYDSFTLKQASWKLDVKNLTIRNIGTFKLRLSRPIEGDIKTITVRRTSTGKWFAAFSCDNVPDRPLPKTSKVVGIDVGCESFLTTSEGSKVENPRFFKRSQAVLAMRQQRLSRRVKGSHRGQKARILVAKAHEKVYNQRRDFHFKTANWLVARYDTIYIEDMNSWNGFSHSLTRSMRDAAWFGFFNILCGKAAEANRTIVKVPAKDTSQLCSRCKARVPKDLSVRIHSCSFCGLVLDRDHNAALNILKFGLGQSPQVPCTVS

SEQ ID NO: 36309 - protein, 116 aa, Salmonella sp.
VKNVTVSQSCGKWYVSIQTEYEVADPVHNAGSMVGLDAGVTKLATLSDGTVYQPVNSFKVNQRMLVTLQRQISRKVKFSHNWQKQKRKIQQLYSRIANIRRDYLHKVTSEISKTTQ

SEQ ID NO: 36310 - protein, 1173 aa, unknown
  TnpB Polypeptide
MPSPQNDGPADTDTTGLLAMKDSSSRMDGIGRRKSKPPAVRANLSGRACANLTGEPSSLVRLAVRIARSTPLASISSSTFGMSHLPKMESSFLKYSFLTRNMYSGCSESPKWTLTRQSWARGAAAIRTSPRSPEDAPAFGPGRNPVPGHAGQHDWAKTHPARLRSFCEKRCDYTGMRIAYRCRAYPDAEQQAVLNRTFGCVRVVWNRTLARRQARWHREREGTSYAETDRALTVLKKDPDLAFLNEVSSVPLQQALRHQHRAFSAFFAGRARYPRFKSRCSRQSAHYTRSAFRMKDGRLWLAKTAAPLRFVWSWPATDAAVLDPTMVIVSREPDGRWHVTFMIDGDGPEPLPKTGGAVGADMGVKDFAVTSDGRRMPNPRHLERKARNLARYQRRLARCQNGSANRAKAKAKVARAHRKVRNARGDYLHRASTRLVRENDVIVIEDLAVKNMVRNRRLARAISDCGWGEFRRQLAYKCERHGRELVVIDRWYPSSKTCSACGHLLAELPLSTRHWTCPGCGTRHDRDINAAKNILAAGLAVARDSPGDACGANVRHSGTSRVQSAVKQEPRPVRAGIPVLQDSVGEVVFGDFRHGSRCEGEAGQVRDTGGAERGAVQPGVGADEVDGGGGQDVREVGFVLAVVGGASQPGGADCLGDGALDAGTDVVAGLPFRGLLLGALPGEDLVLLAGQQGQAAPPPAVRCLSAPGPQRARVAVGEREVDPGDGDPAGLALVRPADAGRPVGAGDRPGVPVDGEGGLGQKRLLPAVARALGGVGADRAEQGDPVVVAGREDAAGADVPGIDHVLRGRQPPAGEPLVDDRGHLGVFHGRAGGLHVRDQVRHVRLAGLGQVGLVPGPAVPALDSVAGIRVIGGSQAVCARREVLALPPAHLLPVPAVLLVPGPAQGHDRRDLPQPSRGTRRGHGVQQREAVPADLPEPPGPGVFSLGEAVGVDPGAVTVRPFRADQRGKPAGGGRGQGFQRGPQRFADELHPVQRPHRGQHVRGVGPLPPAGAQQPGTGQPCQHRLQHFLLHAVPDEAIPEVSQDGEVEAGVIELQAEQELPVHPGPHLVSGLPVRQALRVLQHRHQCQPPGRGRRAALSREGRSEVLVREHRSERLPDPDGQGPFGKRRPHHPGCQLRHPVIRSRFQRHPAPSFRQRSGHSGNANYEDLPGR

SEQ ID NO: 36311 - protein, 371 aa, Saccharothrix sp.
VQLRYNFRVDPTPGQRIALARAFGCARVVFNDGLRARQAAREAGLPYVTDGELSEQVITSAKTTPERAWLSEVSAVVLQQALADLNTAYRNFFKSLSGKREGRRVGPPRFRSRKDNRQAIRFTANARFRVLDNGRLRLPKIGDLRVRWSRDLPSDPSSVTVVKDAADRYFASFVVQAGDAPLPPVGQETGIDLGLTSYAVLSDGTKTAAPRFLRGAARRLRKVQKALSRKAKGSANRAKARVKVARAHARVADMRRDWHHKLSSTIIRDNQAVYVEDLAVSGLARTRLAKSVHDAGWSAFVSMLEYKAVRHGRTFARIDRWFPSTRMCSACGAIGAKLPLDVRSWTCSCGAVHDRDVNAARNILAAGRADR

SEQ ID NO: 36312 - protein, 377 aa, Megamonas sp.
MILAKKVRIYPTKEQEQKLWQSVGTARFIYNYTLAKQEENYKNGGKFINDGVIRKELTQLKKSELTWLNEVSNNITKQSVKDACKAYKRFFKNLANKPKFKSRKKSKPSFYNDPIKLKIKEKKVLIEKVGWIKINEQIPINVKYNNPRITYDNKYWYLSVGIEVDKKQEGLTNISLGIDLGLKELAICSDGKVFKNINKTKKIKKLEKRLKQKQRQISRKYEINKIKKEGGKRYQFIKTKNIKKLENTTKLIYRKLANIRNNYIHQVTTSIVKTKPYRIVIEDLNVSGMMKNKHLSDSVKKQCFHKFRQYITYKSELNGIELVVADRFYPSSKTCSKCGFIKKDLKLKDRVYRCPHCGAVIDRDLNASLNLSMYKLA

SEQ ID NO: 36313 - protein, 313 aa, Candidate division WPS-2 bacterium
  misc_feature (8)..(9): Xaa can be any naturally occurring amino acid
  misc_feature (286)..(286): Xaa can be any naturally occurring amino acid
VAAAARPXXIKSMKYRLVVRLYPSARQAAACEHLLTVTRRLWNALLAQRRDAWKTRRLKISSKRQYHEITELRADDPWFASAYRECEDAVLHRLDLAYQKFFSGGGQPRFRPASRWSQFEFPHGDRAVRWVKNQDRITIPGVGSIRVRKGRARVIPAHGRAMVYRRCGKWYALFECEVAPKPLPATGKVVGIDRGIRALAATSDGELIANPRHAAKLALKVARAQRTLARRTIRDAAGRVRNGDGKNRVRAVKALQKVWNKVKRMRRGYLHEVARALVDRYDAIAXSIMRCSMRASRCCGRWLARRQNALLAW

SEQ ID NO: 36314 - protein, 417 aa, unknown
  TnpB Polypeptide
MRTKKHPQPQLSIRMQMKPRPIFTDLCTCAKNLYNRATYEVRQEFFQTGKWLQYTALYHRLKHEPVYLELKAISDSYLPQQVLRQIEQVWRGFFNALKAWKKDSTKFQNRPRTPHYKPKNGRHMLSFPRPRVRIRNNRILFARNLMIRGFPAFPVGALPLTAETCVGARLVPFYDRFVVELIYEVQVHPFPSSDFPSRAMGIDLGLTNLVTTSDGLLVKGGIVKTINQWYNKQLAHYRSRASLCNHPLITQRILRLHRVRTNKLRDFFHQTTRRLITYCLTHNIETLVIGYNAGWKHQCNLGKRTNQSFVQLPFLQLVQMLEYKAKLVGMTVVRVKEAYTSQQCSKCSHTEKKNRKSRGSFSCLRCGVHLNADYNAACNILQRCLNPSQVVPTESIHSHVANLPDSGCVIHPVQNSF

SEQ ID NO: 36315 - protein, 426 aa, unknown
  TnpB Polypeptide
MLRTRGYKYELCVNNKERTLLTKCAGISRFTWNWGLANRKNRYRTQTGEARYTDAMKQHKELNNLKHTDFPWMYEVSKCVPQEALRDLDRGYQNFFTNHQQRKKNQTTRYVGLPKFKKKGKCKDSFRLTGVVRLFPEVKQVQLPRLGKLRLKEISNLPVSTRILSATVSRTADRWYVALTVKEVQIDREPNGGPLVALDKGLSVFAALSSGIPIVRPKFLLRQARKQCRLAKAHSRKEKGSNNKQKSALRLARFYRRITNQRHNFLHQTSTYLAKNHSVIVTEDLYVKGLMQNKKLSKYWADLSHGMFQRLLKYKAPLYGSMVIEIDRWFPSSKLCSNCLYYRRDLTLADRIFHCPLCGLVLDRDQNAALNVANYYSIYQFLLFPVAESSAETLNACGEVARPAFQQARVVESGRTAPKTVCNNFS

SEQ ID NO: 36316 - protein, 368 aa, unknown
  TnpB Polypeptide
MFKTYKYRLYPNKQQIEQIQKTFGCCRFVYNQTLSYRKEIYETQKKSMNKTSSNNYCNQVLKKEYEWLKEVDKFALTNAIYNMDSAYQRFFKGYSSYPKFKSKRNNKKSYSTNFTNNNIEISFENNKIKLPKLKWVKAKIHREFMGKIKSATISQVPSDKYYVSIMVEQEIKELPKNDFAIGIDLGLTDFAITSDGVKYSNPRYLQKSLNKLAKEQRKLSRKKKRSKNRNKQRIKVAKLHEHISNQRKDFLHKLSSELINENQVICLEDLQVKEMQQNKYLSQSVSDVGWYEFRRQLEYKAKWYGREISFVDKWYPSSQICSNCGNNTGKKELSIREFDCPYCGKHHDRDINASINILHEGLRILNNK

SEQ ID NO: 36317 - protein, 365 aa, unknown
  TnpB Polypeptide
MYKRLKIRLYPTKQQEQILQQHVDGYRFAYNLCLEYKKHLWTYHKKIISGYDMQAELFILAKEVDFLSICKVECIRQAVLDVDKTYKKFFKQGKGFPKFKSKKDKQAFVANQSLIVKNTVLCFFKQKIKFKTSKKYEIKLQNSKIKQCTFIKDKTNKWFVTCLIEDTEIKVLPKTEKSVGVDLGLKYFLITSDGEYVENNKFSIIYQYKLKKLQRKFSKSKKGGKNREKLRIKIAKLYQKITNQREHFYHQVSNKVIRENQSITIETLKIINMVKNRKLSRAISDVAWSSFTNMLAYKCNWYGKELIKVPSNYASSKICSCCGNKKEDLKLSDRIYNCNGCGISLDRDLNAAYNLKNYRDKCTQI

SEQ ID NO: 36318 - protein, 425 aa, unknown
  TnpB Polypeptide
MDDAIKLTYKLELSLTNQQKYWLDQEIGISRWAYNHFIEANENRYNLQQFMIHHLFVNFYPFVSMSNLIFKNISVIKQTLKYLNGYDFSKYFNNVYFKTHPDDTWIKGHYTKNIKQAFLDADRAYRSFMKGKSGFPRFRSYRRNDGSFYVVRNSKTTPIKHNRWQIKVPKLKTLLRFKTIGYLPKKSEILSLRIKRKANRYYLTAIVEKPIQKQSLQNNPIGIDLGVKNFAICSNTLLYRNLNKDSKVRKIRKRLRRLQRQFSRQLIAYRKRVNKYGKREATDFNLAKTKLRMQKLYQHLTNIIFDYQNKIISELVRTKPKYLAIEDLNIKGMMKNRHLAKAIQQQAFYQFRTRLINKCKYLSIPVHVVKRIYASSKRCHNCGFKNKNLQLKDRIWTCDNCKTKVDRDYNASLNIRDTDQYDLAY

SEQ ID NO: 36319 - protein, 364 aa, unknown
  TnpB Polypeptide
MPVKAYRYRLYPTKSQISQMEQTLEICRWVYNETLAMRKNAWEREQRSISYYESKRQIPIWKKERPELSTVHSQVLQDVSLRVDLAFKAFFRRLKTEKEPGYPRFKGKGRYDSFTYPQSGFKLDGDRLHLSKIGDVKIILHRPIEGTIKTCTVSRSSTGKWYACFSVEYDPPPASQKEMVIGVDVGLESFATLSNGEKIENPRFFRTDEKALAKAQRKLSKAEKGTPERKKARKNVARIHERIAHRRLDFAHQTSRRMVDQYGMIVFEDLNIKNMQKNHCLAKSIADVAWNQFITITENKAEEAGSQVIRVNPRNTSQRCSGCGMIVKKTLSDRVHTCPHCGLMMDRDQNAAINIMRLGLQSLG

SEQ ID NO: 36320 - protein, 370 aa, unknown
  TnpB Polypeptide
MKTYCFKLYKAKRNKKLHHQINAAGLIYNHCIALHRRYYQLFGKSLKKYDLQKHLTKIKKQPKFSYIVEIGSQAVQDITDRIDRAYKLFFRNLKNNIRTAPPSFKKIKKYKSFTLKQAGFRLDEESNIIVINKQRYHYFKSRNVEGKIKTITIKRDCLGDIYIYLVCENKANEVLTRTGESVGFDFGLKKFLTASNGENIESPLFFLKNSNAIKKANRNLSRKQKCSNNRYRAKLALVRLHKKAANQRKDFHFKTALDICGKYALICIEDLNIKGMQRLWGKKISDLGFSEFVKILKYQASKTGSTIVEIDRYYPSSQICNNCGYQNSKTKDLRIRKWICPKCGVEHDRDQNAATNILNVGASTFFGKAS

SEQ ID NO: 36321 - protein, 566 aa, unknown
  TnpB Polypeptide
MGTSSQYYVVELPLRIGDEESRRLAMAFEFGRTIYNATLGQALGKLTHMRQSTEWKNAFLIKKVSDRNAELKRIQKKYGLNEFGLGDMAANHRKASGKTNLIGFTEAKFIGFTVWRALERYIYAKGGRPRFKTKRRGLHSMYCCGNRGIIWKPQLQSVVWRGYRFPALVKHTAYFQEALGSEDSPRQVKICRIVRRILNCRERWFVQLVMVGLPPVRHVYAPKSETIGLDIPSKVAMVSPNFAGFTFLSPYGEIPWAKIRNLRRKMARSLRAMNPDNYEPSGATKKGAREWKRSNHYEKLLRELADLYRRAAETRKRDHGALINSIFEQAGTVNLETISYRSYQRNFGRSAQRQASGLFVQRLKRKAESAALTVNELDTRKLRMSQYDHRTQTYTRKPLQQRWHSLGGSDTLVSRDIYSALLACCVKNGEHDPVSIERCWQAVEHQLKSAGFVRDIKLPRDSCRGSCGTHRRVSHQRQCRRKFSVSTVTSDRASLSKLASSEKLLMYRNLLNNQAVVRSPLNVLEIFRQSHEKRRNLSDLLEVIQVITRKPRYRSGSPVRAVPACC

SEQ ID NO: 36322 - protein, 228 aa, unknown
  TnpB Polypeptide
MIKVYKYKLKPNKNQKIFFEKSFGCTRFVYNWALSKRIEAYQQEKKHLSCVDLCKLLTSLKKEEDKLWLNEVSAECLQQSIRNMDNAFIRFFREKKGFPKFKSKKDRQKSYKAINNVKIDFNSNKILLLKIGWISFYKNRTFEGKIGTVTITKTATGKYYVSVLVDDGKELPKKPDIKYSTTVGIDVGIKDFAVLSNGKVYENPKYLERAEQRLKVLQRRYSRKQKRK

SEQ ID NO: 36323 - protein, 391 aa, unknown
  TnpB Polypeptide
MAEITCSKAYKYKLTPTPAQEQIMETTLWRCRTLYNTALEERKTAWERRHVSLTCYQQQAELPDLKAAFPEYADIHSLVLQDVLVRLDRAFQAFFRRIKNGEKPGYPRFQGANRYHSFTYKQFGNGARLDNGFLVLSKVGRMAVRWSRPIQGTPKTVTISREADGWYVSFSCEGVPIQPLPLTGQETGIDVGLKVFLVTAHGLVVENPRHFRKSERRLKRADKAVARCQKGSHGRRKAVARRANAYQKVKRHRQDFHHKVALQLVRENDVIYLEDLQIANMVRNHHLAKSISDAAWAQFRSILAYKAACAGKRVEAIPAQYTSQDCSGCGERVPKSLSVRTHVCPSCGLVIDRDENAAINILRAGQARWALSRTDGYNHPISRFVQESPVL

SEQ ID NO: 36324 - protein, 373 aa, Clostridia sp.
MELVITAKVKLYPDFVQKAQLIETLKAVKAGLNHASRVAYDNGFITSFKKLQKMTYSDLRQQYGLKSQMACNVCSVVAGSYASMKSNGEKTLAVYKTPKFQYSYGRDYSFTKNGMLSIGTLDKRIKLPFEIKGMKQYFDGSWNFGTATLIYKKDKFFLHIAVKKETPILEDNSVRNIVGIDFGMNFLAVSYDSAGKTNFFEGRHIKDKRAKFTKTRKSLQQTKTASSRRRLKKLGNRENRWMTDINHKVSKALVSGSIEGTLFVIEDLTGIRSQTEKVQRKDRYYSVSWAFYQLRQMLEYKALRSGSKVVVVDPKYTSQTCPKCGHTEKANRNKNTHTFTCKTCAYTSNDDRIGAMNLQRKGIEYIAEVMLSV

SEQ ID NO: 36325 - protein, 627 aa, unknown
  TnpB Polypeptide
MKEQTRNFTYKLIDENDEFTSNFIFFLKEQNKQLNKLVSFTSAIYSDNKEKLDKALKSKGNFRTELLRLLKSDYKEFYQSVYMDSEIYGNKAKYFRTVIEECRRIILSRFHRQTIIKIIENRFKINNLTIKQLDDSRSNNPSLYNDFYQKIFDDVCEFNKHWLSKAEFNNIIKQLVNSESSQCLSTLSTLSTLSNDNELSIYAIDYSSEDDQISEFSFKTIEEHIIVEFKLKYSNYLTKNDSLLTYQCKVPKKQFKGLETGYTKINKITRPRVFIKSNDSLESLDLNSNQLYISFNYEVTPIAKQTDTTDLITRTMGIDIGVVKSATAAIIDVDWELVEQEQSQSQSQDKSEEVKETEYVTEYVIKNIAISNELTVSEKTKETSVHIDLLKTEQNHIFAKENQIAKLLKIDNSKVTDETKTNSDLFKKYNRLRDLRLNLRHKVSNLKEELAYLTARDMVSHAIDNNVDLITIEQLSWIRDQQHTTWDYNQIQQKIVHEANLYGIKVKKVSCAYSSKHNPLTLEKDEMDKNRQLIKCLFDRDYAAAIILARRGFKQLNNKKLHLHLQLHEDKDNSNCFDSFHAVSYSVKPSLFYRQLDLSSSYNNVNNVNIIQCLHSNRIMFANYSIL

SEQ ID NO: 36326 - protein, 407 aa, Archaeoglobales sp.
MEVTKSITVKVSKRINMNKFLAIRDFFNTYQTIARIYYSYILENSLEKKLISGKITATDLKNILHQEFYKQIKETFDIGSQTIQEIRDVVVEAINSYAKLVRKGHEASLPKVKQFTVRLNYPRVVSVFEHGKEFDFFFKVKLNGGKRVAIPIECGEMQKQMLKDALNGKYKIGAFQLNRGDGWFYFVIPLKKETKLKESYDGVIGVDLGLRHKSGKITHREFIKYRKLMHKIRMLWHRIDELKSMLPKGQRTSKRIRRLWRKISRINNWIAHNVSKRIVDVAKENNAMISLEDLKELKPRKGKNSRRNNRRISNWVRGKVIEYTLYKAQWEGIKVKIVPPKNTSKVCHLCGAEGFRRGSIFKCSRCHRSYDADFNASINIGIRATFPDVKGCVNHPVGLIALQSHPF

SEQ ID NO: 36327 - protein, 388 aa, Domibacillus sp.
MAIHKAYKFRLYPNKEQDVLMAKTIGCSRFVFNRFLSLWNETHEKTGKGLTYRACSSQLPELKKEFTWLKEVDAHALQSSLKHLADSFDRFFNKQNKAPRFKSKRNNVQSYTTNIEKKNQSPDVSIAGHKLKLPKLGWVRFAKSREVKGRILSATIRRYPSGKYFVSLLVETEVQKLAKTNSSCGVDVGLKDVAILSDGTVYKNLKFFCTLEKKLAKEQRILARRKEGAMKRKCKLTEAKNYQKQKVKVACIHEKIANTRADYLHKVSTEIIKNHDVIGIEDLQVSNMLKNHKLAKAISEVSWAQFRAMLEYKAKWYGKQVIVVGKTFASSQLCSNCGHQHKDVKNLAIRTWDCPSCNTHHDRDLNASTNIKNEAIRLLTAGTAELAY

SEQ ID NO: 36328 - protein, 444 aa, Domibacillus sp.
MFVTHSFRIPYDQNVYDELRIMQREAAAVWNDIVREATSYYFTCKKWLSKTEIQAIRKQTYDLHSQTVQAIADKYAANRETIRQLRKTDKKAKYPWRRKYYYCIPLKKASMDVSKDTITIKKSEYGYALSDLLTKRKKKEWTEKVPKKNMTVVIPNRSEENLENCNYAEVVWRNGAYWFCYAVSVPKKDLSSYDCKVAGGDLGEIHAVTVATEEKALLVSGRAMRSLSQFRAKALADLSKKMSRCKKGSNQWKKYRQARMRLRQKSKNQLEQLEHKTTKEVIAFLEEEHVTNFVIGHVSGIEKNTKKNSQKKQKTNKKRRQQLSLWNQGKIKQKLTYKAQLKGIQVEETEESYTSQDCPFCGGRHHARGRSFTCSVHKTEIHRDVNGAQNIARKQHHMAGKPLLSVVYKQPVWYKRFLSEEQRQKTKQLNDRPKKEKRIASGMA

SEQ ID NO: 36329 - protein, 341 aa, unknown
  TnpB Polypeptide
LPAKVSQQTMRLVDQNFSSFFAANNDWKINPGKYKGKPKIPRYLDSMDGRFEVIYTNQAISKKALKDKFIVLSGLPGIKIKTKVFDKKINQVRIIPRVGRYIIEVVYTVSDTPRKLLDNGIYAAIDLGVNNLATVTTNLEGDKPLAIDGRKVKSINHYYNKLKAKYQSQIPTYKLKKTTKRLRRIETKRENKINDYFHKASRYLVNQLVSKGINTLIIGKNNEWKQDTMMGKVGNQNFVQIPFNKFISMLTYKCGLEGIDVKLIIEEYTSKCSFLDNEEIRKHDVYMGKRKHRGLFVSSTGKTINADVNGSYNILRKCKPSAFSAKGVQGVVVHPHILCFA

SEQ ID NO: 36330 - protein, 390 aa, Bacillus sp.
MLIKKAFKFRIFPNKKQIELINKTIGCSRFVYNYFVGEQKEKDAYWSIVNEMVQSGLLLENNWKGEFFNKNKSIKSLPKLKKNYPFLQEVDSIALQKSVEIVNDAYTRYYKKQNGEPRFKSKKNPVQSYTTKFVNRNIEVVDKHIKLPKLGLVCFAKSREVEGRIMNATIRGSPSGKYFISILAETEVEELPKSNSAVGIDVGLKDFATLSDGTIYQNPKFFRTLEEKLTKKQRILSRREIGLRIGKNKKQKWLKFMRKSQMHDRDMLHKISTEIVKNHDIIGIEDLSVKNMLKHHNLAKAISEVSWSHFRTMLEYKAKWYGKQVVSVAKNFPSSQLCSTCGHKHKDVKNLALREWTCPICKSHHQRDSNASINLRNEALRLTAGTAGIA

SEQ ID NO: 36331 - protein, 494 aa, Bacillus sp.
MARKSTPTYTIEFALTIPIWQQHRLEKKFKIARTIYNSCLGEALKRHKSVKGDKQYRTLLSEPKSKERDKRLADIRLSHGFSEYGLHHFVKLVQRKFREHIGSFEAQKLATRAFLAVEKLHYGQSKKVHFKSFNDDISVENKSNTTGLRYADGSVLWGDKPTKKNPKPKNWLCMPISPRAHDEYAHLALMDKTKYVRLLKREIRGKKRYFVQLIQEGYPPTKRNRKIAEDEMKRVGLDIGTSMIAISNQRVVELRELAPECKIDEKKLRCIQRKMDRSKRNTHPDNFNKNGTVRKGKLTWNFSNRYEKLRQKRKEHYRKIAVHRKMSHEKLANDILSFGSDIRVETMRFQSLQKRSKKTTQNQTNGKINRKKRFGKSISNRAPAMLLAIIDRKLGYQRSSIKKVDTYALKASQFNHLNGQYNKKHLSDRWNDFGEFRVQRDLYSAFLIANTNENLNSVDMNLCNAQWQRFIELHNQEIARLKQSSNKLLRWFVA

SEQ ID NO: 36332 - protein, 387 aa, unknown
  TnpB Polypeptide
VVKAMIRTQKVRLYPNRTMKKVLDDLCDYRRYCWNQGLALWNDMYDASLISEDKELLPNERKVRKELVANKEDWQYQLSSRCLQLASLDLGKAWKNFFNKAQPDWGKPQFKSKKAPRQGFKTDRAKIVNRKLRLDKPHGIKKWYDIRLKGTKSLKGELKVVSIYRENGKYWASLPFETEIESKVKTGKKTAVDINVGHFNYTEGQVKTLSNNLKVLYERIEHYQRLLARKRKTNGKKATKSNNYVATKAKLQRDYRKVANIQHDIVQKFTTKLVNDYDEIVIEDLDVKRMQMSHVASKGLQRSMFGYFRQALNYKCQWYGKELFLADKFYPSTQRCSQCGFVKTGDDKISLDGNLKHKTKHSEYVCYECGTVMNRDENAVMNLMALI

SEQ ID NO: 36333 - protein, 430 aa, unknown
  TnpB Polypeptide
VFRTIKYHYKCSSYEKRLLMFLFHISKNLYNVTLYTLRQQYFNNEKISSYFELNKLLNSNENFHLLNTYASICTIRQAYNSMSLFLKNHNELPKYLSKRDVYSLYTDQVRPIIYKNKKCIKLPLSNLVRTNKIFSTYFNDPLINEFIKELNINRIENIYFPIPKVIEDKEIKQVRIVPKYKGEYIEIEFSYLKDSIELEQDNKNILSIDVGINNLMTLVTTSNNSYIIDGKRLKSINQFYNKQKAYYQSKLVNNKYSKRLHRLDIKNKNRVNDYINKAVNQVMSISKQEKVNTIVIGYNKGLKQKGIKNENITTKEKARINQSFVRIPLSRLINKIKYKCEEYNITCIIVNESYTSLSSFYDNDEINKVEKYSGKRIKRGLYLTKNNIEVNADVNASLNILRKSKPNDDEVIHYLRDRGLTIPKRLHVVL

SEQ ID NO: 36334 - protein, 321 aa, unknown
  TnpB Polypeptide
MIQTFKLKHGKDFSTQLRKAHQVGNVALKTHTLSTADVKQFGLPSYIAQGVLRKYSRNKKLKQVRSVKLTINNPAGFRFESGVVSVKCLSLALPWYYRNFETLNQIELDSQYAYVSVSFPDKPQIVPQSWIGVDRNTTGHVAVAANPSNGKAWVFGVRIPHVHQKYLALRRELQKKGHYKVVKKIKNRESRIVRDLTHKISRSIVELAKSQNAGIKLEWLKGIRQSSRWRSSKLHSWSPYRLEQQLLYKSKMEGIPITYVEARNTSKDCSRCGCVGIRTGNLFECQNCRRVGNAHVNGAFNIAQRRSISIPTFKTQRWRAP

SEQ ID NO: 36335 - protein, 486 aa, unknown
  TnpB Polypeptide
MSQKVRIDGVRHAGASVFLGVDHCNNPCWSRNPERVMVWLCDGWRTRFNQRREQRPHNVPVKDEAGEIIGWLREPLGGSDVPELISDRETRLQCLWMAAVPSSILATTDRIEGNEWFAGLKRKKTAGGRVPGFKSRHRGLGFVCWYHPSGNSYNAVFHKTGRRSGVVVITGMNPTRWRRPGEKLHWRIVIHVRVSQPIRPYTSVHVDWTHKSLTFTNMPLPLPRIGDGVIGIDRGCVHTLASSDGIFMDMPKPSKAELKRLRYLQRRMSRQDRVNEARGGRTAKFASKRRQRTLTEFNALNSRIIRRRDDWIEKTTTTLAKADILVAMEDLDVKAMTKRPKPKPDPDKPGQYLRNGAKAKAGLDRSILSSNWSRLMKRLKDKMDANGGKLVIVPAAYTSQACHKCGHVASENRDSQAVFHCVECGYRANADINAAMNILSRALDKTGGGTASDVEDPQWRSREASTPSTQAGSSFGVRAVKGIPRL

SEQ ID NO: 36336 - protein, 435 aa, unknown
  TnpB Polypeptide
MSTRKSKTAKGREQAVSLISRRTVMLTLTLDDSQFDLLAQVAEQCNRLWCTVVSWCNRNHTVNHTRIHRENYRRLCEQFPMLPSQFVCVAMREAAGAVRSWNSNHPKRRWNLKTARKALVINYDLRTMSVRGNMLTLSTMRGEQRIRTLMPETPDWFAVRYPSRKLNAANLLLDPRTRTARIALICHVENETPVADGDVLGVDLGQHSLYVDSRGGETKSSKIWGTKRKYAHNRKTLQEKGTRSAHRRLKAMSGREERFIRDVNHCVSKRLANSPNVQAIAFEDLTYIRRQATKRTKTGKRRRNMLNQWSFSQLQEFTAYKAAANGIRIVMVDPSYTSQRCNRCGYVDAGNRSGARFDCKRCAWSDNADHNAALNIRDRAIASLEDDYISTDRPVDRVLSTTRMDGTPTMTSTSDDDGRVVGATFASKPLSLPQR

SEQ ID NO: 36337 - protein, 345 aa, unknown
  TnpB Polypeptide
MARKREEVKPTIVGRLYLESPVDKAKLLHLMRKFRDAIEMAHYHMRQGRDINEIHRRLTRFLDNGHYAHSAYQRARLYKNQPYLKLRKPQLFSVGRACEKGNRNIRLSSTERVKIKIPHADGKHEWIEGRTRFGSRYLPLIEELVKLENISYSAGIYIEDRGFVICISVPLELYVKHFSKKPRNKIVGHIASFDLNPDRICMVIVNQQGKILDIRNEYFPEVTSHGFPREKAMHLRREAISKLVTYASEHGVEHYVVERLSKPRGKAKSKSGRRKQSKFAVREYLQQMQVLVPKVGGKLHKLNPAYVSIDAIPLSKKLGLDIHTTSAYLLAIRYIRNRRTKRNKN

SEQ ID NO: 36338 - protein, 373 aa, Bacillus sp.
MDMTKQNKAFKFRLLPNKEQAVLLAKTFGCVRLVYNKMLSERQETYEKYRNDKEMLKTQKFPTPAKYKDEFPFLKEVDSLALANAQINLQKAYKNFFEGRSEFPKFKSRKHKQSYTTNRVNGNIELQDGHIKLPKLKLVKIKQHREIPADYKLKSCTISKTKSGKYYISILTEYEKDIKPVSIKKVVGLDFAMDGLYVESEQGEKANYPRFYRQSLDKLAKEQRILSRRKKGSARWEKQRLKVAELQEKTANQRKNFLHHKSKELASNYDAVIIEDLDMKGMSQALHFGKSVHDNGWGMFTTFLSYKLKEQGKQLVKIDKWFPSTKKCSCCGAEKPMKLSERTYRCSCGYMAERDYNSAINIKNEGIRLLALS

SEQ ID NO: 36339 - protein, 421 aa, Halorubrum sp.
MSLYKTYIFPIHPDDQEQARQISRCAGRIYSKTVSTVHKLHERKDIWLSESAMKKLIRLYAEDFLTHAQSEQAAVEQYYKALDSFFVKRKSDDTARPPYRTFKYQNVVYKESAITRMDDKVRFSNGRKGTPLYIKVEYFDGEIKYAEMIYNTYKESYQMHVVVDIESNIQVEDSDKVMSVDLGQIHPIVTFDGDNTRIYNGGKLNSFARFQNKELSRLQNKMSRCTKYSRRWRKLNRAKKKLLRKTADKIKDVLRKYTSTLIGYCVDENIGTIVIGDIKGIRENIDYGKKTNQSLHQWIFRRLTDMIEYKAEFVGVNVEYIDESYTSQTCPACGNRYKPSGRNYRCKECGFEYHRDGVGAVNIYKKYTVGSLERKSDWLEGVLASPVGVRYTPHLRCSADWNASPFRTGHSKVASAEKAAV

SEQ ID NO: 36340 - protein, 380 aa, Chloroflexi sp.
MKTFEYRLFVKKEQSCKLMACLRESRTIYNGMLEMVKAQDERDGTFPSKYELEAAFKGKGEHVPATTVQMLADRLSKSLKRFLVAKQNDIPGIGFPRFKKPNRWHSIPLRQYGKDCYLHEDKNHLIVPKKMGHFLKIKLHRPIEGTPKTVHLVLRADGHWYALIVCETEPQHEHLPSTCEHPDIGLDVGLKSFLTDSEGNTVENPRFYRTSQRTLRRKQRTMCRRKKGSHRRRKAAKNVAKTHLKINRQRRDHHFKTAKPYAEGYHHLAIEDLQITTMVKNHHLSKSILDAGWGQFLDILEDRAARAGHQVIRVNPRFTSQKCHQCGEIVQKSLSVRTHVCPFCGCVADRDVNAAKNILQAARLGHSLQELTYTDGCRVS

SEQ ID NO: 36341 - protein, 397 aa, unknown
  TnpB Polypeptide
MLRRVSHTLKFATSAKKRKLKEFFAEYERLVNAFIQLYWTAESIPSKANSQVYNQVDSWLMGKARKCAVNQAVKIIKSVYKKDRQKTYKAYQRVYSKAKKRGRDVSGILSRTWSKWSKGKTFRHRISTPRFNGNTIDLNSDLVRIQGSKTCEFDLWIRLGSIFGNRFSLLLPTRHHKRSRHFEDTGWTQRKSITLRKDKCGQYYADLYWEKEDIDISQQGFALGVDIGIQKLMTCSDGSQFGTEIRAKLDKLNRRQQDSHNWRQTCSEIKDYIGYATNNFPWSQVDVVVMENILNITKSTRGKVNKTLRKLLGHWNLDLLYRRMADKAEESRTFLAFVDPAYTSVSCSSCGAIDKKSRKGEVFKCFSCGYADDADHNASLNILRRFLDGQFTVARGT

SEQ ID NO: 36342 - protein, 473 aa, Cyanobacteria sp.
LPWSNSTELEKGGEQYMATRRHTFRLYPNKTQEKKLFEARRIHCYLYNACIAHRRYEWRANKRSVSYFEQQNCLPEFKKFWVEFAYLNSLSLQSTVKRVDLAYNAFFQGIRKLPKFKSIQKYSGWTYPALPEKSGWKVDSNGKHGRLTLKDLGITLKMRGQAKNWGNPSTLTILYKPGLKHWFASITVEIPDAQSRFGSDSQLKYESIVAYDLGTETAITTYNGSEFAEVSNPRFTQALAPKIKQASIALRRKRAPNRKKRIKASNRWKKANRKVARLQRKAGNQRKDWQHKVTSDIASRHDIGVTEKLNTKGMTRKAKKGSKRKKQKAGLNKSILSVGFGNLNKLLSYKIEGKGGLLITLDTKLVKPSQRCPNCGTVHKQWADLSNRYHVCNDCGFEVERDKGSVMVMYNVATNQQQGLGTSLLDVGLSSSTSSTVQRKHTGSMKQLGKVKRQKSQIKSDGDLETSSSYEAG

SEQ ID NO: 36343 - protein, 382 aa, unknown
  TnpB Polypeptide
MKTFEYRLHTTKEQDHLLMQCLIESRHIYNGMLEMMKAQYEQDGTFPSKYDLEAAFKGHGTAVPATTIQMLSDRLSKSLKRFLAAKTLGLPNVGFPRFKKPNRWHSIQLRQYGNDKNRRDVMLAPDEKHLYIPKMLGGSVKIKYHRPMEGTPKTAHLVLRADSHWYVLLVCETDIKNEHVPSECTHPEIGIDVGLKSFLTDSEGNTVDNPRFYRTSQATLRRKQRTACRRKKGSRRRRKACKSAAQTHLKIKRQRRDFHFKTAKQYADTHKTIVVEDLQIANMVKKHHLAKSIMDASWGAFLDILEVKAGNAGHHMIRVNPRFTSQKCYTCGEIVQKSLSVRTHICPFCGYIADRDRNAAQNILKRGLGLGHSLQESTSRDT

SEQ ID NO: 36344 - protein, 385 aa, unknown
  TnpB Polypeptide
MKTYKTEIILSPKQIELFNKTVGTCRFIYNLYIAENKTLYELNKNNEFKKFLNNSEFSKYLNHEYLLNNPDKLWIKEVSSKAIRNSIDNAYIAFNKFFKGLSKFPKFKKKGKSNESYYFTRSSVVQRITFERHRIKIPCLGFVKLKEYGYIPKSENIISGRIIRKANKYFISLITDGELKIKENNYNEGIGIDLGIKDFAIISNGQTFKNINKTSKVKSIEKRLKREQRKLSRKFKNKKKGDATGQNLKSQIVRVQRLHLRLSNIRENYHNQVANALVKAKPEYITIENLNIRGMMKNRHLSKAISRQGFNKFIEKLKFKCYENSIQLRQVDRFYPSSKTCSNCGNIKKDLKLSDRIYKCSCGLTIDRDLNAAINLKNAKEYKIT

SEQ ID NO: 36345 - protein, 440 aa, unknown
  TnpB Polypeptide
MRQKMTAKLKLYTNLDQFMALRTTQLAYRDALNYASRCSFTHGKKSNQEWLQRETYADLRAVYHLPAQMACNVPRQVGATYKTLWTKVKQNHAARKAGITRKRYKGLDQPPKYVSPTLTYNYHRDYSLKSDNQVSILTLEGRVVVSYSGYGKQLALMQHGAHIGAAKLWYDKPCKQFYLLVTFEVELADPTPETHQQIVGVDVGQRYLAVTAPLDNGASFYSGRQVQAKADHYGRLRKRLQHKGTRSATRRLVIISARERRLKQATNHEISRRIVEQYPHSIIGLEDLTHIRERTSRKHGKKATGRQRRANRHASNWAFAQLHGYIAYKAMRVGSLAVRVDANYTSQACPRCGHTSEGNRPNKGLLFVCQSCHYRLHADLIGARNVALRTLLVRQDWMSTGVLSVRPDVSSEEAKAARLQRYAELRWSPDTSPRHLCGGN

SEQ ID NO: 36346 - protein, 372 aa, unknown
  TnpB Polypeptide
MRRTFKYRARLSRKTEVNALCWLGLCRTLYNLTLEQRIINYREFQHSTTAFEQMRQLRELKDQYPEFKVVYSHTLQDVIKRVDRAFNLFFSRCKAHKEKAGFPRYRGADRYDSFTLDYIAGWKLNGKNLNIRGVGVFKLHLSRPIQGQIKTVTIKRSPTGRWYAYFSCDDVPKREFKPTNREVGIDVGLKNFAVDSDGKVTENPRFLRKSQKLLADRQRRLQTKQRGSNNRQKSKLIVAKTHEHIHNQREDFLHKTANHYIQNYNRIFIEDLEVINLIENGKTKLSKSITDASWGLFLGMLQAKAEEAAHEVIKVNPRGTSQICSQCGERVPKTLADRVHSCPNCGLTVDRDFNASLNILRLGQSRLEASCL

SEQ ID NO: 36347 - protein, 376 aa, unknown
  TnpB Polypeptide
MSSMNLTIKTKLLPTLEQGESLLRTIRAFNRACNYISGIAWTDQRFGKVHLQHRTYREVRDQFGLSAQMAVRAIGKVSESYKAEKKKQHQFKELSAIVYDQRILSFKALDRVSILTLDGRILLPMICGTYAQLHRQMVRGQADLLFKCGKFFLCICVEVPDGTPIDPKGTLGIDLGLSNIATTSDGQFFSGKAVNRVRVRANRLRKNLQHCGSRSAKRHLQKASGRERRFKRNENHRISKSIVRTAKDTGRAIALENLKGFQPTVRKADRERFGKWAFSELRQFISYKAKLAGIPVIAVDPRNTSRQCSACGHTEKANRRSQSEFRCVHCGLTLHADLNAAINIAARAPVNVPIVAPIQHPDLRELQARPLQGMGG

SEQ ID NO: 36348 - protein, 195 aa, Bacillus sp.
MKSHFTSVLRNGKQTNEGPFTSKRIEKLHQKRYLKIKDVFHKVSHHIVKLAQEEVCKIVIGQNKSWKQETNMGKRNNQSFCHIPHSLLIQMIIYKANAVGIQVVVTEESYTSKASFLDNDFIPTYGENDQNTTFSGKRIKRGIYRSANKTLINADVNAAANILRKVIPNAWTNGIEGLGVKQLANVLTPLTLIVR

SEQ ID NO: 36349 - protein, 402 aa, Campylobacter sp.
MSKTKNIYSTVRSVKFVLKPNIKQREILESFFGLTRTIYNISLHNIKNSKFGTYEIQNGKNKGNIVPRIPTEFDLNNSIPKLKEEHSFLSLLPATYAQSVMKNLSRGFNNFYRTFNYPKFKAKKNSIQSFNCYAGAKIEGDYIILIKPRCSDYTKDDLKIRFKRHKIKYNFDRVTGFTISKENNKYFISFTFRCNIESKETSGAVGIDLGIKDFAICSDGVIFENKRFLEKSLRKLKISQRKLSKKQKGSNNGEKQRLKVSKLHKKVKNQRNDYQHKVSRELADKYRTICLETLKVKNMVKNKKLAKAISDVSWSSFIEKLSYKVAENQGCLIKIDTYYPSSKTCSNCGCVKETLSLSERTYHCNECGFEIDRDLNASINILNLGLKNIVATVTTTGTTLKN

SEQ ID NO: 36350 - protein, 549 aa, unknown
  TnpB Polypeptide
MMLSPESRTYVTTTTNRWVVAFLSDMAVTNREAKLTCLKLVLKGELSKSQINTSLQQQYRINKRQANSIIAYVEGAVKSAHVCRSNHLELRIGKLKHVTDVSKNLEKKIAAHRKYLQTVEQVNRGEKKRVPKSIKPRYPDACPIRCAHHLTHYEFASVKLHQKKRYAHKLRSQIEHIKQSPLHVTLGNQYTVEMVGSKDESYGNQICQLDLLGKELHIRTPYCLESHYGKYVTFPMRLSRHGQDQLATAWFNHQSITYRFIQKSLREWEIHITVDVLPTPIQSAPAQWGTIGVDLNPGQIGWVKVDKDAHVFRGSTPPETLRGNLEAQGLIRTNIQSQPKGRTEAILVDAVTELTQLAFKYKCPIGVEKLDFSDKKKRLRELPARHNRMLSNFAYSKFLQLLKARCFKQGIQVIEVDPAYSSVIGLVKFMSMYGMNSATAAALVLARRAMWLSERPPARTAYQGKEPRKHVWSDWRLTAKRVKGSARHSFYQPKLTVSSRLRPVRNSLPRSESSAEAIQLSLELGVVSESLTGSRRTARRRAPCISRFA

SEQ ID NO: 36351 - protein, 373 aa, unknown
  TnpB Polypeptide
LNLVNKAFKFRIYPTKEREILIEKTFGCFRFVFNHYLEKSIKDYELIGKSASWVDNCNDSVKLKKEVEWLKEVDSWAITNSIKDLDLAYQNFFRRVKQGKKPGFPKFKSKKNLKQSYRTTNPNKTKLNLKDGKIRVPKLGFVKFKQDRKITGQWLNITVSRTASGKYFISICCRDSEVETFESTGSVVGIDLGLKDFAITSDEEKFENQKFLRKSENKLKRLQRRHSNKIKGSKNREKSRFLLTKQHKKVQNQRKDFLQKLSTKLVKTYDIICVESLKVANMVKNHHLAKSIQDVSWAEFVRQLEYKCNWYGKQLMKIDTYFPSSQLCSKCGYRNPEVKNLEIREWTCQNCGIRHDRDVNAAQNILIEGLKNV

SEQ ID NO: 36352 - protein, 420 aa, Natronomonas sp.
MKRTNTFEVRPRSESDEALLQEVMDATASFWNELTYARRQRFFDDENIWETDEFRGQYKGQLGTVDVQTMTRKNNAAWKSFFALLERGEDASPPGYWGNADDGRDLRLFVRNDSYEIQWGEHSRVEVPVGQNLKDKYDMGYFERLRLEVRGNPKWSGEQGELEIQYDEVEDTYRAYQSVTIDESELDSPLASEEAALDLGVNNLVACATTTGQQYLYDSEDLFEQFRATTEEIARLSSKLPPEQDTSRRIRRLYRKRSRRRSHAQKALIRDFVERLHDEGIATVYIGNLAGVIEPQLSPEINEKLNHFWAVAQFTDQLRSVCEEYGIEVAEKTEAWTSQTCPECGAQDETVRPRETLTCPCGFEGHADLTAAETFLRRNTEQQVRPMARPVRFQWDNHEWRSITDAPGAGTNPSEQRTNP

SEQ ID NO: 36353 - protein, 495 aa, unknown
  TnpB Polypeptide
MSRYRLLPTPAQEAVLQDHCAHARCVWNLAVEQHAHWHPGRTGAPGYLEQCRQLTAARAEYPWLAAGSQTVQQQALRDFAQAITAFFDPGNPAGRPSWRKAGRDEGFRIVGRRGRQWDVRRLSRRTGEVWVPKAGWVRFRWSRPVPPGVKSYRVTMDRAGRWHVAFAVIPEPIPAPGNGTVAGVDRGVAVSAALSTGDLLTVPGLTVPERGRLRRLERQLARAQRGSNRRGRVRLAIARLRARETDRRKDWAEKASTRLAREFDVIRVEDLKIGNMTRSATGTAASPGRNVRAKAGLNRAILRSGWGLLVRRLEDKAPGRVEKVSPAFTSQRCSACGHVDASSRESQARFACTACSFACNADVNAAKNIAAGHAVTARGGDGAARPVNREPQLLASLTGRERLESPAFRRGRMSTDERTYLPSFRHGGHELGVGGRLAAGRLVPLGGLPQFPGDDARLVTVVLLDQLVDGRADRAEDAELLQVRAEPGPEPVVRS

SEQ ID NO: 36354 - protein, 385 aa, unknown
  TnpB Polypeptide
MLLRRTYRFKLEPNQQQIHKLSQLSGARRFVYNWALERRKEHFEATGKSLSGAALCLELTQLKKQEATLWLREADSQVLQQAVKDVDKAFCNFFSKRARFPRFHSKNKGHFSFRLPQRVKVASGKVYCPKIGWIRLRQSQAIDGETKSATFKRDACGGWFVTLVSEFLRPEVALPEAHNPVGIDMGLKDFVTLSNGESTPAPRLFRKLEKKLGQAQKRLCRAKKGSKRRQKARLKVAKVHRKIANSRADFVHKVSSGLVKRFDHIGIEDLNVKGMSKNHRLSKSVLDAALGELRRQLEYKAIWNRVRLVKVSRWFPSSKMCGSCGALNDTLTLSERTWPCACGADNHRDINAARNICKESLAVGHTERLNAHRESVSRATARSFR

SEQ ID NO: 36355 - protein, 350 aa, unknown
  TnpB Polypeptide
MRGMVLVYRYRVKSLNGLLNRQSRAVNYVWNFCNDTQKHALKWGKKWPSGFDLNVLTTGSSKELGIHSGTINATCEQYAKSRSQHKRPYLRYRGKRTLGWVPLKGRDLKREGTAFRFAGKAFRVFLSRPLPEGKIKDGTCFAQDARGNWFLNIVIETPDVPARPVTRAVGIDLGLKDFAKLSNGETLPNDRYGQRAAEKLAKAQRARKHKRHIAKLHAKVANARADFQHKAALDLVRRFDLIRVGNVSAAQLARTKMAKSVYDASWSSFRDKLRYKAIAHGAQFEEVNEAFSSVTCSACHARSGPSGLKGLRIRAWRCGGCGCVHDRDINAALNILRCGRASPVVGIARL

SEQ ID NO: 36356 - protein, 457 aa, Tolypothrix sp.
MRTPTINRRDEIRLDGLKPGVSFSFLISYKIVYNFVEGEETVLTLTYEYKAMPTSEQIQQIEHTLTVCRQVWNFALRERKDWLNSRKCSVNSCSTSCEYITPIDTPYPNYYDQANSLTRAKAEFPELKTVNAQVLQQVLRKLETAFVDMSRKKMGFPRFKNKYRMRSFVYPQLGKGQILKGNQIKLPQLGWMEYIKSREIPDGFKVKQVRVVRKASGYFLMMTLECDVNVPDTVASGHPRGIDLGLDKFAATSDGELIERPRFLTHLHRKLKLLQRRLRNKKKGSSNRHKLNRKIARLHQRISDTRKDWQFKVAHKLCDDAGMVFVEDIDFRTWAKGMLGKHTLDAGFGQFVSILQWVCWKRGVYFNKVEKDYTSQVCPQCDTHTGKKELKDRIHSCHSCGYTTHRDVAAAQVIRNRGISGLGRSLEENACGDGLTGTGNSLVVSRRSKKKGYEASL

SEQ ID NO: 36357 - protein, 388 aa, Streptomyces sp.
MAVKLVTQVKLMPEADQAAALRSTLRTVNEAACWVSAVAFEQGVPREYELRKHTYTELKARGLGAQAAQHVIRKTRDAYTALKANIRAGNLGKPGSKRRIKAESKPVTFRPEAAQPYDDRCLSWQYDQQTVSIWTTAGRIKNVRFACSPGALRTLREYRKGEADLIERDGVFYLVAVCEVPEAPLNEDPAGFVGVDLGIINIATTSTGYRAAGRGLNRHRKRQLDLRRKLQAKGTKSAKRLLKKRSRKEARHTANVNHVVSKTIVTAAERTGSGIALEDLTGIRGRVRLRKDQRTSLHSWSFQQLGAFLEYKARRAGVPLVYVDPAYTSRQCSECGHIDRRNRQSQATFACRACGFLSNADDNASRNLARKGVTVWTAGRESRVPATP

SEQ ID NO: 36358 - protein, 414 aa, Actinomadura sp.
MRHLGLLVLSVVPYRLIGVSRYRLQPTPAQEQALAGHCAHARYVWNLAVEQHAHWKPGRKSAPGFAEQCRQLTQARAGFAWLAAGSIIVQQQALKDFAEAMANFFAGTHRRPTWRRRGRREGFRIVAVKPDHVRRLSRRVGEVKVPKVGWVRFRWSRAVPEGVKSYRITRDAAGRWHVAFAAVPEPIPAPGTGEIVGVDRGVTVSAALSTGELLNVPGLRETEAKRLHRLQRKLARARRGSNRRAKVKAAIARLKARESDRRKDWVEKTSTDLACRFEVIGVEDLNIGNMARSAKGTVERPGRNVRAKAGLNRGILAGGWGLLAERLEHKAPGRLVKVNPAYTSQRCSACGVMDRRARESQAVFRCRSCGYTGNADVNAAKNIKLAAGRAVSAREGPRVTGPTHREPQPVLLSA

SEQ ID NO: 36359 - protein, 411 aa, Arthrobacter sp.
MLRYRYRVYPDTVQQAAIARLFGCVRVAFNDALALRKTHYAETCTHLSSRVVSAALTASKRTPEREWLNEVSCIPLQQAVRDLDTAYKNFFSSVTGKGSRVSPPRFRKKSSSGSARFTTSARYSLRQVNTGKALLTLPKIGELHLAYFRVVPAAPTSVTLIREADGRYYASFVVDPDPSTMIASTSTDEAERTAGLDLGLTDFAAITYSDGTRAKFPAPRFYRKAQRKLAWAQRELSRRVKGSRNRAKSRVKVARVHAKIRDDRQDFTRKIAVPLARENQTVAVETLNIKGLARIRLAKSIHDAGWGAFIHDLTHAGEKYGCAIIGISQWEPTSQTCSVWGIKTGRKAPDSRAWTCPECGARLDRDYNAALNFMLAAGLVESLNDCGGNIRLRLAEAILEETVTTQLMDAV

SEQ ID NO: 36360 - protein, 253 aa, unknown
  TnpB Polypeptide
VYEHGVWRLHFVCRVEVDVADAPGDGVAGIDLGICNLAAVSYGDESVLYPGGALKEDEYYFAKKRAETDDSASREAKRLDRKRTSRRTHFLHTLSKDIVSECVERGVGTIVVGDLSGIREDENGESRNWGTHGNLDLHGWAFDRFTMLLDYKAETEGIEVVTKSERGTSKTCSVCGRSDDNQRVERGLYVCDCGFVGNADANGAENIRRKVLPNLATDGGDRDNGWLAQPAVRLFDRSGGRFAPREQVTGRES

SEQ ID NO: 36361 - protein, 408 aa, Saccharopolyspora sp.
MVVAVQLRYRFRLFPTPGQQSALARAFGCARVVFNDGLRARQEAYAAGMPFPKAGELSKLLITNAKKTPERAWMADVSAVVLQQSLRDLDTAFRNFFDSISGKRAGRKVGLPRFKTRRDRYQSIRFTANARWKVADGGKLSLPKIGDVRVKWSRSLPSAPSSVTVIKDAAGRYFASFVVDAESAILPDVDSAVGIDLGLKHFVVLSDGRKIACPKFLRHTEKKLKRAQRALSRKETGSRNREKARVKVARAHARVADARREFHHQLSTRLIRENQAIAVEDLAVVGIARTRLAKSVHDAGWSAFLSMLEYKAVRYGRRMVRIGRFEPASQVCSRCGVKDGPKPLHVRSWQCQACGVSLDRDINAAVNVAKAAGLAVTACGAQVRPGPVLAQRGEAGTHRGDLSRRTPH

SEQ ID NO: 36362 - protein, 411 aa, Plantactinospora sp.
MIVQLRYQFRVYPTPGQQIELARAFGCARVVFNDGLRLRQSAWEAGEKYISDGELSRRLITEAKLTPERAWLAEVSAVVLQQALVDLNTAYRNFFNSLSGKRKGGKAAPPRFRSRKDNRQAIRFTKNSRFKILDNGRLRLPKIGDVHVRWSRTLPCDPSSVTVIKDAAGRYFASFLVQASDEVLPLVEPEVGIDLGLTHFAVLCDGTKVAAPKFLRRAARKLKRLQQALSRKQRGSQNRKKAVVKVARAHARVADTRRDWQHKLSTAIIRENQAVYVEDLSVAGLGRTRLAKSVHDAGWAGFTTMLEYKAARYGRTFARVDRFFPSTRICSDCGRINEKMTLDVRAWDCPCGSHHDRDVNAAKNIRAAGQADLNDRGAHVRPGLVPAERREAVTYPDAACPTRSVEGISVL

SEQ ID NO: 36363 - protein, 412 aa, Plantactinospora sp.
VKRAFRYRFYPTEAQTAELSRTFGCVRKVYNLALQARTEAWTLRRERINYTATSAMLTGWKKTEELTFLNEVSSVPLQQALRHLQGAFVNFFAKRARYPSFKSRKKSRKSAEYTSSAFRYRNGRLTLAKMTGPLDIVWSRPLPRGASPSTVTVSQDAAGASPSTVTVSQDAAGRWFVSLLCDDVIESSPAADTAVGVDAGLDSLLTLSTGEKVTNPRHERGDRSALARAQRQLARREKGSVNRAKARLRVARIHARITDRRRDHLHKLTTRLVRDNQTIVIEDLTVRNLVKNHTLARAISDAAWRQFRTMLEYKADWHGRDVVVVDRWFPSTKRCSTCGVLADRMPLDVRAWTCRCGTVHDRDVNAARNILAEGLSVTACGAGVRPQRADARTRQSASKQENPRATKGIPAL

SEQ ID NO: 36364 - protein, 406 aa, unknown
  TnpB Polypeptide
MLVYKGFKYRLYPTLEQESQLKQQAGNTRFLWNKFLESNIKTYKNTKKFQFSYEMSMSIPKLKEEFEFLKLSFSQSLQQVGRQLDKALKDCFKKTKGFPKFKKKGRFDSFTVPQRFNLNKNSVKLPKIGKIKWVRHRNWEGNPKFLTVSRDGNQWYCSVTCEVNLPDKQLPDVNICEENIVGIDVGLKKFATFSDNTVIHNPRHLNKKLKKLKREQRWLSRKIKCSNNRKKQIQKVQTVHRKIRNNRKDFLHKASFDMIAKYSGVVVEDLNVSGMMKNHKLSRSISDVGWNEFMRMLEYKALWNSKYFIKVGRWYASSKICNVCGNKKIDLRLSDRTYICENCGNVVDRDFNASTNIRDEGIRILQTTVGHTGSNACGDDKVHLFPEEGKEVVVKETGKRITTLCS

SEQ ID NO: 36365 - protein, 286 aa, unknown
  TnpB Polypeptide
MLYYILVKGGVIMNLTLTAKIKINPTNEQATILKETMDAYRKACNFVSEIIFHSKILTQAKLHNTTYRDLRSQFGLRSQMAQSVIKTVIAKYRTIKSNGHSWTLVHFKKPQYDLVFNRDYSLNKGLFSVNTLEGRIKVPFEIKGFEEYFDGTWTFGTAKLVYKHGKWFLYIPMSKEIEECDLKNINQVVGVDFGVNFVITTYDSNGKTFFWNGRRIKHQREKYKRLRKQLQQKRTPSARRRLKAIGQRENRWMQDVNHCISKALVERYGANTLFVLEDLTGIRRAT

SEQ ID NO: 36366 - protein, 325 aa, Subdoligranulum sp.
MNQLETVLYRTYVYRLYPTAEQQTMLADRFDFEDENYNAMARRINELYGQHAHKADAETAIRQYSISCPGIDYQGSLDHTRKELFQAVQKLWQGSYNKIYSRPVTRNQRCFYFKTMAVSEFHIIVPTIGTILRDTHRPLPVGAKALSGQIFYSSYEGRYYAHILIVYTAKLPAPITPVLYDRAIGLDYAQDGLYRDSNGHSAEYPGFAAKSKPKREALQQALSRAHTGSRRWRALRAKLAKLDRFARHAVHILANFPWPSPFFVAHNVEHKCNGILMPQKTFCMRDCVRQNKEFRSLGTWELFAHRQAVRNCAGMNFACSPGRSG

SEQ ID NO: 36367 - protein, 378 aa, unknown
  TnpB Polypeptide
MKTYKFKLYSNHGNRELHKTIDGHAEVWNHCVALQRRYYGIYGKYISKFRLINHISKLKRLPKYAHWNQLPSQSIQDVVSRIDKGYRAMFEARAQGKAWGRPRFKPRRKYKSFTLLQAGWQLLPGNCIKIGKRIYQYFKSRDVFGNPKRCTIKRDAIGDVYICILTDYEEPDLNRVMTGKIAGFDFGLKRYLTGHNGHDIDSPEFFKRSLNAIKRANRAHSRTKKKSNNRERTRLDLARKHRKIERQREDFHWKLAHQLTDAYDEIRLEDLNLQGMKALWGRKVSDLGFADFVKKLVYIAKRKGVKIKFIDKWYPTSKTCSVCDAINEALNLRDRTWQCNDCGTVHDRDRNAAINIYRVGASTHEGEDVSPDSSGNPC

SEQ ID NO: 36368 - protein, 148 aa, unknown
  TnpB Polypeptide
LSRCVRGSHNYELQKKKVARCHEKIRNQRRDHLHKLSRKIADSYDAVAVEDIDMKAMGQCLHFGKSVQDNGYGLFREMLDYKLVWQGKKMVKVDRFFPSSKKCCKCGRIKKELRLSERVYHCECGNEMDRDRNAAINIREEARRMLTA

SEQ ID NO: 36369 - protein, 369 aa, unknown
  TnpB Polypeptide
MKLVANLKLQPTPEQAELLKQTLERCNAACNWISLQAWEHQTFRQFDLHQLVYQAVRQQFGLSSQVTVRCIAKVADAYKLDKETQRTFRPLGAQPYDDRIFRFLADDRVSIWTLSGRIKIGFVCGEHQRRLLEHRKGEVDLMFVNGHWYIAAVCDFDDPELLTPEGVLGVDLGLVNIATDSTGESFSGKDIESKRQWYAGRRAILQKKGTRAAKRRLRKLSGRQRRFQKWVNHNVSRQIVSKAERSRSAIAIEDLKGIRERAKAVNKTLRTRLHNWGFAELRSFIEYKAAMAGVPVIAVDPRNTSRQCVVCGHIDKRNRPSQSVFRCLACGHKAHADQNAALNIGSRATVTMPLFAHQCVPGAVESPVL

SEQ ID NO: 36370 - protein, 361 aa, Hapalosiphonaceae sp.
VLLGFKTELKLNNQQRTKLMKHCGVARHAWNWGLALTKQILDHNKVNPHSKIKFPTAIDLHKWLVAMVKSENEWYYECSKSTPQQALMALCESWKRCFNKTAGVPRFKKKGKRDSLTLEGTVKILDSNKIQVPVIGVLKTFERLPQVLTKSATISRQADRWFLSFRFDVEQQDLGNTSVVGVDLGVKALATLSTGEVVLGAKSYKKYETKLSTMQWLNRHKIIGSANWKKAQLKIARLHRKIANIRKDTLHKLTTLLAKNHGTVVIEDLNVSGMMANHKLAKAIADMSFFEFRRQLTYKCKLYDSKLVVVDRWFPSSKTCSNCGTKKETLGLDERVMRCGHCGFVIDRDLNAAINLRNAVS

SEQ ID NO: 36371 - protein, 230 aa, unknown
  TnpB Polypeptide
VPLPPCAESVGIDVGLKTFAALSNGEFIENPRFFRKEEAALAKAQRRFDKVKDKHGSKARKQAKKVVRRVHERVKNRRHNFVHQQSRKLVNRFGVISVEKLSVENMTRRPKAKPDSNNSGQFLPNGASAKAGLNKSISDASWTQFRNSLTMKAESAGRLVIAVNPAYTSQDCSACGYRPDGLEGRAKKKLSERWHHCPMCGFRLDRDTNAAVNINALGQINALGQQCVAH

SEQ ID NO: 36372 - protein, 394 aa, unknown
  TnpB Polypeptide
MYRAFRYRFYPSPSQELLLKKTLGCSRFVYNHFLALRIREWTTNQKSVSYNETSSILTQLKKEESTSWLNEVSAVALQQSLQNLQEAYNNFFRGLKKKQKVGFPRFKKKSNRNSITLTKAGFSYKNGEVFIAKSKKPLSIRWSRELPNENISSVKMSLTPSGKWFISILVNDENDYTLPLCNKVLGVDLGIETFATLSTGEKVKMPDLKPHYEKLKKLQKKHSKRKNGSKNKNKARIKVARQHEKITNIRTDFHHKLSTRITNENQVIVLEDLNVSGMVKNRKLARAISQQGWSQFISFLKYKTTMYGRELLQVDRFYPSSKTCSSCGTIQSSLLLNIREWTCDSCGTTHDRDINAAKNLMALGTSVTAFGGDVGPTCRQTPVKKESATSLVSR

SEQ ID NO: 36373 - protein, 526 aa, unknown
  TnpB Polypeptide
MKRAQTPSFLLELPLRVDWSNEKRLRAHLEAARSLYNALLSEANKRLHAMRNDPAWKAARAIPRTHKFLRREAFCALRKQYHFSEYDLHEFARSARGGWIADHIDSTMAQTLATRAYQAVNRVCVGKAKRVRFRSKGRGIDSVEGKRNDVGLRFVLDPNAGDGGFLLWNKEVIPTIIDWRDPVVNYGLRHKIKYVRLLRRKASGPEAQGADKDGNRYFVQLVLEGQAFTKQKHEQTGSDTIGLDIGPQTLAIVSQQGSAALMTFCAEMAPNSRKKRRLQRKMERQRRANIPEHYDEKGRIKKGKKRWKESKRYRATRRQHANAERRLAAHRKSLHGKLAHSLVKVGNQIQIEKTSFVAWQKQYGRSIGLRAPGLFVAHLTRIVAKTGGTLTQVSTFQTKLSQYCHQCGKYHKKARSQRWHQCPCGMGPVQRDLYSAFLLAHLEPGKTIPSITQLVWEGAEPRLRAVMEDLQQRANDGQRLPRSMGVSASHTAARAGARRLQSPAYPQLEPVGSSSLVEEEPTGSVG

SEQ ID NO: 36374 - protein, 422 aa, Syntrophomonadaceae sp.
MRKAIHGEIYSSDFNKLNQLVSEWSSAYRFAFCRFQKDKLSFGKYQSLNTRQISDAVMQAQGLYFRVKDKKVVFGGRKSQHRLVKKEISNRGWKDKRDNQIYARGDITKKRNPNIRLFNRNGNFYLRVTVGNRKFEECSLFIPEKFQEHLLSLFGAEKAYNVRLLKKDKQHYRVIIDYEIENPNIVIDFSKGVIGIDVNPERVAVSEVSSVGNLIKSFSISGNRMFFGSTNKRDYEIGCIVKQIIDCAIKSDKGIVFENLKFKKEFENQGRKFNRIKSNFAWKKLLALLERKCIENGIRYRKVNPAFGSVIGKFKYQKLYNVSIHEAASYVIGRGGLGFCEKLSLCRYPTKLLKELVLDLAGDRTKRIHSWALWRILRDNYKAVLTGLQAGMSNLKELDGNVCYVGGNPTGKAFSLELVERS

SEQ ID NO: 36375 - protein, 744 aa, Ruminococcaceae sp.
  misc_feature (516)..(598): Xaa can be any naturally occurring amino acid
MFPVWYGGVSNGRIGMEWNMAYKTLMLQLYRPSRRKCTWMDRALLRYSRALQMLLTRFEYQIDTLAESGAKISQRKLLALIDKKTGKDLNEFHVQPFKDSLKIEFASLAASYIEQKRKNPRARYPLAYLDPADYRAAVSRCIERFEKEETSRGKFKSDCSKVIERAGRLRSLYFGRYAVNRDYCLLYDKFKDRFYAKLYLLNSLDGYFSKTVTSSLSLRYVAKGMPAVSNQAGKKRYVIVPLAFGKRQYEDLKKALENPGLLHTARLTKKKGRYYLMVNMQCEPAPLLSTTSTMGVSRSPFGGLNYTVFDRGGKFLKHGRIAEQAAPNQILYSLCNRIVKTAWENRSQVILEANGGKNDQMPLQDDRCLSNGQYAALTGILKYKLPEKRLPPPVEVSANGLFFTCPRCANRTFRNRISSELFACIECGYASEAEWIGSENLAGRLIKYQRDKVPLTVIKQKDSLLFYNRTLGFECTLPQNVTDYQPMYDELSRYLRDLGGAFQNDPKKYAVWKKLXXXXXXXXXXXXXXXXXXXXXXXXXXXXXXXXXXXXXXXXXXXXXXXXXXXXXXXXXXXXXXXXXXXXXXXXXXXXXXXXXXXFGCSGCRIMPPDMRGIPCAEQIRRAETVLPLQVQLFKYGAVSQLLVRQPFFCVFIKITSGHRTGKFHKISFTSVFRGKAFCVYIFTFFLFITKITTNRGYILLASLNRLQFQYLGRVVFSCSKLSSHSQMPIFQEPSVSRRSFSKS

SEQ ID NO: 36376 - protein, 145 aa, Oscillatoria sp.
MIFVEDLDFRIMAKGMLGKHTLDAGLGQFTNQILPWVCWKRDVFYGKVDARGTSQECPDCGAEVKKDLSTRIHHCHNCRSIKPRDVASGQVIFTRGQRGIENAWEGDAAGAGVTQSSWHLLKPEIFGATHREAFGNRIGISTHNL

SEQ ID NO: 36377 - protein, 370 aa, unknown
  TnpB Polypeptide
MRKSYKFKLQNQSNTINIGNMIDDMWQIHVHIMLLSRRYYRIYGKNLSASRLNKHIRKLKKTTKPHWADLPSQVVQDVVLRYGKSQDAFFDNIKDRKAGLTTRKVGRPKIKPRQKYSSLTFTQAGYTLEDNRIKINCIDTYFSFHKHREIKGVIKTITIKRDRCGDYWICFSCENVEDSEPKPKTGKSAGFDYGNKTFLTSDEGNKIESPQFFKQSLKKLRSLSKALSRKVKGSGNWYRACRALARQHRKVARQRADWQWKLSTELCTEFDTLCFETLNLEGMKRLWGRKVSDHAFYQFLQILEQKCAKHGKKFQKISQWTATTKPCSDCGYHNKALSLSDRQWTCPECGSHHDRDVNAAINIKRAGLAA

SEQ ID NO: 36378 - protein, 374 aa, Brevibacillus sp.
MMLRKKSFQFRIFPNHEQAVLIEKTLGCSRFVFNRFLARWNETYKQTGKGLTYHSCSAQLPQLKKEQPWLQEVDSTALQSSLDNLADAFSRFFKKQNEVPRFKSKKNRVQSYTTKHTNGNIRIDGNQIKLPKLGWVTFAKSREVEGRILNATVRRNPSGKYSVSVLCEVPYSPYIPVGKEKTIGIDLGLKDFATFSTVEKIRNPKYLLLYEKKLNQWQRKLSHRQKGGKNYEKARRKVAILHEKVANTRNDFLHKLSTRLIHENKVICLEDLQVNHLIKNQKLAKSIADASWSTFRAMLTYKAEWYGRTLSFVGKQFPSSQLCSTPNCGNRSKDVKNLNLREWTCSNCGTRHDRDENAAINIEREGLRLLCLTT

SEQ ID NO: 36379 - protein, 484 aa, Lentzea sp.
LVARYGVGEMVTVIQAYRFALDPTPGQQAVLGSHCGAQRYAFNWGLARIKANLDQRAAEKTYNLPGDQLSPSMSWSAYSLRKDWNRAKNEVAPWWAENSKEAYSCGLANLATALGNWTDSKRGKRKGRRLGFPRFKGKRSGLSCRFTTGAFGLADDRRHVKLPRIGLVRTHESTRKLARHVERGTARIRSATVSRRVGRWFVSFSVEITRADPVPARPDSVVGVDLGVKSLAVLSTGDVIPNSRHLETAQRELRRLQRQAARRTGPDRRTRQEPSARWRKTQARIAQVHAAVANARRDSLHKLTTRLVRTHGAVVVEDLNVAGMLRNRRLARHIAGVGMAELRRQIEYKARWAGVQVHVADRWYPSSKTCSGCGVVKAKLRLSERVYRCDACGMVCDRDLNAARNLAALVRRETSSPSCGATRNEPAGNPRKTRTTRATGTATGRPAPTGTGQRRRRKARLPEHSGFMFAHTSGNGSLKGCPST

SEQ ID NO: 36380 - protein, 368 aa, Dorea sp.
MNIAYRFRIYPNREQEVLLAKTFGCCRFLYNQMLNDKIREYEATKKMLRNTPAMYKKAYPFLKEVDSLALANVQMHLEKAYKNFFGNPKIGFPKFKSKHRSRKSYTTNVVNGNIQVKDHRIKLPKLKWIRMKKHRDIPEKYCLKSVTISMEPSGKYYASLLYEKSDCENQAEELDYEDAKILGIDYAMHGMAVFSEDIQKENEGYFRKSEERLAREQRKLSHCVKGSNHYYRQKKRVALCHEKIRNQRKDFLHKLSHEMAEAYDVVAVEDIDMKAMSQYMHFGKSVMDNGYGKFRELLEYKLTWRGKKLVRVDRFFPSSKKCCKCGSVKKELKLSDRVYLCTCGNRIDRDLNAAINIREEARRMLLAG

SEQ ID NO: 36381 - protein, 422 aa, unknown
  TnpB Polypeptide
MFGLYVLVLTLFNLKRYNSCTVKLIAQVKLVVTPDQSESLLRTLEAANAVCNGLSAWAWQNQVFGKYAIQKERYHPVRSESGLTAQVVVRCISKVSDAYRTAFALHKEHVRRAERTNKNRAAKGLPPKDLPVMEACEFRPHGSAAFDDRILRWYVPKSEVSLWTVQGRLKLPFVCGPYQKKLLQSRQGESDLVFQNGKWFLLAVCEVDDPPLKEVEGFLGVDLGLVQLATDSEGNSYTGAACMALRRRVAKHRRKLQKRGTKNAKRSLVKFNRRQSRYSSWLNHNISKRIVQTASATQKAIAVEDLGGIRERASAMRKEMRWQIGNWSFFQLQSFLGYKARAAGILFVSVPAPYTSQTCSRCGHCARANRKSQSEFFCEQCCFQANADFNAAINIARRGLEAQGRIVSAPESWVNGHSPAIL

SEQ ID NO: 36382 - protein, 403 aa, Nitrosococcus sp.
MTEPDSSKIQRSYKFRFYPTSIQRQQLALEFGHARWVWNTCLTWRGRQYRVHDKRVTGVDFSRQLTFLKKLGAYAWLGEATRDGLMQKLRDQDRAFRNFFAGRAKYPKFKKRAHTQSIRYCFDHRRRGKMKAWIEGKLVLPKLGALKLKGSRRPQGVPKMVTVTQDGAGRYFISFMCEETIQPLPRKPNGIGVDLGVKDIVVTSEGWKSGNPRHLRKIQRGLSRKRKGSHRWHRQRIRVAKAHARVSNTRQDWLHKLSTVLIRQAGFIAMEDLNVRGMMANRRLAKALGDVGMHELKRQLAYKAKWYGRALVQVDRWAPTSKTCSACGTVIDVMALKVREWRRIPTGGGRMTAKGRPRNANGSKASEAACLCDARRQVGNKRTRLSRKLQYSYHQLAARGDVT

SEQ ID NO: 36383 - protein, 384 aa, Nitrosococcus sp.
MIIQCAYKFRFYPTPTQKRQLALEFGHARYVWNWALETRTKAYQAQGESSNTISLSRQLTALKKTQCPWLSEATASCHTQKLRDQDTAFRNFFAGRAKYPRFKKRHHTQSVRYQLDQRHVAKNFNAESKLLKLPKLGRVKLRWSRGIEGIPKMVTVSQAPAGRYFVSLTCEVEILPLPVRRNAIGVDVGVKDVVITSEGWKSGAPKYTYHYARQLKMAQRRLSKKKKGSQRRRQQQQRVARIHARITDSRRDFLHQQSSKIVNENQVICLEDLNIQGMLRNRRLSKAIADCGLYELRRQMEYKAAWYGREVLIVDRWAPTSKTCSACGAVQESMPLKVRAWACECGATHDRDINAAKNILFFGTAGSAGTSKARGAVKPPRAVA

SEQ ID NO: 36384 - protein, 373 aa, Nitrosococcus sp.
MINAFKYRLYPNAHQARELETMLETHRRLYNECLAQRKERYEIAQKSVKYTQQSAWFKSERGVNEWYARLNFSSAQATMRRLDKAFQAFFRRIKAGEKPGYPRFKARGRFDSWTYPAHGDGARLLDGQLRLQHVGLVKVRQHRPVEGAVKTVQVKNEAGKWFVIASCNIGDGPAPRAEDTSVGLDVGLAYFLSTDQGEHVDNPRYQKEALRQLRIAGRAVSRKRKGGRNRAKAVARLRAIHARVANKRRDYHHKVARDLVSRYAFIAAESLTVSNMVRNRRLSRSISDAGWRQFLNILRAKAESAGSVWVEVPPQGTSQACSGCDTLVRKSLSVRQHHCPECGLRLQRDVNAARNILARGQARMEPVRLNVAQ

SEQ ID NO: 36385 - protein, 271 aa, Nitrosococcus sp.
LDQRHVAKNFNAESKRLKLPKLGALKLKWSREVGGIPKMVTVNKDPCGHYFISMACEVEILPLPTRKNAIGVDVGVKDVVITSEGYKSGAPKYTYRYARQLKMAQRRLSKKPKGSGRRRNQQQRVARIHARIADSRRDFLHQQSSKLINENQVICLEDLNIKGMLRNRRLSRAIADGGLYELRRQMEYKASWYGRDVLIVDRWAPTSKTCSACGTVIDTMPLKIREWVCPDCTAHHDRDINAAINVLSFGTAGSAGTHKARGAVKTPRAVA

SEQ ID NO: 36386 - protein, 323 aa, Nitrosococcus sp.
MIIQCAYKFRFYPTPTQKRQLALEFGHARYVWNWALETRTKAYQAQGESSNTISLSRQLTALKKTQCPWLSEATASCHTQKLRDQDTAFRNFFAGRAKYPRFKKRHHTQSVRYQLDQRHVAKNFNAESKLLKLPKLGRVKLRWSRGIEGIPKMVTVSQAPAGRYFVSLTCEVEILPLPVRRNAIGVDVGVKDVVITSEGWKSGAPKYTYHYARQLKMAQRRLSKKCKGSHRRRRQQVRVARIHARIKDSRRDFLHQISSTLIHENPVICLEDLNIQGMLRNRRLSKAVADCGLYELRRQMEYKAAWYGRDVLIADRWAPTSKT

SEQ ID NO: 36387 - protein, 371 aa, Nitrosococcus sp.
MKRTVSIKLVPTPEQAQALLELQSELAKACNLIVPFARDNRCWNRVALHHLAYYPVREATRLGSQMVCNAVKAVADAYKVLKLGRHDEIPVIRFRETGSVHFDARTYRLKGDAVSLYTLTGRAIVKMSPGEFQAQYLAAGKPKEGKLVRRGKQWFFNLVLDWPDTAPAKGSGILGIDLGENNLASTSSGKILGGGPLRHVRDRHLALRRRLQSNGRQSARQLLKKVSGKERRHMRQVNHEASKAMVGEALKQGASTIVLETLTHIRKRIKGGKRLRARLHRWAWRELQDFIAYKAEAAGIRVIYVNPAYSSKSCSACGCLGSRIQHKFSCSSCGHLAHSDRNAAVNLAKLAKSIGIARLGVAPAHVAVPTH

SEQ ID NO: 36388 - protein, 363 aa, Nitrosococcus sp.
MSTVVKTLKVRVKDNKANALNRMAFEVNQVWNNANEITAEYSSVPMPGFGYLRSNFSAYDLHPFQKRYRKERGLNITAQTVQEVTEAHAKARRQFKKDKLRWRVSGGPRRSLGWVPFKKGAAKWKNGCLYFAGHYFKVWDSYGLSKYEFRSGSFSQDARGRWYFNIAVSVPVEKTTATKAVGMDLGLKDTATCSNGFKLEAHRFYRNGEAQLGKAQRANKKKRVKAIHAKIKNRRLDSIHKFTTQVVRENAFIVVGNLSSSGLAKTKMAKSVLDAGWFMLKTMIEYKSKRTQSEFIEVNEAYTTQACSCCGCISGSSPRGRAGLGIREWSCSECGAHHDRDVNAAMNILAAGHRRLAGGIPVL

SEQ ID NO: 36389 - protein, 427 aa, Nitrosococcus sp.
MLAAGKIRGKISAARGCLQHHLATCHRPNEKSIEAMTEHDSTTVQRSYTFRFYPTSVQRQQLAMEFGHARWVWNTCLTWRGRQYRVHDKRVTGVDFSRQLTFLKGLGPYAWLKEASATCLIQKLRDQDTAFRHFFAGRAKYPRFKKRTHTQSIRYQLDQRQVAGMYRAGEFLKLPKLGALKLKWSRKPQGIPKMVTVTQDCVGRYCVSFMCEETLQPLPRKPNGIGVDLGVCDVVVTSEGWKSGNPRHLRTHTRQLRKTQRRLSRKRKSSVRWHRQRIRVAKAHARVSNTRQDWLHKLTTALIRQAGFIAMETLNVRGMMANRRLSKALGDVGMHELKRQMEYKAKWYGREFRQVDRWAPTSKTCSVCGAVQKAMPLKVREWTCPDCQTAHDRDINAARNILILATGGRPGSHARGGVYQPAAAYGC

SEQ ID NO: 36390 - protein, 392 aa, Chloroflexi sp.
MRKTFKYRLYPNKTTEKNLYFVLNRCRELYNAALSERKDAYRMAGKSITYFDQQNDLPEIKHEIRPEYEDIAAHVLQNVLNRLHKAFQNFFRRCKNGENPGYPRFQESSRYNSFTYPDGAGWKFDGTHLHLSKIGSIRVKLHRKLEGTIKTVTLKREVDHWYVSFSCEVEEPEKLPVSYEDVGIDLGVSHLATLSTGEMIEHPRYYRKAKKVLEQRQQSLSRKKRGSHRRDKARKLVGKAHRKVANQRRDFLHKETRSLVNRFQVIVFEDIQIGNLTKHAKPKQDEKTGQYLPNGASAKSGLTKSILDAGWGAFRQLCSVKAAWAGRSIVKVNPRYTSQICAQCGTVRKKTLAERWHSCDCGAELDRDVNAAINILWLGISQLGKRVEASCL

SEQ ID NO: 36391 - protein, 379 aa, unknown
  TnpB Polypeptide
LAEHCRHARFVWNLAVEQQRHWQPGRQVLGYNEQCAQLTAARAEYDWLAAGSQTVQQQALRDFAQAMRNFFNGTHRRPTWRKAGRHQGFRQVGFKPRHLKRLSRRYGQVWIPKVGWVRFRWTRDVPETVKSYRVTLDRSGRWHIAFAAIPQPILGPDDGTVVGVDRGVAVSAALSTGELLRVPGLRAGEAQRLRRLQRRLARARRGSHRRARAKLAAARLRARETDRRRDWVEKTTTEIASRFDTIRVEGLNVRAMTRSARGTRERPGTNVTQKRGLNREIHRQGWGRLVARLKDKAAGRIEFVPAAYTSQRCSACGHVAPENRKSQAVFYCVACGVDPCHADVNAAGNIAAGRAVTARGDLGASRSVNRESQLRSPSA

SEQ ID NO: 36392 - protein, 391 aa, unknown
  TnpB Polypeptide
MQNIRNYKFRLYPNNSQEKILQNNLAGCRWVYNKFVEYAQKGFVSRNDCNYYLTELKHQEPWLYKYHSKMLQMISTKIDSVQKTLIELRKKGYKTGKIKFIKYNEYRTFTYNQSGFNLEIHGDKTLLCLLKIGHIEIRRHRNIPIGANIKQIVITKSKSVKWHACLTIDIKKSLNDIPKISFLKTVGIDVGIKSFAFDSNGNQTPNPKNLQKMLKPLKRIERKISRRIKGSNNRLKSIRKMQKIHENIVNRRNDFQHKLSTQYSKNNDVVFVEKLQLTNMIKNHRLAQSIMDAIWSAFLQKLEYKCKLLVEVPARNTTIDCSRCGNAVPKSLAIRIHRCDKCGLVLDRDHNASINILNKGLNKLPQEMREVTLVENPKGLMKQEKVNNFSS

SEQ ID NO: 36393 - protein, 402 aa, unknown
  TnpB Polypeptide
LLSGERYVTLKGRIRASEATMARLREAMALFKQAVNTAAKLLWRGIDESKIRRWLQQTLPLAGTIVNLAVDYAEWMVKATRRGNSRKKSVPQLHRPLLKAVLYKNNVYPLSSENSRVFVEVKVFKDQRLSYEVLFKPKEFERLSRKTKVIIHEVNGKLLLETYKPIRPKLRSFSNVFIGVDLNANLRYAAIAAVGVYDPEARKLTVTHLYNLANHIKYGVAKIPMLKQRIAKVQRSGGKPGKYYAKITRIKRDFAHKISAKLIKLALQHNARFIVFEDLRSLRAEKSGARALVGGWIRGLIQRYTEYKGFRDGIEAIYVRAAGTSQECPFCRKSLPEHKQEHHCQYTWIRSNHGFAAVNILKRGVAKVYGIRETSIEVTILPRCPRREGISGAQRSEEVYDR

SEQ ID NO: 36394 - protein, 374 aa, unknown
  TnpB Polypeptide
MLLTLKAKLQPTEEQRRKLLRTIETFNRACDYISMDAYESRTFNKYRLQHRLYYRIREQHRLPAQLAIRAISKVVESYKVERRRLHVFGRHGAIAYDQRIMSFKGLDVVSLTTVEGRETIAHLVGDYAGLEQRVLRGQADLIYVRKEFYLCLVVEQPEEPPFTPEGILGVDLGIVKLASTSDGEVYSGEDVEAVREHYTRRKAELQRVGSKSAKRHLRRLSGKERRFKRQTNHVISKELVAAAKGTRRAIALEDLRGIRSRVTVRRGQRGRHGKWAFGQLRAFVEYKARVAGVPVLVVEPRDTSRRCSRCGHVERANRRTHACFKCRACGYELNADLNAAENIRWRAEVMQPIVVCHPVGVEFELQAHDLRRES

SEQ ID NO: 36395 - protein, 144 aa, unknown
  TnpB Polypeptide
VKGSNNQRKIYDEMTRIPSRISGIRKDFLQKLTTDLVKTFKLIKIEDLNVKGMMANHKLAGVISDIGSDEFKRQLTYKCQMYGANLVLVDQWFPSSKTCSNCGNKQELPLSVRKYDCPACGISIDRDLNASINILNWEPSAIGG

SEQ ID NO: 36396 - protein, 364 aa, unknown
  TnpB Polypeptide
LPTEYDLVKKLRARNNSVYFDLFGNVNQQCIKLLYKNWKSFFAVVKDYSKNKSKYLGRPKLPKYKDKNGRNIAIFTYVDCRVKDGFLHFNKKSNLLPIRTVVENEKLCQVRIIPQTNCYAVEIVYEYEAIDICLNKSNYLSIDLGINNFATCYDSHANKAFIINGKIIKSMNQYYNKRKAELMSFVGNKGTSNRLKQLEMKRKNKINDYMHKSSKGLIVYCITNDIGTIVIGHNKNWKQAVNTGKANNQKFVQIPFNNFIQKLQYKCENFGITCIITEESYTSKIDHSVLEEMKHQERYLGKRIQRGLFKQSSNKVLNADLNGALGILRKVINESDFSQIVDRGFVINPVRVNPLTKEFIKILY

SEQ ID NO: 36397 - protein, 385 aa, Glycomyces sp.
MTALRYQYRIYPTAPQRQMLARTFGCVRTVYNDALKIFQDAWRAGSVRPSMGAVAKAVTTDAKRTAERAWLGEVSAVPLQQALRDLATAYTNFFASVSGRRPGPRVGPPRFKKRTERQSARFNRNAFALKASGRLYVAKVGDLRVAWSRALPSVPSSVTVIKTATGKYYASFVVAVDDGAELAEPITDPEAETGIDLGLKAFAVLRGGKVIENPRFFRRLERKLRKAQRALSRKQQGSSNRAKARVRVAKIHEKVRHTRADWVDKQIHRIVRENQAVYVEDLCVTGLSRGRVAKSVHDAALGMFLGRLESKAHRAGRTFVRVDRLFPSTRLCSACGALTGPKGLEGLSVRQRVCGCGAVHDRDRNAEINIRREGRRLVAEGLPDT

SEQ ID NO: 36398 - protein, 408 aa, Glycomyces sp.
LPARDPAKRDWEDRIVVPVLYGFGVHLRYAFRVYPTRPQRQLLARTFGCVRTVYNDAVAARKSAHREGLPYPTTAELDKRLITAAKQTPERSWLAQVSTVPLQQALRDCHAAYKNFFDSLRGRRNGTKVGPPRFKRRSNTQTARYTRNGFRLKGNGRLSIAKVGDLKVAWSRELPVKPSSVTIVKTAAGRYYASFVVAVDDEADLLEPLAIPEAETGIDLGLKSFAVLRGGKTIASPKFFRAMERKLKKAQRALSRKRKGSANRAKARIAVAKIHEKTKAKRDDWLNKQVKIIIGENQAVYVEDLNVKGLSQGRIAKSVHDTAFGMFLARLESKAARAGRTFVKVDRFFPSTQLCSACGALTGPKGLDGLRVRQWSCGCGAEHDRDVNAEINIRREGERLVAEGHAET

SEQ ID NO: 36399 - protein, 596 aa, Rhodococcus sp.
MTGPGSTALRQFAFTTRAHLAVDDATGEPIGLDDVDTRVGWLLDLVTAAGAELVSRLWHSATFDALAAGLDRQDRRLPAQGHVAAARLGWTPSYPDGVYVPSRVTRVVTAQVMTTLRTLAYRDTAIAALSARFDAASGAVAPPIGSADYVSAGFARGVRRQLIACSRRGGGAPAGRLRITDVQGPPQTSAMARLSAADRQLAQITAAERELVLTVKLPTCPAPVGRVQWRRVRLTAAIPAHLHGRAITDWHLPTLVLDRRGLLWRCAATELVPAGEPKSAIVAVGVDWSPSTLGAAAIAAEGPGGLSSDYRGWTYDDRGLGVKLARLQAEGQMLHTKAARLTRLAATAPPAVRSQLKEKIAILDEHRTAVGVKRGKINRELAFHFARQATDYAAAAGAQVIAVEDLSTLEARGRGRVNNNRAAQSARRQAVAALAHTAAGVGITVISVPARGSSAWCPGCDEPLVRPGGYHDAWCPRCQVGGNRDHLAGVNLAKRALLGRNKATRRRGQMPAVRVAEHAPVRPSPDKHGPTPSRPRHRRVRRSLPTVTRRLGVTPNKHVPAPQASVWDTVKPTPPHGDPGSRDTRLSHTICHWCGR

SEQ ID NO: 36400 - protein, 438 aa, Thermococcus sp.
MKRSVTVKLQPSKEQEEKLYQLADAGAKVWNRVNYLRRQQFFQGQIVDFNTTEKTVYEKFKKEIGSATVQQIARKNAEAWRSFFTLARKKRNGELPEWLKPKPPNYLKEDGKRKPLIVLRNDQYRIEGSKLILKGLGKFKRLEIQFKGRIHLRGKQGRLEITYDEVKRKWYVHISFSEVRERLEGEEWVKLPRKPKGSLSAGIDLGVNNLMAVYVENGESFLVNGRPLKSIDFYWRKRTAEYQSKLNKSGQKTSRKLRRMHERAKLQAKHYINTAVRGTVQRLYELGVSKIVVGYPKGIARNSDKGKKQNFILSHVWRFNTVIKRLKEVAEEYGIEVMVVGEAFTSQTCPVCGKPHDGARFVRGLFKCPATGLTFNADLVGAFNILKRAVKTITPNLGGLFAQRRGNGGKTLPEGFKEPSSRVVLMRTPQTSPSMARG

SEQ ID NO: 36401 - protein, 417 aa, Thermococcus sp.
VDKKTYKILRTLTHLSRSLYNLTLYTVKQHYELNGTFLPYVKAYHLVKDSEPYKLLPSQAAQQTMKIVERNFRSFFHVLNERRKGNYNRPVRPPKYLPKDGHFLLIFPYQSFRVKGDRIILSLGRNFAEKYGVKHLEFTLPKNVKGHRIKEVRIVPRYNALWFEIEYVYEVEPERRDLDHSKYLAIDLGLDNFATCVSTTGTAFIIEGRGLKSFNRWWNREKARLQSQYDKQGVKFGKKMAWLLRKRNNVINDFMNKAVSYIVNYCLENGIGNIVIGELKGIKQNANLGKRNNQNFQYVPFGLFKQKLKAKCERYGINYSEVDEAYTSRVDALALEPIGKKKEYLGRRVKRGLFQSSTGTLVNADVNGALNILRKVAGDSPLRGIAGSGRVNRPVRVRLPWGGLTPHEAPPVRGVVH

SEQ ID NO: 36402 - protein, 327 aa, unknown
  TnpB Polypeptide
MEVDKFALEDAVNRVNDAYKNFFEKRARFPKHASKSKPQGNTYTTHFTNGNIAVIKDASGIPCIKLPKLGLVRFVLPKGTKFKDLVPEFTHILKVTVRREGKRYIASLGLETVIDEIKPVTDFNTGDIIGMDMGLKDFCHYGTKEEKFSVANPRFIKIHEKRLRKLQKALSRKQYDKKAHKGSKNYYKGKDRVAKEHRKIKNQRKDFHHKLSRKIVDRCKVFVCEDLNIRGMIKNRHLSKAIASVGWGQFLMFVKYKMEREGKIFIKADRWLPSSQICSKCGHRNTAVKDLKIRAWDCPVCKTHHDRDDNAVDNLILYAEQELQKAA

SEQ ID NO: 36403 - protein, 228 aa, Escherichia sp.
  misc_feature (212)..(215): Xaa can be any naturally occurring amino acid
ATETQWLKDSPSQPLQQSLKDLERAYKNFFQKRAAFPRFKKRGQNDAFRYPQGVKLDQENSRIFLPKLGWMRYRNSRQVTGVVKNVTVSQSSGKWYISIQTESEVSTPVHPSASMVGLDAGVAKLATLSDGTVFEPVNSFQKNQKKLARLQRQLSRKVKFSNNWQKQKRKIQRLHSCTANIRRDYLHKVTTTVSKNHAMIVIEDLKVSNMSXXXXSKIWRRYLVTKTM

SEQ ID NO: 36404 - protein, 371 aa, unknown
  TnpB Polypeptide
MITYKYNIYKSKNNKYIDSMLRECCFVWNHALSLQKRYYKLFGKYISYNRMSSHFTKRIKRDMLHSQTRQEILQRLDSAYGRFFKRLAKRPPKFKKHSQFNSFVFKQGGFILNGNVLTINKIKKRFKFSYSRPYEGKVKMIRINRDTCNRYSITIITDKEIDTIGKTHDGASVGIDFGLKTYLTLSDGIEYRSPLFFDKYINEIRKRNRVLSKAKRGSNNRKRRRFELNQVYRRISNLRNDYQWKLCHELCKEYDYIFLETLNIESMKRIWGKKISDLSHSSFVDKLEYISKKYGVIIHHIDKWYPSSKTCKCGYVNKSLSLKDRTWACPVCGTMNDRDLLASQNILRKGISELESQGKSSKELGVLDVCI

SEQ ID NO: 36405 - protein, 296 aa, unknown
  TnpB Polypeptide
MSKLFRERYPEFLIQIEIPIPHYKDKNFEKYQQIRILPRKNFYEIEIIYKKDVIKTRLDTNKYLSIDFGLNNLITTVENRNSKPFIISGRILKSINRQWNKRKARLYSIKDKQNLKWTNRLESIKLSRNLVIKDYLYKTAQLVVGYCLKNQIGHNYLGKLENIKQNIRMGARNNQNFVNIPIQTLKQMITYKTKLVGIQIHNVNESYTSKCSSLDLEPIRKHKRYVGKRIKRGLFRGSNYLLNADVNGALNILRKVVGDGFIQNLSDRGCWFQPVRIRDMFQTSHEQYFLKCGKIS

SEQ ID NO: 36406 - protein, 408 aa, unknown
  TnpB Polypeptide
MIQYRTYTLRLFPNGQQEQELKNLSLARNLLYNLLIDIENQTYETTGKIKTEFDLDRDITFLRKENPFLTCLNSKASQRVAKEIYSSYKSFFTLVKKDHTAKPPHKINDVDKFHTVVYNQSGWKFINNTTLKVNGIAVTYKGIPNIDYKSLTVKEVKLKMVNGKYLLDLGVANHVDEEEVLTTENKVLAIDLGIKNLCNCVDNLGNVVTIPNKARRINKYFRKQISSVQSKMDKCTKGSSRHCKLKKVKNKLYKRKNAQIKQTLHIQSKKLVNMNYKTIVVGDLSVKTLMEKRSNKLTKNSRNFSESSIATFMEYLSYKCQNSNTELISINEKWTTQQNCLTGKLFEERVGLSDRTVQISDSIVIDRDLNAAINILKRYEQNHLALLTAPLDVSSVVNKNNLLINTGS

SEQ ID NO: 36407 - protein, 291 aa, unknown
  TnpB Polypeptide
MQRLPAFKDELMPAGQQERQIHRFTGSCGFVYNNALALQKERYEQGGKKLGYAGLCKMFTGWCNSAETAWLADAPVHPLQQTLRDLDRASSNFFARRTDFPRCRKKGQSDRFRYLYPKQIRFDRGNIRIFLPKLGWMRYRNSRQVTGIVKNLTVSQSCGKWYISIQTEYEVSEPVHSSTSMVGLDAGVAKLATLSYGTVFESVNSFQKKRAGLLRQLIRKVKFSNNWQKQKRKIQRLHSRIANIHRDYLHKVTTTISKNHAMIVIEDLKVSNMSRPAAGTVRPPVEAGPPK

SEQ ID NO: 36408 - protein, 382 aa, Salimicrobium sp.
MGHKAYKFRIYPNKTQEMQIAKTIGCSRFVFNHFLEAWNTAYRETGKGMSYHACSKQLPSLKQERPWLKDVDSIAVQTSVRHLTDSFQRFFKKQTKAPRFKSKKNPVQSYTTKHTNGNIAILGNKVKLPKLGFVRFAKSREVEGRVLSATVRQNAAGKYFVSILTETEMEAWPKTGTTVGIDVGLKTFAVLSDGTTYDNPRFLSSLEIKLEKAQRKLSRRYEQAKKDGKPLYEAKNCQKQRRKVARIHEKIKNSRTDFLHKLSTDLVKNHDVIGIEDLQVSSMLKDKHLARAIIDVNWSTFREMLAYKAKWYGKHLVVVGRTFPSSQLCSRCGYQNKAVKDLGLRTWTCPSCATHQDRDLNASKNIKAEAIRLQTGGTPGFA

SEQ ID NO: 36409 - protein, 367 aa, unknown
  TnpB Polypeptide
MEYSYQFRLYPNSTQRNLIQRTFGCVRFVYNHFLAERIAQYREAGKAPTRFQQDKELTALKQKLEWLQEPDKCALQNALKYLDAAYKNFFRRVKNGEKPGFPKFKSKRDHRQSYKSNGSIRVFDNAVQLPKLGKVKCRISRKVEGRILSATVSQNPSGEYFVSLCCIDIENEPLPKTGVVIGVDLGMKAFAITSDGTEYPNPRYLAKKQKKLARLQRQLSRKSKGSNRHEKARVQVARLHEHITNQRSDMMHKLSTQLIRENDAICIEDLAPQNMVKNHRLAKSISDASWGEFRRQLEYKAAWYGKKVIQIDRFFPSSQLCSCCGYRNTDTKNLAVREWTCHECGTHHDRDINAAKNILSEGLRLLA

SEQ ID NO: 36410 - protein, 372 aa, Bacillus sp.
MILSKKIRLKPTEEQEEQLWKSTGVARWAYNWALEKQEESYKAGSKFISHGALRKELTKMKKTNEYSWLYDVSNNITKQAIKDLCEAYKRFFTGKSNKPKFKSRKHSKPTFYNDNERLKVKGESVIIEKVGWVKISETIPTSDRYTNPRISFDGKYWFISVGIESETEKQQLTNESIGIDIGIKELAVCSDGQTFENINKTSVIKKLEKRLRRLQRKFSRKYEMNKDGTKFVKTNNIIKIEKRIKLLYRKLTNIRDNHIHQATNAIVKTKPCRVVMEKLNVKGMMKNKHLSKAIAQQKFHDFKEKMKYKCEKHGIEFVEADMWYPSSKICSCCGNVKKDLKLSDRVYKCDCGNVIDRDLNAAINLSRYKLAE

SEQ ID NO: 36411 - protein, 448 aa, Halarchaeum sp.
MKRTNTFAVRPLSEDGEQLLRDLLDASAALWNEVNYQRLMRYNSEDGFEGGVWDADTGRLEGTYKGVLGASTAQQVIRKNSEAWRGFFGTKNKYHDDSNTSVTEHPSPPGFRGNEDDGRVLKTVIRNTSYTVEWGERSRLEILVGSELKDRYDHTGRLRLEIVGVPNWPNYEKQGRLDLWYDEIDCTFRASQPVTVSNDARDTPLASEKAALDIGANNLVACTTTTGAQYLYKGRELFQRFRETTREIARLQSKLEDGRYSSKRIRRLYLKRTRRRDHAQEALCRDLLERLYSEGVDTVYVGRLTDVLETHWSVETNAKTHNFWAFKQFTERLVCTAEESGISVEVRSEAWTSQECPQCSSTDRTTRHQDTLTCPCGFEGHADLTASETFLKRHTQKAVRPMARPVRFEWDDHNWSESPRSPVRESPKEQRTDPSTVHHDGNVASGDS

SEQ ID NO: 36412 - protein, 439 aa, Halarchaeum sp.
MLEVHRTHRARIRNHTQVADSLDRHGWSASKLWNVANYHSRQVWEETGEIPDHADLKDELKTHSKYKGLHSQSSQRVLEELAEAFNSWYGKRTSDDRANPPGYRKKNYYDDHGRRVHEEHPRSTVTWKQNGIRHDTKNNRVRLSKGANHKEHPKAWEYILVEYETRPGVTVENLQQVRAVYDTAKGRWELHLVCKDEIETPTAPGTETAGVDLGICNFAAVAYSTENADLYPGNRLKQDGYYFPKEIAKCDDSGGERATRLHKKWSERRTHFFHSLATHIVERCVEKGVGRINVGALTGVREDEDGASKNWGRHGNLDLHGWAFDRFTNILTYKAKVEGIDVVEVSERDTSKTCCVCGRADDSQRVERGLYVCETCDAAFNADVNGAENIRLDINQSNSESSASLDEDRSTGWLAQPAVFLHDLSRGFQPRAEVVDCKP

SEQ ID NO: 36413 - protein, 306 aa, Halarchaeum sp.
MEVRRTAVVKLDLSDEQRDALHRTAEQYQYCANRTADYCWSDTSYTECRTNKREVRDALYADLREETDLQAQLVQAAIKRAVEAVKACVERWKKGQRVSCPTFTAETMDYDARSATFYRNKVSLATVEGRVEPSFVLPADSPTPYERYILSEDYEFRESTVRYEAVDDEFYIQLSTRQTDGGAEVSADAGHPDQTVLGIDLGVNSLAVSSTGTFWQGDDYDHWCREFEKRRGEMQQRGTQAAHNALLRLGKREEVAETVHPHGRQRTRYGSPHSRLRRDRVRGLDRHTREASAGDVAPRLGVPTPR

SEQ ID NO: 36414 - protein, 438 aa, Halarchaeum sp.
MHIHRTYRAKILNHGQVAELLDRHGWSASKLWNVANYYSREVWEDTGEIADDSDLKSELKKHPKYKGLHSQSSQRVLEELAEAFNSWYGKRKNDSRANPPGYRKRNYYDNHGNRVHEEHPRSTVTWKQKGIRHDTGNNRVRLSKGANHKDHPRDWDYILIEYETRPEATVENLQQVRAVYDNATDRWELHLVCKHEVETPAVPGNETAGIDLGICNFAAVAYSTEQADLYPGNRLKQDGYYFPKEIAKCDDSGGEEATRLHAKWSERRTHFFHSLAKHIVERCAENEVGRINVGKLAGVREDEDGESKNWGRHGNLDLHGWAFDRFTSILTYKAKVEGIEVVEVSERDTSKTCCMCRREDDSQRVERGLYVCEACEAAFNADVNGAENIRLDINESNSESSAGLDEDRSTGWLAQPGVYLHDLSRGFQPRAEVVDCKP

SEQ ID NO: 36415 - protein, 538 aa, Streptomyces sp.
VIDAPFVALGPSGVAVRDRLKGLTPEDEGVLRLVGGHLGRLASLDLKARCADAGDHTSGTWAARKQGLTADSSSRWAGSITKATHDQWALSRRCQLAHVQSLEAGVRMLMHRLSLPLGEKGSKRAAGGYRSKGEWFRKSRRLHILEHRLGVARAEREAGVVHVVRGGRKLLNTRHNLDAARLTEAEWRQRWEVERWFLAADGESGKRFGNETIRVAPDGEVSIKLPAPLAHLANAKHGRYILAARIAFAHRGQEWADRITANRAVAYRIHYDTGRGRWYLTASWQRPVVETVPLSAARARGVIGVDTNADHFAAYRLDPHGNPAGEPHRFFYDLSGSADHRDAQIRHAITRLLHWANTRDVAAIAIEDLDFAAEKTREKHGRKKRFRQLISGIPTGKLKARLVSMAAEHGLSIVAVDPAYTSMWGDEHWRKPLTSNKRKMSRHDAASIAIGRRALGHPIRRRTAPPLQHRSDAVVHRTAQAGPETREREGTRPPVTERARDARARAGNTGTRATSRISKTVRDVRSDQIWVQDSLLVT

SEQ ID NO: 36416 - protein, 367 aa, unknown
  TnpB Polypeptide
MNKTFRVRIYPNQEQKILIDNTFSYVRYVYNYMLKLKEKLYEYYKISLRYNNISKILTELKRHKPWLKEVDKCALQNAIKDLDFAFKMFFDGTGYPKFRSFKRGYNSYRTNDYLHLDKDNRKIRIPKVGWIKFKDKSNFEGLIKIYNITISKSSSNKYYASISAEVDIKTLSRIKKSCGIDLGIKDFCILDNGRKFDNPRFLVTNEARLRLYKKSLGRKIKDSKNYKKAKIKLAKFHEHIANCRKDYLHKISIFLAKNYDIICAETLKVKNMMKNHKLAKSIQDVSWYEFCRQLEYKSNWYDKEFVQINTYFASSQLCSNCGYKNSDIKNLDIREWTCPQCCTHHDRDTNAANNILREGLRILNNPK

SEQ ID NO: 36417 - protein, 418 aa, unknown
  TnpB Polypeptide
MYLTIKQQVKHLTKEEYNILRELCRTAKNLTNQAIYNIRQHYFQEKQYLKYEANYHELKCCENYKLLNSNMAQQTLKDTDEMFKSFFSLIKLAKQGKYNFRYIKLPNYLPKNGYSNLIIGQIRIKDNILTIPFSNTFKKKINKKIKIQIKIPSVLEDKKIKEIRIIPKFNARFFEIQYTYEIKEENINLNTNNALAIDLGVNNLCTCVTNTGKSFIMDGRKLKSINQFFNKQNAKLQSIKDKQNIKRQTKQQYLISRKRKNKINDYINKTCRYIINYCLANDIGTLVIGYNQSFQNKTNLGKRNNQIFTQLPFGKIREKLEYLCKRYNINYILQEESYTSKASFFDNDELPIYNADNPQTYEFSGKRIKRGLYQTKNNYRFNADCNGALNILRKSKAVDLTVLGRSGELDTPKRIRIS

SEQ ID NO: 36418 - protein, 393 aa, Thermococcus sp.
MPSETIKLTAKFKLKTIPDGLDKLFSTYRGIVNFLITYAFENNVTSFYRLKKETYKGLRKEYPELPSHYLYTACQMATAIFKGYRKRKRKGKAKGKPVFKKEVIMLDDHLFKLDSENKTIKLSTPNGRISLEFCPAKYHEKFKDWKVGQAWLVRTPKGVFVNVVFSKEVKVREPSAFVGVDLNENNVTLSLPNGEFVQIITHEREIRTGYYVKRRRIQRKLRTGRKRKELLEKYGERERNRLNDLYHKLANKIVKLAEKYGGIALEDLTEIRDSIKYSAEMNGRLHRWSFRKLQSIIEYKAKLRGVRVVFVNPAHTSSLCPVCGGKLSPNGHRILKCLNCRFEADRDVVGSWNIRLRALRMWGVPVPPEGQPMKMGGWKVSRNDVYGLYTSYG

SEQ ID NO: 36419 - protein, 435 aa, Thermococcus sp.
MKRSVTVKLQPSREQEKILHRLADIGAKVWNRVNFLRRRQYFQEQIVDFNSTEKTVYEEFKREIGSATVQQIARKNAEAWRSFFSLLRKKRNDELPDWLKPKPPNYLKEDGKRKPLIVLRNDQYRIEGNMLILKGLGKFKKLEVQFKGKIHLKGKQGRLEITYDKAKRKWYAHISITVEKKLEGEEWVKVPKQPLGSLSAGIDLGVNNLMAVYVENGESFLVNGRPLKSIDFYWRRKIADYRSKLNKSGAKTSRKLKRMHEKAKLQAKHYINTAVRQTVRRLYDLGVSRIVVGYPKGIARNSDNGKRQNFILSHVWRFNTVIQRLKEVAEEYGIRVLVVNEAFTSKTCPVCGKPHEGARFVRGLYSCPGTGLVFNADLVGAFNILKKVVRTITPNLGGLFAQGRGNGGKALPEGSKTRFILGLNETPQTSPLARG

SEQ ID NO: 36420 - protein, 393 aa, Thermococcus sp.
MPSETIKLTAKFKLKETPEGLDELFQTYREIVNLLITYAFENNVTSFYRLKKETYKGLRKEYHELPSHYLYTACQMATAIFKSFRKRRKKGKAEGKPIFKKEVIMLDDHLFKLDLENKTVKLSTPNGRIQLEFYPAKYHERFKDWEVGQAWLVRTPKGVFLNAVFSKEVEVEEPKAFVGVDLNENNVTLSLPNGKFVQIITHEREIRTGYFVKRRKIQQKIRSGRKRKELLEKYGRRERNRLNDLYHKLANKIVELAKKYGGIVLEDLTEIRESIRYSAEMNGRLHRWSFRKLQSIIEYKAKLKGVRVVFVNPAHTSSLCPICGEKLSPNGHRVLKCSKCGFEADRDVVGSWNIRLRALKMWGVSVPPESPPMKTGGGKVIRYDWFARSKSSG

SEQ ID NO: 36421 - protein, 399 aa, Thermococcus sp.
LRRQQFFEDKIVDFNKTEKTVYEEFKREIGSATVQQICRKNAEAWRSFFSFLRKKRNDELPSWLKPKPPNYLKEYGKRKPLIVLRNDQYTIDGNKLILKGLGKFKRLEIQFKGRIHLKGKQGRLEITYDSVKRKWYAHLSLTVEEKLEGGEWVPLPKTPKGSLSAGIDLGVNNLMAVYVENGESFLVNGRPLKSIDFYWRKKIADYQSKLNKSGAKTSKKLKRMHEKAKLQARHYINTAVRQTVRRLYNLGVSKIVVGYLKGISRNSEKGKKQNFLLSHVWRFNTVIKRLTEVAEEYGIVVEVVNEAFTSKTCPVCGKPHDGARFVRGLFKCPATGLVFNADLVGAFNILKKAIKTITPSLPGLTVGRGNWPKTGPEGFEEPILRVALMRTPQTSPPLG

SEQ ID NO: 36422 - protein, 436 aa, Thermococcus sp.
MKRSVTVKLQPSKEQAKILSELADLGAKVWNRVNYLRRQQFFEDKIVDFNSTEKTAYEEFKREIGSATVQQICRKNAEAWRSFFSLLQKKRNGELPSWLKPKPPNYLKEEGKRKPLIVLRNDQYRIEGNRLILKGLGKFKKLEIQFKGRIHLNGKQGRLEITYDPVKRKWYAHISLTVDEKFEGGEWVKLPKTPKGNLSAGIDLGVNNLMAVYVENGESFLVNGRPLKSIDFYWRRRIAEYQSKLNKSGAKTSRKLKRMHEKAKLRAKHYINTAVKQTVKKLYELGVSRIVVGYPKGIARNSDKDKKQNFLLSCVWRFNTVIKRLREVAEEYGISVMVVNEAFTSKTCPVCGKPHEGARFVRGLFKCPATGLVFNADLVGAFNILGKVVKTITPSLEGLKAFKVRGNWPKTRPEGFEEPALKGSLMRTPQTSLPLS

SEQ ID NO: 36423 - protein, 433 aa, Thermococcus sp.
MKRSVTVKLQPSKAQEKILFELAYASAIIWDKLNYQRLKQFKEFGKIDFGTTEKEAYHEFKNWIGGSTVQQLARKNAEAWRSFFSLNRRKKKGELPEWFKPRPPKFVREENGRKLFVIPLRNDQYRINGNVLELRRLGKFGRLKLQFKGRIHLRGKQGRLEITYDPIKRKWYAHVSFNVEEKLENGEWVKLPRTPKGSLSAGIDLGVNNLMAVYVENGESFLVNGRPLKSIDFYWRKRMADYQSKLNKSGAKTSRKLKRMHEKAKLRAKHYINTAVRQTVRRLYDLGVSKIVVGYPKGIARSSDKGKKQNFLLSHVWRFNTVIQRLKEVSEEYGIRVVVVGEAFTSQTCPLCGQRHPNARFVRGLFKCHREGVVMNSDLVGAFNILVKVKAITPSLPGLSGGRGNWPKTGPEGLKTRFILGLNETPQTSLPLG

SEQ ID NO: 36424 - protein, 420 aa, unknown
  TnpB Polypeptide
MEYSRSDYGKALRETFYAIKHGGFDKSKYNTYIQHKYGVVSRTANSIIYDAQGRFNSLKELKECEKKQLERKIKHIEDTVIPKLVEKRNQNSTKLRDGLYVSLVQQRNLRLKVVAKKAKLNRLKQNLTILKYQIETGKLKLCFGTKKLIRQDHNKFIEQRDSQISFIGSRDETACNQNLQLTYNRRSNQFLVRLRKDFGGYKYAKGDDKYAYGKVYFNNHKAQIVSILRSKVSPLSYRIVKKKGRYYLYCTFGFQVDNSDIVTLSEYGAIGLDFNKGFVALAETNRYGHLVQTKFMPYRFKSECKTKTDLQVIANYVARLALRTGKDVCIENLDFRATKSKTEAKIGKKYNNMIHSLAYREFSKIIESTTYRNMVGLTKVNPAWTSWLAERIYCKPMKLNIHTGASYVIARRGQGYKESI

SEQ ID NO: 36425 - protein, 290 aa, Limnoraphis sp.
MRNVAKVRLYPTDDQKQALAKAFGSVRWVWNYCLELNNQAYKETGKGISGMQLKKQLPVLKKKEETVWLKETYSQCLQQSVLNLSRAFVNFFEGRAKYPNFKSKHSKQSIQYPQNVKIIENCLSFPVIGKIKANIHRTFDGNIKTVTITKTKTEKYYASILFESKDIEPQISAQGKAIGLDLGLTHFLITSEGSKYDNPRYFKKHEHNLKRKQQKLSRKQKASNSRNKARRLVARAYEKVSNARPDFLHKLSRQIVNENPVIIAENLNVKGMVRNHNLAKAPPWGRAVSF

SEQ ID NO: 36426 - protein, 399 aa, unknown
  TnpB Polypeptide
MFKEHKLKGSYMDRRLFYGQVKRDAKLGAMIQCCFDTAAWMWRSYREAHKAWRRNVAIARRESDKWWLRKLLRREPQEPFTNGMHGKVPIWFDSRFGATEQSKQMKLCSYVARVSTLRRGVKLTIPLNPAKYHLDMLEQGTMKSFQLVKQHGKYYVHVKVESTVPDQPVYAIRGVDLGVKRSVASVMLSPNQPLRSSDFRILQDGLKRKRLNRLEKRTAEFQQARKWKPLKRLRHKRLRVSEQYDRLAAKQVATTSQNCFVVVGYPKGIKYTNPKGNGRARLRKVLAHWTYGREIRYIQEECAKQGIPSEAPEELWSSRTCHRCGSRHTERTTQSIFHCWNCELVYNADYNAAINIGSPFLPMATTRRATDDLAYAWNEQAREIVACEPRSPHPFTGGS

SEQ ID NO: 36427 - protein, 416 aa, unknown
  TnpB Polypeptide
MYLTIKQQVKHLSKEDYRSIKELCHIAKNLTNEAIYNIRQYYFAEGAFLKYEKNYTLLKNSPNYKSLNSNMAQQILKEVNGSFQSFFGLLKLAKKGEYEFNNCKLPHYLPKDGYTTLIIGFVRYNGNKLILPYSNSFKKTHKSVSITMPPIVLDKKIKEIRIIPKANARFFEIQYIYEMECIQRNLNTNNALALDLGVNNLITAVSNKGKSFIIDGKRLKSINQCYNKSIARLQSIKDKQHFGKKPTNRQKAIARNRNNKVNDYMNKAAHKVINCCITNDIGTLIVGYNETFQKSVSMGKRNNQSFANIPYGKLRFKLEYLCELNGIVFVKQEESYTSKASFWDSDIFPTYHVDNPKKYEFSGTRIHRGLYKTASGNTLNADVNGALNIMRKSNVVDLSILYGRGEVDTPIRIRIA

SEQ ID NO: 36428 - protein, 401 aa, unknown
  TnpB Polypeptide
VSRFRLYPTREQEVLLLEACGHARYVWNLGLEQRIMWRRWQGPTPGFAEQCRQLTEARAESEWLRSGPQVVQQQALRDLDQAWRNFFAGTHHRPTWRKRGQAEGFRIVGGQALRVRQDNRHWSSVLVPKVGWVRFKRSQTLPEWKSYRVTRDRSGRWHIAFAAIPEPIPAPRTGKVVGVDRGVKAAVTLSTGEMSSPAGLRPKEAERRLRLQRKLARQQKGSNRRARTKAALARIAAREVDRRKDWVEKTSTDLARRFDVIRVEDLKVKQMTRSARGTLAEPGRNVRAKAGLNRGILAAGWSMLVNRLEQKAPGRVEKVPAAYTSQRCNACGHVAGESRESQSRFRCVACGHEANADVNAARNIADGNPGAGRALAARGDRVKSARSVKREPQRTRPPKVA

SEQ ID NO: 36429 - protein, 541 aa, Lachnospiraceae sp.
MYHVECIDIHKEDRMYLYFDRSCLCANNMYNAANFHIRNLMTGLKKDPSLCTENEKSVMRTFGRAILVINFSHRIKHFEKIYRICQDKDISEDLRKKKASKIKCVQFSMPTAKDWFASYGLLDAVFRYTDNADYRSFHSHVMQNAVSDCCEAWEGYFESRKAYSESSGHTGRPRIPGYRKSGGRSTAVFSNLACSIKHGRLFFPYAVIEAGKKRVRPSLDVSGLPHASKAARGSGEKLIEVRAVPYFGSYQIQIVTDDGTREEDLLPKEGDIIGTDGEPAGVMMLDPGLDNFAAMTDNKGNMPIVVKGGAIKACNQWFNKRMAFLRSEQMKGHDPKTYRPPVTRQMERISRKRSAFLRDTFYKYAHYICRTMKERGLSYLIVGYNKGQKQEINLKKRTNQSFVQVPFAKFRQVLKTVGARYRIRVILQEESYTSKACFGNRDYIPTYGSGDVENMTFSGKRIKRGLYLQDDGKVMNADINGAANTGRKYDPRIFPEGMDYSYLYRTVRAVTYRDILGASQDYHKSTPGETGQRASVCPVTA

SEQ ID NO: 36430 - protein, 284 aa, unknown
  TnpB Polypeptide
MKKVNRVEQQIIKRNNPIYKIVDQYCFYSKNVYNQANYIIRQEFINNNNKLSAYDVQKLMQSIDCYKECGSQAAQKTIQLVDKMWKSYFKAIKDWKKNPSKYLGMPKLPKYLPKDGRQVFMLKNIQCSLNNGQFRIAFKPFGGYTVKTHAVGKLMQCRFVPKADYYVMEIVYEIEVPETENIVSERIAAIDLGVDNLMTITTNCDVSPIIINGKPLKSINQYYNKKISEMRSALKLRNDSDRSKRVTFVEAPKIFKDQVGNDNVLLIPTNDEAIKPIRVIFEGE

SEQ ID NO: 36431 - protein, 224 aa, unknown
  TnpB Polypeptide
MGSHYEYYACISYEETPKPYKDPLKGPVGVDLGISNIAALSDGTRFPNDRIFARMSKKVAKIQRQMSRALYGSERYDKLQTKLNHTYGKIENHRKNNIENISAYIVKNHDFIGMENLSVKALRNKSENRFMTNGYNDASLGALIRRIKDKASSAGREIILVPPKDTSQLCSKCGSMVKKDLGVRAHVCPHCGYTEDRDVNASRNVFQRALRLKIQGMGRPSLSR

SEQ ID NO: 36432 - protein, 388 aa, unknown
  TnpB Polypeptide
VRRSFKFVLRPTSRQGDALTAMLHDHCELYNAALQERRDAWRTHRARISYFSQTAQLKDIRASDPDQARWASMSQQATLRRLEFAFQGFFRRVKDGQKPGYPRFRTSARFDSVTWPLDGNGCRWDSTANAGPIRLFLKGVGHIRVHAHRKVEGVVKTVSVKREGRRWFVVLSCDEVPGLVLPETGSAAGIDMGVASFLTTSDGAQIANPRHGRRNADQLAAAQRDLARKQRGSVRRRKARERVAALHGKVRRQRLDHAHKTAMWLVRHHDVIAHEDLRISNMTRSASGTVEAPGTNVAQKSGLNRSILDVGWGVFLNVLASKAESAGRVVVAVNPANTSRTCPDCGRCAKENRVTQADFACVACGFAGHADVVGATNVLRAGLALLHA

SEQ ID NO: 36433 - protein, 365 aa, unknown
  TnpB Polypeptide
MMNATKVRIYPTPEQAGFLNQQFGAVRFCYNKALWLMRTQYQRHGLKLRAKRDIKPLLAVAKKSRKYHWLKDFDSMALQQAVINLDTAFSNCFNPKRRARFPRFKSKRGKQSSYHCTSVSAGDNWIKIPKLDRIKARIHREITGRVKSITLSRTPTGKYYASILTDDGAVAPTPVQTLGRVVGIDMGLTDLCITSDGVKIPNPRFLKRAAANLRRKQKALSRCQKGSRGRAKARLLVAKAHERLANARADFQHKLSRQLIDENQAVIVETLKVKNLLKNRKLAKHIADASWHSLIQRLEYKARAQGKYLIKIDQWFASSKTCSCCGHKVDSMPLDVRRWDCPACGATGIDRDINEYIAKTVYSSA

SEQ ID NO: 36434 - protein, 401 aa, unknown
  TnpB Polypeptide
MILVEKHTINQKHNFYQECDELCFKSKNLYNQGLYNVRQYYFETKKYLSYVKNYHVSKNQDSYKQLPGKVSNQTLKLIDQNFKSFFGLLKTTGSVAKIPNYLDKENGRYIVKYEKQALGKRIFKKTGVIKLSQCDIKIKTQITNWENLKEVRIIPRSNHYVIEVVYEKKEKECNGNITAAIDPGLNNLVTATFSNGNQPIIINGKPLKSMNQYYNKKLAFLKSELELKQKRKKSKNIIKLTFKRNNKINDYLHRASKILVNQLVSNQVKTLIIGKNVGQKQDSKMSKKNNQNFVNIPIFRYLNMVAYKARLEGIEVLWQEESYTSKASFLNQDFIPVYGKEKGKPNFSGYRRHRGLYKIKGENKTINADVNGSYNIMRKAVPNIFIDGIEECAVIPFKLYV

SEQ ID NO: 36435 - protein, 418 aa, unknown
  TnpB Polypeptide
VADDYVRRTAITRLQLTGEQCELLEETISEWKRGCQIATEMAWGNCNAKSDVQPLAYDDVRDKTDLGSQHAILATHQAAQAITGCIERRSKGKRVSKPTFTAPTVKYDTRTMTLFDDDTVSLSTTESRIRCELALPDADDGYQRQYLDSDEWSVTESTLTAREGDYFLHIGFRRPRNDTERNTAEDGTVLGVDLGVENLAVTSTAYFFSGRELTHDLNEFEKVRAGLQQTGTRSAHRTLEQSSGRELRYIRDVLHRASNAIVAEAIRFDCDVIAFEDLTHIRDRTRASWGHKWAFRTLYDQVEYKAEAEGIAVKQVGSAHTSTRCAECGFTASENRPNRTRFRCMNCDSEANADYNAAKNIGMRYVRRGQQSSRRTGNSQLALKSGTVTSSGGFTAHPKGFEAEFMDKRHATRVNPSG

SEQ ID NO: 36436 - protein, 450 aa, unknown
  TnpB Polypeptide
VLSRAVTFQFALDPNLEQRVLLAKCAGARRFTVNHHLARVKSNLDARSAEREALSESGESPEPSTSSLSWSAFSFINEFNAWKNGQSDDSLVNEDGTRGLAWRHELPGDVFECASVDAARALENFSASRRGERSGTSVGFPCFQAKGKVMPSFRLRNRAIPGKAPSSQPIRFTDPSHLRLPKFGPLKLFGPTRKVRRMIDAGRFHVYSATLTQRAGRWTVSLTGVAAVLHLAERSRTKRHAIPVGVDRGIISLCVAADANGVSIESFEGVKTLKQALRKLKAANQTLARTTPGSKGRQRAKSRLAKRHRKVANTRRHLVHQASRSLVDRCQLLVIEDLNVAGMARNRHLAKSISDAAMGELSRQLLYKARWHGVEVRVADRFFSSSKTCSGCGEVKKDLDLSTRTYSCENCGLAIDRDLNAAINLARWQPKESSAVSLLDPTPALLLSTA

SEQ ID NO: 36437 - protein, 450 aa, unknown; identical to SEQ ID NO: 36436
  TnpB Polypeptide

SEQ ID NO: 36438 - protein, 389 aa, Atopobium sp.
MDMTFEYRIYPSAAQRVQLARTFGCCRWVYNRVLQMRKEEYERDKKTRSINSYITQIPIWKKDEAPWLAEADSMALQQSLRDLDKAYKNFFRSPGRVGFPRFKSKSGARQSYRTNSISIVDARHVKLPKLGSVRARITRPVRGRILSATVKKVPSGEYFVAVCCTDCPEPDMPQGDVEVMGIDAGIRCLMARSDGEVVASPKSLTKSEKRLAREQRRLSRKKKGSKRRARQRVRVARIHEKIANQRKDAIHKATTEAVRESQAIAVEDLNVKGMEKNRRLARAVADASMSEMIRQLQYKCAWYGRAFVKVGRFYPSSKTCSCCGYVNKNVVLGVESWTCPECGARHDRDLNAAKNIAAEGARLLAEGNGTAGLAGTGGAQAPRTLVEQA

SEQ ID NO: 36439 - protein, 427 aa, Nonomuraea sp.
VARLDLDRAQSAALESQAHCARALWNLLHEYTTFRQGRLASLKDCDEAIRTARREISWLNDLPAQAAQAVLKTYRRAWANFFDPGHPAGRPAFKGRLRSRMAVDVPQARDLRIIRINRRWGAVNLPKIGRVRFRWTKGLPGVTKGSPPGRITGARLVKDALGWHIVFRTERHVPVPAPHRGPAVGMDRGIAVPLALSTGDRLTHGPWLTDGEQARLLRLERASARRRTHRVKGAPASNREQRTYDQIAKLRAKAKRRALDWQHQTTTTLAERFSVIVVEDLRIVNMMASAAGTVEEPGRGVAQKRGLNRAIAGEAWSRTVDLLTYKTADRGGLVAKVPPHGTSRQCHRCHTTVPGSRESQARFACKNPACGWIGNADTNAARNQLHRYTTAAGRAVTGRGDSEMSGSVKRQASCPTVSPAPAPRAAA

SEQ ID NO: 36440 - protein, 407 aa, unknown
  TnpB Polypeptide
MIKRTQHSLKFITAKKRQLLDTLFVEYQRVVNEFIVLYWDEKKLPSKANASQWRQVTTWLCGKAVKCAYRQAIQMIKSAQAKNKKRIYKSYQRVYAYAKGRSKNWTIVNQKWSEWSAGRKFRSRVNRPVFNGNSIDLNSDLATVYTAPKKMKNFDLAVRLGSIFGNRISLLLPTKKHALFNKHIGNGYSVNSSVQLRRIDGNLYVNLFLEKEAPKVKDTGKVLGIDVGIKKLMSTSDGEFLGRDIEAKIQKLKRRKRDSKNYKQTLAEIKDYIGQQVNKLKLEDVGVVVVEDLDVKNMSKRGKSSKEHRKTLGNWNSRLLFGRLSSRCEENRVLLATASPEYTSQQCSSCGEIHKESRKGERYECVACKVSKDADYNASLNILNRFLNRKPTVSCEQKTGVSLCNFT

SEQ ID NO: 36441 - protein, 524 aa, unknown
  TnpB Polypeptide
MARRPKAQRTYQTRLTLSPEADSLLGAYAELYGKVERTLFAAMARGIVPESLKAEYLVRFGLTARQFNAVCRNLKGKVASIKERRKGLIQEARARVGKAEEQLRKLERKQRKAKTAAERKALKQPIHEKKRRIDKLRHRLDRLEKDHANETVRLCFGGKRLFRAQFHLEENEYKSRDEWREAWRRARASQFFVLGSKDETAGCQGCVAHYLGNDRFAFRLRLPDALIAANNGEKYLRFEAPLPYGSDHVVAALTLKQAISYRFLRDEKGWRLFLSTEVPPVEVQSDKRLGVIGIDINAGHLAVTETDRYGNPLRSLKIPLVTYGCDRDQAAARIGEAVKRVMAFAREKGKPLAVERLDFSRKKARLEGEGVRYSRMLSALSYARILATLKARAYDAGLEVLEVDPAYTSVIGRHKYARRYGLSNHQAAALCIARRAMNLSERPNRRMGDQVAFPLPVRNRGKHVWSFWRQVARKEAALAAHRRSGAARSCRSPARSSPDKASTGIIPPVAGGTPARESSPALFG

SEQ ID NO: 36442 - protein, 485 aa, Streptomyces sp.
VKKFRPQPGFVVQAFRFALDPSASQEAALRSHCGAARAAYNWAVGWVEASWWQRKAEESYGIPEAGLTEWRPWSLPSLRKAFNVVKHTDPRFAAWWEDNSKEAYSTGLANASTAFDNYAKSQQGKRRGGRMGAPRFKSKRKARLSCRFTTGAIRVDVDGRHATLPRLGTIRTHEPTVKLLSRVRAGTARILSATVRHERGRWFVSFQAEVKRDLERVARPDMAVGIDLGVKNLAVLADSTGEIRTVANPGHYDRARGQLRRASRVVSRRRGPDRRTGQRPSRRWEKANARRNKVHHRVTNLREDTLHKLTTAVAAEYGTVVVEDLNVAGMLRNRRLARRIADAGLGEIRRQLTYKTRQRHATTVITANRWYPSSKTCSGCGAVKAKLPLHVRTYACDACHLVIDRDDNAARNLAALAAACTTGTGVAGDQDTTPVVSKPRGADRRTRATRPRRKAEAGRAGGTTLPQQQQEETRDRPQAEALTLW

SEQ ID NO: 36443 - protein, 359 aa, Herbidospora sp.
MAQTVKRAYKYRFYPTSEQAEELSRTFGCVRLVYNKALEERTRAYAEGRKIGYEQSLRHLQTAYANFFAGRARHPVAKSRKRSRRSAEYTRSAFTWLNGELKLAKMRKPLAIVWSRPLPEGAQPSTVHVSQDTAGRWFVSILVEERIRSLDPAGTAVGVDVGITDLVTLSTGEKIANPRHAQAMRRKLTRAHRTLTRKKIGSRNRAKARLTLAKTYARMTDRRRDFLHKLSTRLVRENQTVVIEDLSVRSMLRNRTLSRAISDASWRELRAMLEYKTHWYGRELLVVSQWFPSSKMCSNCGALRETLPLKVRTWVCDCGVTHDRDVNAARNILAAGLAERSNARGADVRPQGASLSGSR

SEQ ID NO: 36444 - protein, 402 aa, Escherichia sp.
VKRLQAFKFQLRPGGQQECEMRRFAGACRFVFNRALARQNENHEAGNKYIPYGKMASWLVEWKNATETQWLKDAQSQPLQQSLKDLERAYKNFFRKRAAFPRFKKRGQNDAFRYPQGVKLDQENSRIFLPKLGWMRYRNSRQVTGVVKNVTVSQSCGKWYISIQTESEVSTPVHPSASMIGLDAGVAKLATLSDGTVFGPVNSFQKNQKTLARLQRQLSRKVKFSNNWQKQKRKIQRLHSRIANIRRDYLHKVTTTVSKNHAMIVIEDLKVSNMSKSAAGTVSQPGRNVRAKSGLNRSILDQGWYEMRRQLEYKQLWSGGQVLAVPPAYTSQRCACCGHTAKENRLSQSQFRCQVCGYTANADVNGARNILAAGHAVLACGEMVQSGRPLKQEPTEMIQATA

SEQ ID NO: 36445 - protein, 432 aa, unknown
  TnpB Polypeptide
MDEERRLAKNKLISLRKKETLLRHENMVTKTYEVKIQENKLRKRQREDIERIFLEAKWYKNYILNWMNESKDNKLSKFNTKITQITKKDKDMNDVQVEIKRLPAQSRQCLVSRMVANLRAMAALRKKGLQKLGKLKFSKEETAIDYKQIGNSHKIINKKRIRLQGIKGELLVNGLEQFYNIPGVEVANARLLHRATGYFVQFVCFLPKAYSQETPEAEKKIVGVDFGCQTAFTLSMGEKITASVPESERLKKLQRDFSRKQKGSKNRERAGLKVRKEYQKITNRKNDMANKIVHNMTKNSIVVIQDEQLKAWQSGNHSKAVQYSVLGRVKAKLKLHNNVVILPKNYPTTKLCTNCGKWHDELKLWNRTFKCKCGVEEDRDIHAAQNMVWLYEHIYVGAEHTKLKRVEMESLVKGIINSGDQTLSAKHEAAIP

SEQ ID NO: 36446 - protein, 171 aa, Hapalosiphonaceae sp.
MYLTQKNQIRELNKSEFVAMQQLCRLYNQGLKLQINIGGRNNQNFVQIPFHSLRSKLKAMCERYGLNYTEQEESYTSKASAIDGDEIPVYNADNPKEYQFSGLRIKRGLYRTKNGHLVNSDLNGSLNIGIKSKHNGFTGVSRAALTQPRRINLLKLEKFRSADLSRFGTTS

SEQ ID NO: 36447 - protein, 161 aa, Okeania sp.
IHIARQREDFHYKTADKLVRENDLIAVENLNIRGLARNTKLSKSIYDVAWGAFIIKLNAVAAVRGVHIIKVNPDNTSQNCSNCGHKVTKNLSVRTHSCSKCGTVLDRDQNAAINILNKALNEVGIILSACGGLDVNQPVFAQRCVSTRKKLLCLRSSRYNL

SEQ ID NO: 36448 - protein, 387 aa, unknown
  TnpB Polypeptide
MRKLLKSFKTEINPSEVQKVRIHKTIGTCRYIYNFYLAHNKGLYDKGEKFMSSNKFRVWLNNEYLPEHPECSWIKEAYSKAVTQSVNNGQAAFTRFFNHQSAFPNFKKKGISDVKMYFVKNNPKDCRCERHRINIPSLGWVRIKEKGYIPTTKDGYVIKSGTVSKKADRYYVSVLVEIPDNKIADTFNGGIGIDLGLKDFAITSSGKTYKNINKSVRLKKIEKKLIREQRSLSRKYKNLKKGEVTQRTNIQKQKLKVQKLHHKIDSIRTDYINKTIAEIVKTKPSYITIEDLNVKGMMKNKHISKAVASQKFYEFRTKLQNKCDENGIELRIVDRWYPSSKTCHCCKAIKKDLKLSDRIFQCDCGYIEDRDFNAALNLRDAITYEIA

SEQ ID NO: 36449 - protein, 400 aa, unknown
  TnpB Polypeptide
VLTVKSVWQYYVSSSAVLRLLGVFRKMVNESLRIGIANDASSLRKLSLLSYNQLAQFDSPSCYKLCAISRAAGILAARKKSVRRGYATRAPYAVRPQLVSCYGFKIENGYLRIPVSRGKRFSIPLTKHSLEVISQPGVKVRSFTLTTSILSLCIARDPPRMECASTAVVDRNLRNLTVGNENQTHQYDLSETVRIASTTTSIVASFRRDDARIRTSIASKYGRRRTSRYGQLLHRATKAIVALAIQRRSAIVLENIEGIRSLYRKGNGQSRKYRGRMNSWSFGEAQRQIEYKARWVGLPVIRLSRRETRGSSVTCPRCGERLQSDKRLKRKLWCGNCRVVMDRDMVAAVNLARRGRVRFARSRPPITEAQGGAVEAVMGNLTTTVIPGVDAPKLTQPTKS

SEQ ID NO: 36450 - protein, 326 aa, unknown
  TnpB Polypeptide
MRHKKRKNSLQETIVLHHREIHKKENGDKYCFPTKWGKEILNTYKEKLPDIINHDCRLIMKTIGNNEKFYLAIPTDVEVKPKVKNLNAVSLDPGVKIFQTTYDTEGTSYLIGEDDSRKIGKLSKITQRMRDGIKRDWIGGDQIIKNGRKKLINRKRIFREVKTEKEKKGLLKAAAKIEHKIKNKISDLHRKTAKFLCEKYDTVIIPNFRVKQMSEKKDENNNWKRKIGKETTRQMINWGHYSFRQLLIAKGKATGTNVYVGTEEYTSKTCGNCYWINNKLQGERELQCENCNLTFHRDINAARNIMILNCKKSNLIQFKLKLNIIR

SEQ ID NO: 36451 - protein, 470 aa, unknown
  TnpB Polypeptide
MDEGIKFRIYPTKEQTTPLSKWIGCQRFIFNSKVSEDRYFRKFKSKSLSLVWEDVPCDQKYSQFISTDTSFLKEVPSQILRNGVYRWKSAYQRFFKKLAGRPTIKKKHGRQSVMITRELFSFYSVDRQTAMINLGTKKHPIGTIKVNVHLDYEVPDSIYFSVHGGKWYVSFSNEKDVVVATEGELLADLQHLTEEQLMEVTNGFDRNVVAPVASSDGNTFDYTAEQKKSLQKALTGKVKCQKRLAKKKIGSSNRRKAVKKVGCYDRKISDIRNDFSHKTSYTLADAPVSLLVFEGLPIKNMTASAKGTVEEPGKNIRQKSGLNKSILNACWGKIKTYTRYKGLRKSKLTIEAPPHYSSQECSHCGFTHKDNRPSQSEFICQDCGFACNADLNASLVIKKRGVRLVLNNEVHIKTPKKVAFSKKSVRRAGAVRSGASAFKPVERVSAVISLKADTQFSVKQETPTRTAETV

SEQ ID NO: 36452 - protein, 470 aa, unknown; identical to SEQ ID NO: 36451
  TnpB Polypeptide

SEQ ID NO: 36453 - protein, 783 aa, unknown
  TnpB Polypeptide
MPRKRKKTDNKQVKRNYTVKSKLHANTLAIHKWLLHDVDVASVCAIHSSRFASIYLLHCIQNSLPLPIINKTFFDRITTLLADVNSQKPPKRKGGDKQMTLAFTTLYLPLLTSHNPSDFKIDRTSSARDILFRLSCEMTTNTENYLMTQFLNRFRNWCKDTIAEIIPIDITGKKSDERTQKLKQRWKLVSYIFQETVCTASTETDESKVLEQVKKEMSVECDQIWSDSVATQIVYKICAARLDLNQTIVVEKKKNGQRVQENVFCRPVTYAKLQDLQHSPVYFRWLAKRLAEIELNNADTTKKQKKTFSLLPINSISERRYVGVDNTTLSNFIHANRNDETVVGKEIFDYLKTKDVSNVNKTWSVFKEKPLWFWERCFKIKSKLGENRSFDCFMTTDGVGCSLLYSKKEVAREEEESEEEEDLKNNDIVTLDSDEERLTDKKIRVFSQEELNNADIIGVDPGRKDLYTSVLEKNDGSGRHHVQQYSNARWQVACGGAKAKKQREKWIKKIDRYEKWMLEMPSCKVSTVAAMEKHVRHLMLMWKVHWDETGKQRIRNLRFTNYLLRQKALANMTNGFINKIKEAANSKKVKTIVAFGDAEFKTCGPVKKMKKELQRRKETITVVDIDEFRTSKMTTCCAFPCGCKETNEGERKEVKAIERAGPLNEVKDKKTGETRREHLYSVTFCQNCSCIWNRDVNAALNMLRIFEHAQTHKGERHLVFKRSSIREVKEAKEKSLEINKKRKTQVTCKATTLRQAGSLSITKTEVSENDASVKLGGKLGWVE

SEQ ID NO: 36454 - protein, 190 aa, Bacillus sp.
  misc_feature (30)..(33): Xaa can be any naturally occurring amino acid
LANAQLNVDKAYKAFFKGNAKFPKFKSKHXXXXIKSCTLSMTSSGKYYISILTEYEKEITRKEIEKVVGLDFSMGEKANYPKFYRQILNKLAKEQRKLSRKKKGSANWNKQRIRVAKIQEKVANQRKNFLHHKSKELVSNFDAVVIEDLDMNGMSQALKFGKSVADNGWGMFPSFLQYKLKEQGKQLIKI

SEQ ID NO: 36455 - protein, 311 aa, unknown
  TnpB Polypeptide
LPSYGSGKNFGNQLALKQCKIFVNALRKPTSYSSSITKKELDRQTSRKFVSTNHLPALQAGYKFLGGNRLKIGSRVYQYWNSREIEGRVKTLTIKRTTLGELFMIVVVDNIVELEVKSETSRIAGFDFGLKVFLTVSDGTQIESPQFLKQSLTVIKKASRQHSKKVKGSTNRERARKNLVRRHEDVVNRRSDWLWKLAHDLTDRFDVLCFETLNLKGMQRLWGRKISDLAFGEFLQILEWVAKKKDKQIVFIDRWYPSSETCSNCGHVLKELDLSIREWRCPSCQSVNGRDQNAAKNICVVGASTARVRRC

SEQ ID NO: 36456 - protein, 402 aa, Escherichia sp.
VKRLQAFKFQLRPGDQQECEMRRFAGACRFVFNRALALQNENHEAGNKYIPYGKMASWLVEWKNATETQWLKDSPSQPLQQSLKDLERAYKNFFRKRAAFPRFKKRGQNDAFRYPQGVKLDQENSRIFLPKLGWMRYRNSRQITGVVKNVTVSQSCGKWYISIQTESEVSTPVHPSASMVGLDAGVAKLATLSDGTVFEPVNSFQKNQKTLARLQRQLSRKVKFSNNWQKQKRKIQRLHSRIANIRRDYLHKVTTTVSKNHAMIVIEDLKVSNMSKSAAGTVSQPGRNVRAKSGLNRSILDQGWYEMRRQLEYKQLWRGGQVLAVPPAYTSQRCACCGHTAKENRLSQSQFRCQVCGYTANADVNGARNILAAGHAVLACGEMVQSGRPLKQEPTEMIQATA

SEQ ID NO: 36457 - protein, 405 aa, Mycobacterium sp.
  misc_feature (382)..(396): Xaa can be any naturally occurring amino acid
MAKFEIPEGWMVQAFRFTLDPTAEQARALARHFGARRKAYNWTVATLKADIDAWQATGIQTAKPSLRVLRKRWNTVKNDVCVNIETGVVWWPECSKEAYADGIDGAVDAYWNWQNSRSGKRDGKRMGFPRFKKKGRDPDRVTFTTGAMRVEPDRRHLTLPVIGTVRTHENTRRVERLIAKGRSRVLAITVRRNGTRIDASVRVLVQRPQQPKVTDPGSRVGVDVGVRRLATVATADGAVLERVPNPRPLDAALNELRHVCRARSRCTKGSRRYRERTTEISRLHRRVNDVRTHHLHCLTTHLAKTHGRIVVEGLDAAGMLRQQGLSGARARRRGLSDAALGTPRRHLSYKTGWYGSQLVVADRWFPSSKTCHACRHVQDIGXXXXXXXXXXXXXXXRPMLSGPSA

SEQ ID NO: 36458 - protein, 522 aa, Actinomadura sp.
MSDPAPADEKKKRGGFQARRGFVVQAYTFALDPGAEAEDRLRSHCGAARTAYNWAVGHVLATWAQRIAEASYGISEEERTPWRPWSLASLRKTFNAVKRTDPQFAGWWADNSKEAYNTGLAHAAAAFDNYAARRRGERAGPRVGAPRFKAKRRARPTCRFTTGTIRVEDDRRHVTLPRLGTIRTHENTRKLQRRLANKTARILSATVSHQRGRWQVAFQVEVQRRTAAPARPEAVVGVDLGVATLAVVADTAGNVCHIDNPRHLGSELVRLRRACRTVSRRQGPDRSTGRQPSRRWRAADAERTRIHHRIANLRTDAIHKLTTSLAAEYGTVVVEDLNVAGMLKNRRLARSVADAGFGEIRRQLAYKTGWGGGRLMVADRWFPSSKTCSRCGTAKAKLPLSVRTFTCDACGLSMDRDHNAAVNLAALAACTTGTGVAGDRDAQASKPRRADHKTRTTRRNDTGPAERAGGAEPAPRGKETRDRRRTPDSVVVTPARTSRAETHGMPIPDRDRQRAGWRGEPH

SEQ ID NO: 36459 - protein, 374 aa, Streptomyces sp.
LRSPQRRAARAPGCLPAQLEDEHHVRRPVRAVEGHPRFRPRAPRPLVLLLPTGHAAPPQQGIRCLLPPREERYEAWVPALQRHWTLRHGHFSQGRRRLPLELHPARAADPRAHIGHVRVHQHRPVKGRVKTVTVKREGNRWYVVLSCADVPVESLPQADAAIGIDMGITHFLTTSDGEHIANPRFLQEAAEELAEAQRHLATFPRHTKRRTKKHRAAARKVAGIHARIRRRRLDHAHKTALTLVRGHDVIAHERLNIAGMTRVPVAKPDLEQPGVFLPNQRAAKAGLNRSILDTGWGVFLTILANKAESAGRTVIAVDPRNTSRSCPNCGHVAKENRVTQAIFDCTACRFTANADHVGALNILNRAGLALCDTA

SEQ ID NO: 36460 - protein, 391 aa, unknown
  TnpB Polypeptide
MNYIVRRIKIGHSRQLDALALECGRLYSEVVVSFWRTVRHKGLWLKPSSMMRWLNSDKLHAHTADACVQAFYAALKSWHTRQKGDPEARPPHRQRKFFRIEYKNSAMRLREGKLVLSNGRGSDPLVLDWAFDIPRTLIVHWQGTQYEAIATYEAKEIADSLGDKVAGVDLGEVHMAVAHDGEACTIANGRHLRSVRRYQNKLKALLSSKIDTKKRGSQRREKLIQSKRKQLSKLDHQIRDILHKQTTGLITTLHEAGVQTVVIGDVRDLRKGLDYGKKANQKIHQMVSGKTRFLLTYKAELRGMEVALQDEAYTTQTCPACGHRKKPKGREYSCCCGFSYHRDGVGSLNIRNKYLGCGPVVGVMAPPTGLRYHPHVRVARKEIPLRETAGL

SEQ ID NO: 36461 - protein, 426 aa, unknown
  TnpB Polypeptide
MRTAYQYRLRPTKQQAVELDRWLAMLCAQYNYLLADRFDWYERNRSPINACPLVCHLPELRDNPDYYSQKKRLPLLKKSHPWYAEIYSQVLQDIVKRVKVTFDRFLKSDINGKRSGKPRFKARDRYRTFTYPQMKEGCLQRKTPIAGSPCGGGFSKTGNLINLPMFGSVKVILHRPIPDGFKIKTASITRKADGYYLTLSLEDETVPTIKPDFNLESITGIDVGLADFLTTSNGEVVPIPQYYRKAQKRLRVAQKRVSRRKKGSQGRKKAVKQLGKQHKKVADKRKDFHFKTANNLLKQYDVVSYEDLNVKGLARTNKAKSIHDASWSSFLSILQTKAENAGLLTIAVSAYNTSQNCSGCGVKVPKKLHERWHDCLHCGCSLDRDHNAAINIMNRAAGQPVLKAKSLLCNSRIVLEAHTVLGTPSQ

SEQ ID NO: 36462 - protein, 400 aa, Burkholderia sp.
MQRLQAFKFELMPTGEQRHDMCRFAGSCRFVFNKALELQQTNREAGGKFIGYVAMAKHLTAWRNSMETPWLKASPVHPLQHALKNLERAYKNFFAKRAAFPRFKKKGHSDSFRYPDSKQIKLDQVNNRIFLPKLGWLRYRNSRNVLGEVRNATVSRNAGKWFVSIQSAREVEQPVPQATSAIGIDMGIARFATMSDGSFFAPLNSFRRHEARLRRAQRAMSRKVKFSNNWKKAKARIQRIHAGIGNARRDYLHKATTTISKNHAMVCIEDLQVRNMSRSAAGGPAAPGKNVRAKSGLNKAILDQGWFEFRRQLDYKLAWNGGCLVAVPPANTSRTCPACESVSAENRQTQAAFRCVGCGHEDHADVVGAINILARGHRVAACGEPVQSGRSVKQEPAEAI

SEQ ID NO: 36463 - protein, 468 aa, Mycobacterium sp.
MIVRMRSCAQAAKVAEATGGVQLAGKPKPDGTPTFSRYVEIGVDFEAHRPVVESVSVLFELYDGDANSYAATGGPGAQLPSGWMVTAAKFEVEWPADPQRAGLVRSHFGARRKAFNWGLAQVKADLDAKAADPAHESVDWDLKSLRWAWNRAKDDVAPWWAENSKECYSSGLADLAQGLANWKAGKNGTRKGRRVGFPRFKSGRRDPGRVRFTTGTMRIEDDRRTITVPVIGPLRAKENTRRVQRHLVSGRAQILNMTLSQRWGRLFVAVCYALRTPTTRSPLTQPTVRAGMDLGVRTLATVATLDTATGEQTIIEYPNPAPLKATLVARRRAGRELPRRIPGSHGHRAVKAKLARLDRRCVHLRREAAHQLTTELAGTYGQVVIEDLDVAAMKRSMRRRAFRRSVSDAAMGLVAPQLAYKTAKCSGVLTVADRWFASSQIHHGCPAPTAHRAGCKARAASTNTCSAL

SEQ ID NO: 36464 - protein, 378 aa, Listeria sp.
MERLKAYKFRIYPTEEQALFFAKTFGCVRKVYNLMLYDRIQSYQKSQKVSKGKITFPTPAQYKKEYPFLKEVDSLALANAQLNLDRAYKNFFRDKSVGFPRFKSKKNPVQSYTTNNQNGTIFLIKNKYIKLPKIKDYIRVKIHRQPEGIIRSATISYHSSGIYYISLLYKEEIIALPKTGLAIGIERGMNNFVVLSDGRKVNNMLDNEKMRLKLKQEQRKLARRMVLAKNNGVSLSEAKNYQKQKQKVARLYVKITNQQRDFLNKLTTEIIKNYDIICIKCMGENNKPSNPKLTHRMLELSWSSFISKLQYKASWCGRELIIIDTGFKASEICSRYGSKDGKKMTNLAEWIYPICDTSRELGIDSNKNILIAGQKNRN

SEQ ID NO: 36465 - protein, 171 aa, Microcystis sp.
LHKTNRRTLKRKQQKLSRKKKGSNNRQKARRKVAKVHSKISRCREEFLHKLSRKIVNENQVIALENLNIKGMVRNHNLAKAISDCGWGMFCAMLKYKAEWEGKTYTEVDRFFPSSKTCNVCLNQVGSLPLEVRNWTCVHCKTTHDRDINAAINIRNEALGILSLGKARYCL

SEQ ID NO: 36466 - protein, 408 aa, Cyanobacteria sp.
MLRAVKVRIYPTQQQETHLAQAFGCVRWVWNHSLVTMSQTYKDTGKGISALTMKKMIPVWKTEYEWLTECYSQCLQSSVLNLSQAFGNFFDGRAGYPTFKTRHGRQSLQYPQNVKVKSDSEIKFPGNLGVVKAKVHRTIKGTIKTVTVSRLTDGRYYASLLVDDGIEKPESSDEGKAVGIDLGLTDFAVTSDGSKFQNPRHLKKHLGNLKRKQRKLSRKKDKTTNKRRKAQKALARVHSKISRVREDFLHKLSRKIVNENQVIVVEDLALKNMVKNHNLAKAISDVGWGTFQTMLKYKALQDGKIYLEVGRFFPSSHLCSNTLLKVNKIDLSVRIFDCPHCGQRHDRDINAAINIRNEGLRILALGTSATALGGNVRPKPYGRKSTTVEAVADELGSPRHTASAVGVW

SEQ ID NO: 36467 - protein, 224 aa, unknown
  TnpB Polypeptide
VSRDAAGRWHISVLCETTVADGPATEAAVGLDAGITSLLTLSTGEKISNPRHERRDRARLVKAQRELSRTVKGSANRARARVKMARVHARITDRRTDHRHKLSTRIIRENQTVIVEDLSVRNMIRNHTLARAISGASWAELRRLLAYKADWYGRSVIAIDRFCPSSKTCSACGQLAASMPLNVRQWTCASCGSAHDRDVNAAKVIRAAGLAVQACGDGVRPARA

SEQ ID NO: 36468 - protein, 385 aa, Megamonas sp.
  misc_feature (221)..(224): Xaa can be any naturally occurring amino acid
MEKAYKFRIYPNKTQETLLQKTFGCVRFIYNHFLDRRIKAYEQNKKTISYNECSKELTQLKKEKKWLKEPDKSSLQNALKNLDTAYKNFFNRQKVGFPKFKSKKNRYKSYKTNMTNNNIVFLGNKIKLPKIGKIKIRDKYCQIEGRILSATVSQTPSGKYYVALCCTDVPQPELIKTNKYVGLDLGIKDFVITSDAVKYSNPKYLQKLLTRLAKLQRELSXXXXLTRLAKLQRELSRKTKGSSNWEKARVKVAKLHERIANQRHNLLHQVTCQLIRNYDVICLEDLQVENMMKNHKLARNIADVSWSEFMRQLTYKAKWFGKIIVKINKFYPSSQLCHVCGYKNTEVKDLNVRKWNCPKCKTHHDRDVNAAINIRNEGLRILNIA

SEQ ID NO: 36469 - protein, 172 aa, Gammaproteobacteria sp.
METTPVKARSNQADIVGVDLGVKNLITKSNGEIVEGRKPLKKLSRRLARMQRHLAKCTKGSKRYNRQKRLWARLHYRISCIRKDVSQKSTHHLCQGFKVVCLEDFPGKGMLKNHKLAKAISDLWFYEFKRQLEYLPFLEIGFRRFLLGFPSSKTCSNCGHRRNEAFRTSKSL

SEQ ID NO: 36470 - protein, 251 aa, Okeania sp.
MRKHGFISKYDLRKVILNSDLPDWIKKSPYHLKVNAIYDANAAFKASRKSGTKKPCCGKFRSIRDRIQSIKFRVEDFKKGTWLPSVTKGLKLFASELIPSINVEYQQKQKDGTYKVCVREQSWNAETQLVYDKKRWFAVFPVEFKPETSKSKSIIALDPDVRSFLTGFDGEKFIDIGMGDITRIFRLGQHIDQIISVKTKLKGRNNKYKRQRVSQKINSLFIKVRNLIDEVHKKVAKWLTTEYRMIFIPNE

SEQ ID NO: 36471 - protein, 543 aa, Streptomyces sp.
VGELRSIAAPFVASGPSGVAVRTRLKQLTPGDEKALRLVGGHLGSLASKDLKARCRDGLEHSGQAWAVRKRELTPASSSRWAGSITKATHDQWALARRCQLAHIQNLEAGIRTIEDRLSLPVGQKGTKKAPGGYRSRREWHAKARRLRVLQDRLTAARADREAGIVHVVRGGKRLARTRHHLETAQLTESAWRGRWEAERWYCQADGESGKRYGNETIRISPDSEVSIKLPAPLAHLANAPHGRYILACRVAFAHRGTEWADRVEANRAIAYRIHLDTGRDRWYVTASWQTPPTPALPLEAALAHGVIGVDMNADHLAAWRLDLHGNPTGSPRRFLYDLTGPAQHRDAQVRHALTRLLHWAQTCGVKAIAVEDLDFTAEKTREKHGRRTRFRQLISGMPTGKFRARLASMADATGIAVIAVDPAYTSRWGAQHWQKPLTSTTRTTTRHEAAAVAIGRRAQGHPIRRRTAPPPHDRSDRAGHRTAQAGSGVPRREGPRPRIPGPRTRSVLPGCGVNAGDQNAQHRPGRSTEHGFWRQDPLPLGP

SEQ ID NO: 36472 - protein, 215 aa, Burkholderia sp.
MILVYRYRVKSLNGLLNKQSRAVNYVWNFCNDTQKHALKWGKKWPTGFDLNVLTTGSSKELGIHSGTVNATCEQYAKLHAKVANARADFQHKLAVDLVRRFDYIAVGNVSAVKLARTRMAKSVYDASWSSFRNKLRYKAIAHGATFEEVDESGSTQSCSACGSKDSTTRPKGIAGLRIREWACSGCGVVHDRDINAALNILRCGRASPGVGSLSL

SEQ ID NO: 36473 - protein, 589 aa, unknown
  TnpB Polypeptide
MVEKTNNIDDAEIKYKQALKNYHKESNRHVLVLEADVTEEQKRMILHTSNLIRIAGNRLATVMKRNYEQLVRTKRYRNLKSLYKKAKDTDDKKLLASVTAQIQEIQESYNVTWDFCRKEMNKIKDIYHINSIFARSKAEDVWSGIKKCLYGDGNTIHFKKYGDYPEIRAKEIKRGISVYPVVSDNGNNSLKLHIMKSEFNLTVNKPKHNKTRSGNIISDILEPHDRFAEDEVNAVCRYLENPDVIDKAAVDLYEKTGELLDSYRPCYVSLVIREIRGELRIFAHITIESTAKTKFNKDGTRRHQYGKGFIGCDIGPQSIAYTSKEEVGLKNLAERGASIKAREQKEARILRKMDRSRRAMNPENYNDDGTVRRGKKTWKKSNRYKKLHSQYRNICRIAAENRHLAINEEVNHMRALGNVFITEPKNAKKLQKRSKKTERQDKPSVVQKSDGTEQLIYKYKRKKRHGKSIKNRCPGYFQAQAKAKFERTGGVYIEVSATYRASQYDHTCNKYIKKALSQRMYELTDGTRVQRDWYSSFLMYCIGTDLQNISRYKCKRYFDELYVKYLKLEQYIINNKITVMNSGIKFKAA

SEQ ID NO: 36474 - protein, 553 aa, unknown
  TnpB Polypeptide
MRTCEQAARVTAATGGVHLFGKPATDGTPRLSRMVALDGDFETHRAAVESVSVLFELYSGDAQGFIATGELGDPAPSGWTVTAAKFEVEWPADPDRRRVIRSHFGARRKAFNWGLAKVKADVDAKNLDPSHISVNWTQAALRKVWNQVKAEVAPWWANNSKEAYSSGLADLAQALDNWSASENGARAGRRVGFPRFKSARRDSERVRFTTGAMRLESDRRTIVLPVVGGLRSKENTRRVQRHLAAGRARILNMTLSERWGRLFVSVNYALRTPSTERRPSQPNTRVGVDLGVRTLATVATINTSTGEEIITEYPNPAPLKATLTVRRQVGRELSRRIPGSRGWRQAKAKLARLDRRCVQLRREAAHQLTTELAGSYGHIVIEDLDVEAMKKGMGRRPFRRAVSDAAIGAVRPQLVYKTARSGATLTVSDRWFASSQTHHGCTAPDGRPCRLIGKRRIDKQLVCPQTGEVVDRDHNAARNLRDWPDHASCGPVRATAPSAPGPTESVGTGHGADPGSSGACGAPVRPRPVGPGAERPESNRQHRRGETLQGDAA

SEQ ID NO: 36475 - protein, 393 aa, unknown
  TnpB Polypeptide
LLKAIKFQLTLNQEKTILFLKHVGCCRKVYNHFLNENKEYYRQYQCFYPMYGFMKELPDLKNQFPYLREVDSQALQGVLFDQKQALQNFFKHGKGFPKFKSKHRDRMSFRVINTNDSIRFRGNQIKLSKIGFVNIARSSSQLKRLPTSSNYKIKYATISKDSDQHWYVSVLIECENQALLPRLNNIVGIDLGIKNNYQTCYRNDNCVLEYQTIDNPNAYEKEVKKLQKLQQRLSRKVKGSKNRDKARQRLAKKHFRVKSIRQDFNHQLSKFLINNFQMIVIEDLDLNQMKENRLGRKISDLAFYQFRTFLDYKSKWYGRDLVITDKYFASTKICGECGFKNMNLTLKDRDYTCPSCNTHLDRDENASKNLYQIGAHLWNTGEILDSNKYMNLF

SEQ ID NO: 36476 - protein, 338 aa, Erysipelotrichia sp.
MYIVIKLLVDNDSVKEDVFNHYQKVFTDETKRCAEYMQKKNKELELWKVSSYIHYSSRYALLREAKKLTQLKKFNEHSIVIPVWSNKSYVLSNDRIRLLYGESYQLPYVDLRLRIRDYQLEQLKTCKLYSAKLKKSNQYWYVYITANKQEKPKTKSNISMGVDLGIRVPAVCVTSNNHVKFVGNGRYIRFIERNLKAKYRKLDKAKNKKAIKKMNHKLANIKFHLDHEYSKTIINFAIEHNVSLIKLEKLTGIQTKMVKKRMKKEFLWSYYRMQTYLEQKAHMNGIQVSYVPAGYTSKRCPNCKRLNNPKGRNYKCRCGYQRHRDLVGAINILNSTTI

SEQ ID NO: 36477 - protein, 515 aa, Bacillus sp.
MKTTRTCKINSITKEQTEDLITLIRTFESAKRYSFKRLIEGENEKELIKKLQPKYLLNKRFCEDVILQAQTILFSQKELLPVYLENNQKKLEKTLQKIADYERGKKRPKQVALETCLIGLRKRKQKLEQKIETYAKHIKNKTLPPIIFGGRKNFYERMKNKISNQEWKDLRTRQLYSRGDKSKKGNLNMRITVDDCGQGWLEIANPLGRTNGKTKSPRIKVPIIIPYHFYHQITNVVMGKQIGVNPKGKPIIEHQKYSVEIIRKQNEFYVNITFNETEIGRVLDFKETPQSDVIAGIDVNPDRIAVSLCTKQGNFKGSKIFYLHNLNTFSTNKRATIIGQIVKQIKTWLLENNVGGIVLEDLKFQQSHDTDTYSNRNFHQFTYKKMLNSLIRMALRNGFSIKTVNPAYTSVIGKLKYSKNFGISVHEAAAFTIARRGLELQEQLPKEIILLLKNQITTKLRILVASMEESKKNTKKVYKKWLQTIQTWKEYHNWKLWSILHKTVYMSNQQFVFKI

SEQ ID NO: 36478 - protein, 207 aa, Paenibacillus sp.
VLRKFNLAHHCKLETGTRILGVDLGLKVPAVTITDDDKVRFFGNGRENKYMKRKFRSVRKKLGKNKKIKAIRKLDDKEQRWMKDKDHKVSREIVSFAVENQISVIRLEQLTNIRQTTRTSRKNEKNLHKWSFYRLSTFIEYKANIVGIKVEYVNPAYTSQSCLKCSEKNKAHDRTYKCQCGFEKHRDIVGAMNIRYAPVADGNSLSA

SEQ ID NO: 36479 - protein, 423 aa, unknown
  TnpB Polypeptide
MENQPRRTVIIKLDVSSDDADALHQTKDQFLACANRTSDWAWRRDEYCITSKNNAEKDLYGGLKEETDLTANLVQKGIRRAIEAVTHGVNQLKNGEKASQPHFQSWSVVYDKRSATFNNDHATLSTVDGRITAEYVIPPKSGREDTPFGRYYDSEDWDASHATLQYNEVADEFALHVTAKHVGGEDNCEIQEAEHDDDGPENGVVLGVDLNVNGAFAVTSTGAFIGSADHLTHRRNEFEKRRGRLQQVGTRSAHLSIKSIGSKFSDWSLDWLHNRANELIVEAECNDVNGLIFENLKHIRKRISNGSKFQQWAVAKFIELVTYKVEDTDLFVDTVNPAYTSQRCSHCGFVHENNRSDKVFKCLKCEHEANADYNAAKNVANRYCAYIHRGQKSRDGWATSQLALKSGTLNVNGDFNASPLLEG

SEQ ID NO: 36480 - protein, 512 aa, unknown
  TnpB Polypeptide
MSRYRLLPSPAQEAVLREHCGHARFVWNLAVEQHQLWRPGRKNAPGYLEQCRQLTAARREHAWLRVGSQMVQQQALRDFARAMANFFGGTHCRPSWRKTGRDEGFRIVAVKPAHVRRLSRNTGVVWVPKAGWVRFRWSRAVPDCKSYRVTLDRAGRWHVAFAAIPQPIPGPRNGETVGVDRGVAVSAALSTGELLTVPRLSPQRQRRLVLLQRRLARARRGSCRRVRIKAAIGRLRAREADARKDWCEKVSTDLARRFDVIRVEDLRIASMTRSAKGTTEAPGRNIRAKAGLNREIAASGWGLLARRLEDKAPSRIEKINPAYTSQRCSACGHIAAESRKSQAHFACVACNYACNADVNAARNIAAGHAVTARGRLLPDPGAHRPRRAVPRVCGPAAGVGHAGRRGLIPETRTQIVSARTVAEVVADIATSDGGPGPDRGDRRAARGGPGSAGHHAGRAPRDAGQGPGRTQPGRPRRRHAGHGRPAARPGGAAGRSDVPGVARPAVAATPAH

SEQ ID NO: 36481 - protein, 512 aa, unknown; identical to SEQ ID NO: 36480
  TnpB Polypeptide

SEQ ID NO: 36482 - protein, 479 aa, unknown
  TnpB Polypeptide
MQIGNRFRCYPTPAQAQTLLQWIGCQRYVYNAKVGEDQYFRRFARKSLTHTGEFAPIDQQYSQFKTELTPWLSEVPSIILRNGTVLWKQAYSRFFQKLGGRPNIHKKHGKQSVWLTSELFEFTPVVDGDTGEITGHQLHIGTKKYPVGVVAFKTHKDCTPPASLHISIHAGQWHVSFNCDDGTIEPTDKDTTAWLTQFDAAELREMTIGLDRGVALPLAGSDGQQFDFTPVQDKRLAAQEKHKKRWQKRQARRTKGSKNWVKAKRKVARYQRYGADVRRDVAHKTSHTLAVDPRYKLFVFEALKVQNMTKKAKPKQDEQGRWLRNGAAAKSGLNKAILASTWGQTKTYLQYKARRQGKLAIEVPAFYSSQECGACGHIHQDNRISQSEFVCQSCGHIDHADHNAAKVIAGRGVSQLLVGRGLKKEKRTCRITRQKVGAEGSKPGVPMHPTLGETEVSRLSGNIPTLWSLTQETPAIALA

SEQ ID NO: 36483 - protein, 479 aa, unknown; identical to SEQ ID NO: 36482
  TnpB Polypeptide

SEQ ID NO: 36484 - protein, 439 aa, Chloroflexi sp.
MKTIITAKLKLLTSSAQFQALRHTQLAYRAALNSVSQYSFSHGKMSNQRALQRACYEEIRLKYGLPAQMACNVPRQVGATYKVLWTKAKQNAALRAAGIPAKRYKGLDTPPKYVSPTLTYNYHRDYSLKPDNQVSILTLDGRVIIPYTGYSKHVALLQHGAAIGAAKLWYDKPHKQFYLLVTLELEVTDPSPESHTQVVGVDVGQRYLAVTATPTNDACFYSGKQVRAIADHYARLRKRLQKKGTRSATRRLLVLSGRERRLKQDCNHRISRHIVDAHPHSIIGLEDLTHIRERTKRPHGKQATKKQRQANRHASKWAFAELHSYIAYKATLTGSMAVKVDAHYTSQACPRCGYTSAANRPNKGLLFRCQSCHYSLHADLIGARNVALRTLLVRQDWMSTGVLSVRPDVSCDEAKAARLQRYAELRWSIDTSPLSLDMG

SEQ ID NO: 36485 - protein, 352 aa, unknown
  TnpB Polypeptide
MIKTFKVKHNRDLSVELRKALQVSMFALKHKCTSSSQVKQFGLKSIISNQIIRKIIRNKRIKSIHNANLIIPQQGITYKNNIVRIPCLDLSIDFFISGFLKINQIELNSEYAFISCDFPSEPTRDSTNYIGVDLNTTGHMAVAADPLTGKVWKLNKKSSFTRSKYRQIRKKLSRQKKFKVIKRLKNREQRICKDLDHKVSTFLVTLAKTQNCGLRLENLTNIRKTSKNKSKAFKASLNNWSFYQFRTMIDYKAKLLGVKVEYIDPRYTSQADSRTGHIGIRNAKTFKSVDTSTVEHADVNAAFNIALNQLNIAQLRAERDARKSHKENTPLTDLALKAPSNKSKKTLEPNAL

SEQ ID NO: 36486 - protein, 355 aa, unknown
  TnpB Polypeptide
MITVYKFRVKSNERTLNRWARACNFVWNFANDRQKDALRFGRRWLTGFDLNKLTSGASKELGVHSGSINAVCEQYAKSRSQHKKPYLRYRGKKSLGWVPMKGRDLRFIGDKKFRFAGVDFRVALSRPIPDGAVVKDGTCFTQDSLGHWYLSIVLEIQQEALPSTGKSVGIDLGLKDFATMSDGEAVEAPRIYRALEERLAVAQRAGHTKQVKRIHKKIANQRNDFHHKLSRKLVNENDVIAVGNVNASGLAKTKLSKSVLDAGWSSFRSMLRYKSEYAGRIYEEVNEAYTTQVCSSCGSLPDSRPKGIADLGMRQWTCCNCGAVHDRDVNAARNILSKFVAGLGHETPDGGIPAL

SEQ ID NO: 36487 - protein, 380 aa, Symploca sp.
VLIYEYKVHPKPQQIAAIDEAIRTSQFVRNKVLRYWMDNRGIGKAMMFRYNTLLRKEFKFVEELNSHACQTAVERVFKAVNRFYDNCKKQVRGKKGYPKFKKNTRSVEYKISGWKLSENRRHITFTDKKGIGSLKLIGTRDLNFYQLEQIKRVRIVRRADGYYVQFGVKLDPRDTALPLTPSQKAVGIDVGIKYFLADSQGNLEPNPQFYRQGEKQLNRLNRNKSKKYRKGKPQSRNYHKARDRYARKHLKISRQREEFVKRVALRLIKSNDLVVYEDLNVQGMVKNRHLAKSISDAGWSKFRQWLEYFGYKYGKVTVAVAPHNTSQNCSKCGEKVQKSLSTRTHICPHCNYIEDRDINAALNILHKGLSTVGHTESKKA

SEQ ID NO: 36488 - protein, 402 aa, Streptomyces sp.
LLRAYKFLLRPTVRQAQALTEMLRDHCSLYNGALQERRDAWRHTSKTSITYGDQSAQPREIRAFDPERQGRWSFSSQQATLRRLNKAFQAFFRRGRSGGKPGYPRFKGVGHFDTVVFPRDGDGCRWDSTPHDTHTRVRLQGVGHVRVHQHRRVNGQVKTVSVKREGNRWYVVLACDSVPAEPLPSTGSVVGIDMGTVHFFTDSGGEHAPNPGFLDAVAEELAEAQRQLATFPRRTRRRTKKHKAAARKVARLHARIRRQRLDHHHKRALALVREHDVIAHEKLNTAGMTKAPAPKPDPERDGAFLANGAAAKAGLNRSILDVGWGQFLGILANKAESAGRLVIPVDARNTSITCTACGHVDKRNRVTQAKFTCVLCGFTANADHIGALNVLNRAGLVLCDAA

SEQ ID NO: 36489 - protein, 430 aa, unknown
  TnpB Polypeptide
MIKSFKIKLLPNNKQQTKLFQFAGAARFAYNWVLDKQMNNFKNGIKFQNNYELRKEFTVFRNLPENSWLLEISNNVTKQAIKDCCDAYIKFFRKQKTKGYVKYGKKKIEHYARIGKKLTIYDMNGHPKFKSKKNGDFNFYQSTDKIKFTKTHVKFENIAKSRRKNRQKANWIKLAEQGKIPINAKYKNPRITFDGIDWWISVGINIKRSLKPMRNLKVLKITKKRREGLGIDLGIKDLAICSDQSKIKNINKSYTIRRLKKKRRRLQRQVSRKYQTNNKGESYRKTSNIIKSEKKLLRINRKLANIRYNHLHQATTAIIKRKPSFICLEDLNVKGMMSNKHLSEAIQEQNFYEFRHQIEYKAKWAKIPVIIADRYFPSSKTCIRCGKVKKDLKLSNRVYKCECGNIIDRDFQAALNLKLYGEEQLKKSVC

SEQ ID NO: 36490 - protein, 407 aa, unknown
  TnpB Polypeptide
MEQVINRGYKFKIVPTDEQKEFFLQSFGCARKIYNLYVSELYEQLEKNNYENGLIKKSDIKLSKYTDFKKQYDYMKDVDSQCLSSAKMDFNNAITRFNKEYDKKTFTKRSRKREKTLGIKPTFKDLKGLPKFRSIKKNDFSYRTYNQSMGNKWNLITLVDKELKIPKLKTLIKVKQHRPLPKDSIIKNCTISMDNKGVFYVSLCVEYTINIKPKQIDKDKVLGLDYSQQDFYVDSNGKTSNYPHYYRKSEEKLQKLQRSLSRKELKSNNWQKQKQKIATLQKHIANQRVDWIHKESRSIANNYDAVIVEDIDLRNMAQCLKLGKNLHDNGFGMFRIFLKYKLEEQGKHFVKTDKWFPSSKMCNSCGTIKEDLKLSDRLYQCDCGYENDRDYNAALNIRDCGTRLIAW

SEQ ID NO: 36491 - protein, 328 aa, unknown
  TnpB Polypeptide
VRAEFHDVRAVFQEIEANALRRVDLAMQAFFRRCKTGAIPGFPRFKAKHRYDSFEYPHGNRCIKVDREVHTVTLPSVGPIRFRDARGVPPSFTVVKIMRKLGAWYACFETVIEPKAYLPSNREIGVDVGVANLAVTSDGVFLENPRYGQRYRVRVERHQQALSRTKHGSKRRRKAIRVLARAKSREADARIDTAHKASRKLAECADVIVFEDLRIANMVRSAKGTIEEPGKNVAAKSGLNRVILDAAWRRLMDMTVYKAEEAGGVVAFVNAKNTSRTCSGCGHVSKHNRLTQAEFLCVGCGHAEHADVNAAKNILGRYRGWLGLAPAA

SEQ ID NO: 36492 - protein, 420 aa, unknown
  TnpB Polypeptide
MLRAYKYRIYPTEEQKVMLAKTFGCCRFVYNWARELKEKAYKEGGENISEFEMKKRVVHELRETAPWLKEVSSTSIEYAIADIYRAYNNFFAKRAKYPKYRNKRQRQHYHDRPTQGRGVRVDFERGFISIPKIKEIPCVFHRRFNGIIKQVGVELLPSGKYHISVLVEDNAQLPEKAPIRPENTLGIDTGLTHFAVLSDGQVYEPTHFAKKEQRKLKLLNRRLEKKEKGSRQFCILKRRIAKLHENVANRRQDYIHKLTHYIACENQATTICVENLNIKGLRRSKFLSYSIDDAAIGEFYRQLKYKCDWAGKNYIKIDRFAPSSKRCYHCGYIFKGLSLKDREWTCPECGTHHDRDLNAAINIKHFGLSVKEALPSERRKVTPVEQPLMDERSSEPKKLCCDFASANETGKVKGKRAQMP

SEQ ID NO: 36493 - protein, 391 aa, Deinococcus sp.
MNKTTTSIKTFKYRLYPTKTQEAAMFETLRLTRTLYNAGLEQRREAYRKQGKTLSAYTQQAELTALKEACPEFGTVYSHVLQDVFDRLDKAYKSFFSRVKAGTKKAGFPRFKPRQRWNSFKYKQCWDNKKETWTSCGKPVNDGKRISVPKIGNVKIKLHRPLEGKPKSLQILLDVDQWYAIYACEVHNVALPATGSSIGVDVGTTWFAITSDGGFVENPRHLEAGLKKLRVQQRTVSRRKKGGNRRRKAVQSAAKTHRKIRRQRLDFHHKTARSLVNTHDLIAHEALQVSDMVKSNLARSIADVGWASFFSLLALKAESAGKRAVAVDPRYTSQRCHACGHTGKENRMSQSKFQCVQCGHTANADVNAAQNILARALPSGVNDSGVTHVVA

SEQ ID NO: 36494 - protein, 389 aa, Nitrosococcus sp.
MLKATKIRLYPTREQAEFLNRQFGAVRFAFNTGLRIISHRYKRHGQSLSAKHEIKKLLPIAKKSRKYGWLKEADSVALAQACINLDKAFQRFFKEKKGYPRFKRKRGKQSSYHCMSVKVGDDWIKVPKLEPIKAKVYRPVEGKLKSITLTRTVTGKHYASLLYETGQPAPAPLKDVDAASVVGLDMGLSHLAIDSNGRKIANPRFLKKGQKNLKRKQQALSRKKKVSANRAKARLRLAKAHERVAHARNDFQRKLSRQIVDDNQAVIVETLKAKNLMKNARLAKHIGDVSWHALTAKLAYKAKEQGKHLVKIDQWFASSKTCHYCQHKMDAMPLNVRWWDCPACQRRHDRDINAALNIKHQGILKLKAEGLSVSAHRGSRKSGRSPVAA

SEQ ID NO: 36495 - protein, 354 aa, unknown
  TnpB Polypeptide
MQEVLPGTVFVTYSYRVKDAGSGKRLQALATSVNQVWNFINEVSMKSARHGQRHWAPKKLLRDLTKGAGKMIGLPSQVVQEVIDQYVVSRREHGRAKLRWRVSFGTRRTLGWIPFTNQDIALVADMALLRGQKFRIWRHRDCEGRIKSGNFSQDARGRWYVNLVCEVPRRFEGGYEINGVDLGLKRTATASNGEALDQARFYRDLEGKLAEAQRRGSKRQVKTISAKVSNRRKDALHKFSRALVKRSRAIFVGDISASGQARSGKGKSVLDAGWATLRRMLRYKCDRAGASYGDVNEAWTTQTCSSCLARSGPKGREELGVRRWVCELCGGVHDRDVNAALNIARLGCETLGLK

SEQ ID NO: 36496 - protein, 410 aa, unknown
  TnpB Polypeptide
MSDMLARGVAFRLIAELPPEAKFLLEDFRLAVNNAIRAGLQARVTSRNALSKLAYKDFRKEHPNMYSQHLVSAFEVAGSVLKNCRRRLRKSGASRVPYVRRLMVKAENQAYKLDREHGVVDLPIRAGCHVKLELLVSDYHRRYLDDPSLTLGSLTLLPDRVIVAFRKEAPRPYLPESALSLDTNERSLDGVFLKSDEAKAVKAEFPDVAIIQRRHHDRRKGLQKKKAHDRQTSRRLCRREGQREHHRIEYRLHQVANAVLSLAESRKSAIVLEDLKGFKPRWNKELNRRLSLWPRRKLHQIIEYKAQWRGIPVVKVDPRYSSRTCPICGRTQDSRMGTEFECGCGWHLDRHINASLNLLQTAVSKGLEMAGGLRFNPGAFQHDVMMILYEPAMAARSEPNGTSCIGAVTS

SEQ ID NO: 36497 - protein, 413 aa, Herbidospora sp.
VAHIVKRSYKYRFYPTSRQAEELTRTFGCVRLVYNRALEERTRAYRQEGRKSSYAQTSAALTQWKRTEELRFLNEVSCVPLQQTLRHLQAAFTHFYAKRADYPVFKSRKRSRASAEYTRSAFRWRDGTLTLAKMHAPLDIVWSRPLPDGAEPSTVTVSRDAAGRWFVSILIEEKISPLAPTGAMVGVDLGITTLATLSTGEKIANPRHERTDHRKLAKAQRALARKAAGSANRAKARLVVARIKARITDRRRDHLHKVTTRLVHENQVIALEDLAIRNMVKNRSLARAISDAGWRELRSMLEYKAAWYGRHVLVVDRWFPSSKRCSVCGSLTTTMALGVRNWVCGCGAVHDRDVNAAINILAAGLAERRNACGAGVRPQGEPLSGRRPAMKQEPLGRPRELPCLPYRENAKPA

SEQ ID NO: 36498 - protein, 399 aa, unknown
  TnpB Polypeptide
LLALKSVKQSYRSTPEIQRILKISRMMVNDCIEIGLSYDVKALKRLSVLSWPRRRKYDCPSYYKTSAVSRAAGILAARSKSLRRGQPTKNPYSLKPQITAYQGFKIRDGALRIPVGKRSFQYVPLTSHTVSVLSDHAVTVRSFTLTPTSLSLCISKEVHEVECTETIGVDRNLRNLTVGNGSRVVQYDLSDTVRIAEKTVEIIGSFKRNDYRIRKKIASKYGLRRRNRTQHLLHKQTRRIVAEALERKQAIVFENIEGIRRLHRRGNGQGPTYRGRMNGWSFSEAQRQLEYKARWVGLPVIRLSRRETRGTSVTCPQCGERLQEDKRIKRKLWCGECRLMMDRDVVAAVNLSRRGRLRFDRSRAQNGLEGGAVEAVKWNPTPTVILRVDASKSIQETQS

SEQ ID NO: 36499 - protein, 549 aa, unknown
  TnpB Polypeptide
MRMSERPIFTYQTRPVLDAVQSSVLDDYASLYGRAERTLFAAIQAGGALNELKRAFLPKFGITARQFNAVRVGLEGKIDSIKSRRPELIAELESRIKKAIKVVAKLSVKPSAAAKLHQKKRRLHILQTKFNAMQADHKNAEVRLCFGSKRLFNAQFDLEANDYASHAAWKSDWQASRSNQFFVLGSQDESAGNQSCQADMNEDRTLNLKLRLPDSLHAHGKYIAITGLRFAYGHEVIVAALASSQRVAAVTKAGKPTVKRIGSALSYRFVRDDKGWRVFVSCEASAVKANTSQTLGAIGVDINADHLGVSEVDRFGNLVRSIRVDLHTYGKTTEQAKALIGDAAVMVVQMAKETGKPVVIEKLDFAKKKAELEATHKPMARMLSSFACNKVIASIKAAAFRSAVDVIEVNPAYTSVIGAVNHAQVKGISVHMGAAIAIARRGLGLSERCPKREATVPTRNGGHVTFCVSVGNRKKHVWSQWGKVRASLKAAHVAHGRSGDPKGLPAPLAPATRSLGAIRPSAVRLRSANRQDNCSPDVPSYLSTAPFRQ

SEQ ID NO: 36500 - protein, 545 aa, unknown
  TnpB Polypeptide
LVAGRHRRGGPGEHSGRHPRVPRSGEASSRREEFKGSGNFGVVYAEDSRNPASSRRQSSGEGWVPSCQAREAHRHDRRQANRHHPKARPGGRVYDGRNCPGCQPHHNLRAAPGFSHGEERRFARPRAPAFRAQYRYTQYASSPMKHWGLSAYWCRMVRGFQYRFYPSPAQRIALAKTFGCARYVYNWALDLRSTAWRAGQERIGYAATDRALTRLKTEPATAWLNEVSSVPTQQALRHLQTAFVNFWENGAAYPSFKRRDDRQSAAFTRSGFQWDGSALKLAKIGKLKIRWSRHFSGDPSTVDVSRTRSGRYYVSFRVDEPLPAMPEASGQIGIDLGLTAFAAFSDGSKHRAPRPLRRKMAQLKRAQKALSRKRKGSSNRKKARVRVARIHQKISDIRRDDLHQLTTRLVRENQTIVIEDLNVRGMMANHTLAGAIGDSGWGEFARQLAYKCEWHGRVLIRIDRFYPSSKICSACGFQHDAMPLDVREWPCPACGVTHDRDVNAARNVLAAGLAVIACGGSVRPEPVKTGKGRRPRSRNRLVACA

SEQ ID NO: 36501 - protein, 428 aa, unknown
  TnpB Polypeptide
VETVKALKCVKVPYNPSEEVIELLNAFRYMVNYCIYIGLEKGITSRFKLTREVYNELKEYGYHSWYVLSAIEVAIAILKNYRKTKRRNRRVKVPRARKLMAKIGNQAIRIVDGKLRIPLRPREFFYVELHKRAKILLEEYKVCSATLTPKAIYVAFSKTVKVEEPEGWIAVDVNEDNVTAVSSDGEIKVFDLSKLKEAGYGYFERRRRLQRRYHKDRRVLKKALLKLSKNYRNKVSTMLHQVSTAIVKWCREKDYGLIYENLKGLRKTVNKKTKRFNRFSGKVQEVSRYSKRLKRRLNNWWFRRFLSQIGYKALWEGIRTIESKHTRGSSSTCPICGCRLKRYPNGLVKCEKHGLMNRHVVACVNLLRWEGVVVRPRPPLECSRESSPNELQSDEEKLGKQKRGRYYLEELPEPAIHFSGGKNSDTCA

SEQ ID NO: 36502 - protein, 472 aa, Haloquadratum sp.
MKPTWASHIYTTLTWPDIPRSDHKFYNKSIIQAFRMLEVHRTHQANIRNHSQVAESLDRHGWSASKLWNVANYHSREVWEETGDIPDHEELKAELKTHPTYKGLHSQSSQRVLEELAEGFNSWYGSEDDRDNPPGYRKENYYDDEGRRVHEEHPRSTVTWKQNGFKHDTKNNRVRLSKGANHKEHPKAWEYILVEYETRPGITVENIQQVRSVYDQHKERWELHLVCKNEIETPDAPGTETAGIDLGISNFAAVAYSTEDADLYPGNRLKQDGYYFPKEIATCDDAGGNRATNLQKKWSERRTHFFHSLAKHIVERCVENGVGRINIGDLEGVREDEDGSSKNWGKHGNLDLHGWAFDRFTSILEYKAKGEGIKIVEVDERDTSKACCVCGRTDENQRVERGLYVCESCDAAFNADVNGAENICFDLNQSNSESAPDLGGDRSTGWLAQPSVYLHDLSHGFSPREQVVDCKP

SEQ ID NO: 36503 - protein, 387 aa, Mycolicibacterium sp.
VARFEIPQGWTAQAYRFALDPTPTQLRALASHAGAARFAHNHMLALVKAVLDQRDAERSYGIDEAELTPGLGWSLPALRKVWNLRKTWCAPWWAENSKEAYNTGLDGLARGLEAWSASRRGQRAGRAVGFPRFKTSRAPRSVRFTTGVIRIEADRRHVRLPRLGAVRTHESTRKLARRVEAGSARILSATVRQDSAGRWHCALQVIVEAKTRPAHARRSAHPVVGVDVGVKTDALLVIATPDGVEVDRIAAPKSLSAAQSRLRALQRRAARQHGPYDPASKTKQMPSKRWRRTQGRIGRTHAHVAAVRRDVLHNATTALAQSHDVVVVETLNAAGMRAKGGARKRGLNRALADAALAEIRRMLGYKTRWYGSTLVAADRYFPSSKTC

SEQ ID NO: 36504 - protein, 408 aa, Eubacterium sp.
  misc_feature (298)..(400): Xaa can be any naturally occurring amino acid
MVANRAYKFRIYPNDEQKILFAKTFGCVRMVYNHWLDRKIRQYEENKTNVTYTICAKEMAAMKKTEEYGFLKEVDSIALQQALRHLDTAFQNFFKQPKTGFPRFKSKKRNKNSYSTVCINGNITLSNGYLRLPKIGQVRLKQHRIIPDEYRLKSVTVSQTPSGKYYASILFEYEDQVQEKELQKFLGLDFSMHELYRDSNGKEPAYPGYYRNAEKKLAREQRKLSRMQKGSNNRNKQRIKVAKLHEKVSNQRKDFLHKQSRQITNAYDCVCIEDLDMKAMSRSLNLGKSVSDNGWGMXXXXXXXXXXXXXXXXXXXXXXXXXXXXXXXXXXXXXXXXXXXXXXXXXXXXXXXXXXXXXXXXXXXXXXXXXXXXXXXXXXXXXXXXXXXXXXXXXXXXXXXDVTCSKNG

SEQ ID NO: 36505 - protein, 670 aa, unknown
  TnpB Polypeptide
MSKKKKKKDDDVIKEDFEKFDYMKTVKNNINNVLKDKAILPIINDLVIRTNKIVIHSCNFIKLYCIHLYENDLEFPLIDKNFICNVFKVITKRKDKRGATPEKDYSELLKNLYKFYNENYITTVYDNEIIYYDKLSYILAYEAIDIEKNINNNIQEHFIIHLNQFVNHSFNLQQQKDEIKKIKDKELRKEKYKSLSIEYKKVKNDLVSLTDELTADEKYHNWIKEHKIHIVPNKTNFDKDSIYYDLHSNTKDYLKSFIYINIQLEKLNDKLLEGISIEDIDKVKQIKLFNILPLRSNIIPKNICIDTCALISNFLGNESTSIHLKNYKKEDNQFKLWNRFLKLNNKIFKKNKYEFNYMIRTDGISIGILFIRLGNNGLPLTYNNPNNKPQENTKYIEKEIITDELRSKKIVCIDPGCSDLIYCGSKDENDKLQTFRYTQNQRRLETRTKKYNKIIEEVNNTTFINGKNIKEIESVLSHHNKRTCHYEKFKNYLIEKNKLNLLLFSHYEKTFFRKFKLNRYINTQKSESKIIKNFTKKFGEPNDVLFIMGDYDKGSNNMSGLEPTICKKFRKIFKNAGFRTYLVNEFRTSKLCNCCHHEIEPFMIRQSHKPNDIKVNKKITVNGLLSHQEDKQKCEIIHNRDKNAVQNMLNIVRSIFTIGRRPDIFTRIHT

SEQ ID NO: 36506 - protein, 205 aa, unknown
  TnpB Polypeptide
MPVPVSDNVIGLDYASDGLYKDNYGYTGSNHKFFRESQKKLRREQRRLSRMTGSKKDETKSNNYMKQQLKVNKIYRHAANQRLDHLHKLSTGIANRYDIVCVEDLDMKSISNKSFGNGKATMDNGYGLFLKMLKYKMNDRGKYFIKVDRWYPSSQICSHCGKRHPEMKNLHNRTMICDCGFEYDRDVNAAINIRNEGLRILKEAV

SEQ ID NO: 36507 - protein, 463 aa, Mycolicibacterium sp.
MPRFEIPEGWCVQAFRFTLDPTAEQAHALARHFGARRMAYNWTVAQLKADIQAWRETGVETAKPSLRALRKRWNSVKNEVCVNAETGAVWWPECSKEAYADGIDGAVDAYWNWQQSRAGTRAGKRVGFPRFKKKGRDADRVSFTTGAMRVESDRRHLTLPVIGCVRTHENTRRIERLIAKGRARVLAITVRRNGTRLDASVRVLVQRPQQPNVELPESRVGVDVGVRRLATVATADGTVLEQVPNPRPLEAALTELRHASRVRSRCAKGSRRYRERTAEISRLHRRVNDVRTHHLHCLTTRLAKTHGRIVVEGLDATGMLRQKGLSGARARRRGLSDSALGTPRRHLSYKTGWYGSALVVADRWFPSSKTCHLCGHVQDIGWDEKWICDPTDGGCGVTHHRDDCAAINLARYEEPVSVVGPVGAAVKRGADRKTRPGRAGGDEARKGAGHPAGEQPRDGVRVA

SEQ ID NO: 36508 - protein, 437 aa, Streptomyces sp.
LERSGRRGAGSRHAPADGRVGRDRGGRRPDRGGGHRQACGSLGIQRVLGHGGRHRERGAQAARRRGHRNDQPVGRCGSSHGGGNRQLQHARGLTSCASTRSCAVGNPPGRKRSTGPTRRSAHSSNRPWPPSSPGGSCASCGAPPPASLPLSKPSSPCIWPAQTEDEKASLAKMTEPLAVVWSRPLPGGAKPSTVTVSQDSAGRWFVSLLCDDPGVKPLPVTGQAVGVDVGLDRLLTLSTGEKITNPRHERRDRAALAKAQRNLARKARGEGANRRKARLKAAKIHARIADRRRDGLHKITTRLVRENQTIVIEDLTVRNMVKNHRLARAISDAAWSEFRSMLEYKAAWYGREVIAVDRWFPSSKLCSACGTLQEAMRLNVRTWTCDCGTTHDRDVNAAHNLLAAGLAVTVCGAGVRPQRSTPDRQSATKQKPSRREP

SEQ ID NO: 36509 - protein, 313 aa, unknown
  TnpB Polypeptide
LRHLQKAYSNFFNQTGDYPTYKRKSHGGSAEYTRSAFKWDGRNLTLAKMSEPLDIRWSRTLPRKAQPSTITVSLDPAGRWHVSILVEDTIARLRKKSAAVGIDLGTDSFAILSTGAEIDMKRLAKAQRALARKQKGSRNYEKARLKVARIQAHTKDRRTDFLHKLSTRLIRENQTIVLEDLAVRNMSRRCKPKPDPEHPGQYLPNRQAAKRGLNRSITDTGWREFRRMLEYKSEWYGRTLTILDRWYPSSQTCSTCGENTGRKPLDIRQWDCPYCGTHHDRDINAAKNILAAGLAVTVCGHGRSRRDDAGSDR

SEQ ID NO: 36510 - protein, 389 aa, unknown
  TnpB Polypeptide
MIRVCKVKLGRAPKQEEKLRRVLGLCCTLYNAALQQRREAWGRQRVSLSYYDQCKELTQLRADEEEYRQLPAQMTRETSLRRLDKAFKGFFSRIKRGVKPGFPRFRSRDRFDTLAFMTQDWRIDGKKLALKIGKDPVVLRMRNAIHREGEIKGLRIVKSADRWWAHFLVDVGPAPAVKESRNGVGIDVGLRTFATLSDGMQIAHPHFLAKSMAQVQAASQVVSRKRKGSNNRAKAKSTLARVHEKIANRRRNFVHQTVAGLVKTYDGFAIEKLDVQQLASTDRKDGTRSLRRGIMDSGWTLFGTHLASKAEEAAMPLVRVNPRGTSQRCSGCGSTVRKTLRDRTHYCAACGLVMDRDENAGRNIKQLASDLGCRSATGGNAEGAEVSLE

SEQ ID NO: 36511 - protein, 547 aa, Thermodesulforhabdus sp.
MITLQCRLEFESKEDREKVLYLMRKFSSAVRYSYRRLLEGKEGKEIKKEVAELFGINTRYAGDAVFRAKSVISSCKERGQDPGKVIFGGRKLFQRLRSVHVSGKKREEYRRKWQEKRKGKLYSRGDKSKKGNLNLRFERTGNNTCLRVTVGKREYVHARVVRSVRLKRENDRWTDFVWRLAQAEATGSWFPYSVELKLKDGKVYAFASYEEVLPPVSIARDCGAIGIDLNASPLHIAWAEVGGDGNLMEYGRIDLHELIGKNRNQRENLLWEIAHRIVEIAKEKGKAIAFEDLRKLPGGTRGDGKARLRRRLGQFVYKSLLQKIEVLAGREGIEVVKASPAYTSVIGTLKYCPNHLIDKDIAGAYVVGRRALGLKERVPRNYAGLLSDREYLLCSLQRLIEEREDLKGRLKDERNEYKRRAIRGEIIKLNRDIKLLEEHLQSLEGESGTQHPVNQRKEQVRGSSHEGQKAWRVLRVALAIPLLGKSFARDFSPLRPVLVSGDWKRVAKRPVPAPGAGTTAHLQKCAVQVTRVEHGNGSARRRVSAYR

SEQ ID NO: 36512 - protein, 182 aa, unknown
  TnpB Polypeptide
MESPARNTLAERNPLAALAIDAQKLGANSFKKHQQRLKRYQRRLARKVKFSQKWKKAKAKVTQIHIKIGNARKDYLHQASAAISQNHAIVCIEDLQIRNRSKSSKGNAETHGKQVKQKSGLNRAILDQGWGEFRRQLDDKLAWRGGQVSAEHRCTQAQFACIACGYKNHADVVGAINLVEPV

SEQ ID NO: 36513 - protein, 224 aa, unknown
  TnpB Polypeptide
VALTFRREVELIQPKRLLVLDVNVLHNGVVLAAVESDRVLRRGVLRSDVDRIIHLQREAARLDSLCAERDDDAICSRAAAVRSRLWRLLRQWGDEAAKKIVQLAMQYKAAIVADVPDDKSIRQLKEGRYSAKKKALLNFGRLRRRIRELAERYGIAYREERLYFTICPNCSLKMEEKPNRRVKCQCGFKAHRDEVPAIWAMKRFKEPTPSFCALSAVLAPAESI

SEQ ID NO: 36514 - protein, 422 aa, Halococcus sp.
MANRTAKRTYRARIQNHSQVRDDLDSLGFAASKLWNVGRWTAQRVWDACGQIPSGFDLQAYLKGSERYVDLHSQSSQRVLAELDEAFTGWFGHRDNGNQKANPPGYRKHNDEHPRSTVTFKQAGFKHDEKNQRIRLSKGRNLKEHRSDFVLCEYDVIGPEGTTVKNVQQVRAVHEHGVWRLHIVCRVEVEVAESPGDRTAGVDLGICNVAAVSFGDESLLYPGGSLKEDDYYFAKKRAECDDSFSREARRLDQKRTDRRTHFFHTLSKEIVEQCAERGVGTVYVGDLGGIRDDENGNPKNWGKHGNLDLHGWAFDRFTTMLEYKAEMQGIAVETVSERDTSKTCSVCGTKADSQRVERGLYDCDECGTVANADTNGAENIRRKSTSESIEDRSNGWLAQPAVRLFDKTRGVFLPPERTTREP

SEQ ID NO: 36515 - protein, 438 aa, Halococcus sp.
MKRTNTFDVAPMSDKDAELLHRVLDASASLWNELNYERRQNFTDPDIDKPVWETEDYRKRYKGVLGSATAQQMIRKNDAAWRSFFALKEKGEANGLPGYWGNEDDGRELRTYVRNDQYTLETGEYSRLEIPVGSDLKDEYDHTGRLRLEVRGGPKWSGKQGRLELYYDDMSDRFKAIQPVSEISRQDSPLADETAALDIGANNIVACTTSTGQQYLYEGRDLFDRFRDTTQEIARLQSLLEDGRYSSHRIRRLYRRRTRRRDHAMDALARDLIERLHADGVATVYVGALTDVLETHWSVEANAKTHNFWAFRAFIERISHTAEEYGVTVVERSEAWTSQECPQCGSTERTTRHKDTLTCECGFEGHADLVASETFLKRQTTVSRPMARPVCLKWDNHDWLETSYSHRPNEEHTNPQVASVGEGANARRRPPARGIPRL

SEQ ID NO: 36516 - protein, 424 aa, Halococcus sp.
MAKSTVTRTYRARVRNHSQVRDDLDSLGFAASKLWNVARYTVGRVWDACGQIPSTFDLQKYLKGHERYADLHSQSSQRVLAELGEAFTAWYGHRGNGNTKANPPGYRKNGDEHPRSTVTFKQKGFKHDAENDRIRLSKGSNLKDGWGDFILCEYDVIGPRGTTVENVQQVRAVYEHSVWRLHIVCKVPVEVAEPPGDRTAGVDLGICNVAAVSFGDESLLYPGGSLKEDDYYFAKERAKCDDSFSREARRLDQKRTDRRTHFFHTLSKEIVERCAERGVGTVFVGDLGGVREDENGEPVDWGKHGNLDLHGWAFDRFTTMLTYKAEMQGIAVETVSERDTSKTCSVCGTKADSQRVERGLYVCDECGLIANADTNGAENIRQKSTSESINAVDRSNGWLAQPVVRLFDKTRGGFLPREQATREP

SEQ ID NO: 36517 - protein, 280 aa, Halococcus sp.
  misc_feature (26)..(26): Xaa can be any naturally occurring amino acid
VGDRGLPQAVYRCSRFCIGSTSHPQXDYRKRYIGVLGSASAQQAIRKNDQAWNGFFDSDEPDKGLPGYWGNKDEGRDLFDRFRETTHDIAEYQSKLREGRYSSDRIRRLYRRRTRRRDHAQDALARDLMERLHAEGVSTVYVGALKGVLGKHWSVEVNAKTHNFWAFRAFIDRLAYTAAEFGITVEVKPEANTTRECPECGEREDTVRSGDSFWCPCGYEGHADLDASAKFLAQETSGEVGSMARPARLKWDDHRWSELSRSRPNKVRAHQQKTSVGSTA

SEQ ID NO: 36518 - protein, 659 aa, unknown
  TnpB Polypeptide
MELEEKPPDPPEKEQVYRIIKCPLKCVMKRYDTLQPIIEKAVGDINEIVVLSYQFIRLYLLDKFNNKKELPTINKQFVLDVIKTVSSPNSKRGQKTKEENIKNASGKIDMKRFYREEFSQLVSNQPCYSNKTHILAITANEMITCIHTNISTHFVKHLFKYINLLFKDPKSIEIKTEKDKQKRKELYKELNQDIRDLKSDLINNKIEVSKPEYHTWIKENKGFLFPTKVNKSVAYDVKANPEKYIKYSFYINQKIEELGKRPDQVIPQRNNIVPKHITLNSNGIIDLIDDKKREMFEYNKSELVLHAKKHQKHIWSKILKLEKKDIFKQKEYVFYNQIITDGFSCSLLFILKKYKDKEYGDKLPTVNNETDFTKLEDLSKEVCDEFLTDKYKLVSLDPGKIRPITMIDENNKFFKYTACRRRFETYTKQSASIINKEKINHNIKQKEAVLSVYKSRTLNQEEYKNFIINKTKINNEIKDFYQRPLFRKLAFRRYVRTKQSEVKLLNEIENTYLTKEEKENGKKIVILHGDYSRATQMKGTIPTPNIGMKKLLLSRFEIIDVNEFNTSKLYNKTLKEMENVKVKRRKHMKQLHEILTPKEETNCRIFVNRDVNACKNILLLGKCYLMNQTRPEEFKRQVVKKEVIKKPRKTKQQIVVPSG

SEQ ID NO: 36519 - protein, 505 aa, unknown
  TnpB Polypeptide
MKSETPSYVLELPLKTTSVQETIILTRLEAGRQLYNACLGEALKRLDLIRQSREFQKVIVLPEGVERTDKFKNLNKENGFTEYALHDYVAKIRDSWIEEHINSHIAQKIATRAFKAVQKKAFRKAKNVRFKGKNQFDTLEGKNNCTGLIFRDNTLFWSGLEIPCIIDENNKVIAYGLKPEHRIKYCRVVRRKINSKNRFYIQLILEGKPYQDPEKKIGTEEIGLDVGPSTIAIVGDTKAELKQFCSELMPKQIEKRKLQRKLDRQRRANNPQNYNENGTVKKGKKKWKKSNHYKKISSEIAEIDRKLAAHRKSLHGRDQNDIIAIGTTIKAENIPYRSFQKMWGKSVSIRAPSMFMSGLKRKAENAGGSFNNFPTNTTKLSQVCHICGNTVKKPLSQRWHVCCGIKMQRDLYSAFLSKCVDVSTGALDIARARLLWPGLEPVLSEAMSRAYQSANGRKTVPASFGLYGNQRQSGSSVKSEATITEAVDDVIRDRINEDESHREVI

SEQ ID NO: 36520 - protein, 406 aa, unknown
  TnpB Polypeptide
MLVRGVAFYLESGLPCEAKLLLEDFRLAVNNAIRAGLQARVTSRNALAKLAYKDFRKEHPMMYSLHLLSAFGVAGSVLKNHRRRTRSVKMARVPFVKRLMMRVENQAYKLDRKSSIIDLAVRAGCHVHLKLVVSEYHRRYLDDTSLGLGSLTVLPDRVIVAFRKEEPRTYAPESVLSLDTNERSLDGVIVGPEVCVSVRADFPDVAIIQQLHHDRRKQLQKKKAHDERMSRMLCKREGRREHRRIDHRLHQVANAVVSIAETRRSAIVLEDLTGIRYKRSKDLNRRLSMWPRRKLHQIIEYKAQWRGIPVVKVDPRYSSRTCPICGRIQDSRMGTEFECECGWHLDRHINASLNLLQTAISNGLEVAGGLRFNPGAFQHDVMMTLYEPAMAARSEPNGTSGTCGVT

SEQ ID NO: 36521 - protein, 542 aa, unknown
  TnpB Polypeptide
VPFVAAAPEGARVRARLRLSTVDEAVLRAVGAHLGSLAGRDLAARCAEGRLDPPGQARSRAVRKRALTSESSSRWAGAITRTSEDQVRLAGQNLCTERTSLQARIRRIEARLAVPADGKVGRNRGYATPAERHAKAVRLQSLKARLAVVERQLETGAVSVVRGGKALLRKRGSLARAGLTEAQWREQWESARLFLTADGEAAKAWGNETIRWHPDAGWLEIKLPAPLAYLANRPHGRYRLSAPVGFSYRGDEVAAQAVGGAVRYDISHDPGRGRWYIDASWKAAPAPAPSLDDLRASPVMAADVNHGHLAAAVIAPDGNVLGAPATVGLDLAGLPSATRDGHLRAAISTLVATAKARGARAIVIEDLDFTEARAEGRERAGSRPSRGRRGRDFRRAVSGIPTGKLRGRLVQMAANAGLSVIVIDPACTSRWGAEHWLRPLREHHPKATGHHAAALVIGRRGLGHRARRRATGNQTAPEEAARLAQARPRTTRREGPHPGNPPPHEVPGRHPAPRPDGLTGSRQATRQPKTVRGRRLDRTTSY

SEQ ID NO: 36522 - protein, 187 aa, Symploca sp.
ITNTGVSTTSTGEPFYRTGQKRLKFRQRRVSRKKKGSVNRKKAINRLGRVHLKISRQREEHAKKVARCVIQSNDLVAYVRAACRRQDLRIKNLVKNHCLAKSINDVGWYQFRKWLEYFGIKFSKITIAVNPAYTSQNCSNCGAVVKKSLSMRTHACQCGFVLDRDWNAALNILKLALSTVGHTGTWV

SEQ ID NO: 36523 - protein, 429 aa, Moorea sp.
MAKTNKKIGVQQILLHPDKETEAILTYLCQQSGKLYNMGVYFARQTFFKTGKILTGKFELVYEKSIGKSIIAKSLPSTPAQQTLLSVAEAFKSYKGLRELWFKGQLNDRPSPPKYLKGSKLFKVAYPNSGGQKPKMKEGKLIFSLGLTVKRWFGVKNFSLSFPSNLEGRKIKEWTILPKNGAFYLEVSYEIPDQVAVQQDGNEALSIDLGTSSNLAACVDTLGNSFLIDSRAIKSYNQYWNKQVATRKEGKPQGYWDKWLDRVTRKRNHRITDGINKSARLIINHCLKNGIKTIVLGWNEGFKKNSNMGRLNNQEFVQIPLGKLKDRLSQLCDLYDIRLEITEEAYTSKASYLDGDSLPRFGEKPDGWKASGRRVKRGLYRSADRSIINADLNGSANILRKVARKLELDLSRLGRRCLTTATRIRLWIG

SEQ ID NO: 36524 - protein, 449 aa, unknown
  TnpB Polypeptide
MAQRGFSMSITNRLSSRQATTFAQWIGSANVLRNGKVREYLGLLSNDRGKEIAQGYAAIKKDPDLVFLKDIPVQILRNAASAVYSDAEAARKGLRKFPKVKGRNKKRSCIITKELFDLHAVGKDQTQITIYDSSTKKRTKLFSITVPHAKESLSKQFVISRQGRSFSFSGSFDDGRAYRDNEAILDDMAHLDEDELLTYITGLDGGVARPVQASNGTIFDYTSEEKRKLNKHNERIKRLQTALANKKRRNNNKSKCCETNNQRRLANQIATLHGKIRRIRLNFAHRVSRQIVEMEGEIISVEDLKLKAMTKKAKKKTDGRKNLKNGAKAKSGLNRSMNNVALGQIYTLTEYKANEKGKALIRVNPAHTSKECHACGSRNTERPTQADFSCKDCGLKINADENAAFNIAKRGARDIRSGAFATKAKPRKTIARRRKKQVEIISPLVEELS

SEQ ID NO: 36525 - protein, 377 aa, unknown
  TnpB Polypeptide
MKLTLQIKLLPTDKQAIMLKNTFSVFNEACNAISQIAWERHVFQQFSLHKEVYYQTKETYHLSSQLVVRAISKVADTYKLDRKKKRHFREFGAITYDSRVLSYKTTKTVCSMSLVGSREKIAYTCYRPQLMQYAKGEADLVLIRGKFYLHQTIDIPDEKEEIADEFIGVDMGLTDIVSLSDGTNISSKEVKIIRNKYNKVRASVQSKGTRNCHKLLKRLKGRERRFATITNHRISKQIVAKAKKEHKGIAIEDLKNIRWGMNTKKRNKTFRRRSNSWSFYQLRSFLEYKCKITGIKIVAVPPAYTSQTCNECGHIGIRNGKHFRCTHCGNVLDADVNAAKNIATWGYVNTHERWELLSCYINDNNFTSKVRKSLVCG

SEQ ID NO: 36526 - protein, 402 aa, unknown
  TnpB Polypeptide
MRKINRTYRFKLLPNKGQIELLTKHFGCTRYVYNTFLNERKEQYRLTGKSDNYYEQAKRLTEMKKQEETAWLNEVNSQSLQFALRSLDTAYKNFFKKRAKFPKFKSKHSKDSFTVPQFASIAENRIFIPKFKEGIKCRIHREIKGKIGKVTISKTPSDKYFVSVFMEEEYITPIEKSGKSVGVDLGLKDLLITSEGETFKNNRYTKKYERRLAKAQQHLSRKKKGSRGFENQKLKVARLYEKISNSRADYLHKCSISLVRRYDTICIEDLNVKGMTKNHRLAKSITDASWGKFVSMLTYKAEWNDKKVVKVDRYFPSSQTCNVCGYVNKDIKDLSVREWECPVCHTHHDRDVNAAINILRIGLNNNISAGTVDYTGGEEVRVNLSKDHSSVKPEAHNFLKKV

SEQ ID NO: 36527 - protein, 449 aa, unknown
  TnpB Polypeptide
MTVQEDHKTFYDDLCKSISSHLLSHKDIECAMSECDNTSCAMNVKPWFSTKQVTSKNNNPQNTYLQLFIHLHKECIDPGTIVTKARRIRIYPSQQQKQLFKQWFGVERKVYNTCIKHFNGKEIEIKGWMKMSTTILAEFTESYIKSVPYQIKKIAVKDAYTSWWTNCNKTKKSGKPFKLHYKTRKNPVQSCYIPKSAVSTSGIYRTISGKLKFSEREFFKNDICDCRLIYDHGRWYLSVPQKITTMPTESQGGIVALDPGVRNFLTYFSEDGRFGWLGVHAFDRILTLNLKRDHLLSRLALTKDKKKKGKLKRTLNRTYHRIQDLVDELHWQCINYLVHNFSVVVFPPFEVKGMTKKGRKLRKSIVRSMLSLRFFEFKERLKQKCKECGVAYVEQNESYTSKTNSFTGELMTNLGGKEWFMYDGIKVHRDLNGARNILIRAMRDSSAAG

SEQ ID NO: 36528 - protein, 424 aa, Lactobacillus sp.
VYLPNKSAIIIREESEVNLMEMQVAVKVKLNLVNADIASSFTNTMEQYRLACNYVSGYIFNHDFDMKQSRLNKVLYTNLRSLFMLKSQMAQSVIRTVIARYKTVKTQMKRKPYKYQDINTGEWYREIRDLTWLQKPIIFNRPQVDLQRNRDWSYLSSGQLSINTLDGRVKVTPVCHGFDQYFDGTWKFGLAKLLKTSGKWYLHISATKTVADFDNQTVKHVVGIDRGLRFLATTYDEQGKTVFFDGKAVMRKRAKYQKLRAKLQAKGTKSAKRRLKKLSGRENRWMTDVNHRLSKTLVQKFGSNTLFVLEDLTGVSFERTDLPKALRNQNKSWAFYQLAQFLTYKAHLNNSEVIEVSAQYTSQRCPKCGTIKKSNRNHDLHEYHCTNCDYRSNDDRLGAMNIQLLGMQYISGQEQPKFELTTNA

SEQ ID NO: 36529 - protein, 950 aa, Caviibacterium sp.
MNITPYHARYFANELICRRTDDNRLSQSLFDAKVDLNPHQIDAALFALKNPLQEGVLLADEVGLGKTIEAGLVLCQMWAERKRKLLIVCPAILRKQWANELYEKFDLPTLVVDKTVVNQAMKGVSGAKLLNFCKNQIRRKVLIVSHQYATKEMNTFKQFDWDFVVIDEAHKMRNAYKADNKMGQAMRKAFGGKRKLLLTATPLQNSLMELYGLSTLLDEHIFGDRKFFQREFVRRGNLPELKSRMATFVKRTLRKNVLEYIRYTERKTFTQEFTPTDSEHLLYQQISEFLRKESSYALPKTHKHLTALILRKLLASSSLAVLGTLRAIHSRLLALQQAQELPEFELFDGEDLTDEDIEIDELEQEEGEESVAEELNKTALAKEIAEIESFIALAESLTVDSKVIALLTALQTGFENMAALNAPQKVIIFTESVRTQQYLFQFLQENGYQNNVVMFSGSNNDPQAVEIYQSWLAKNAGSPKVTGSVDVDKRTALIEHFRDNAQIMIATEAASEGVNLQFCSLLINYDLPWNPQRVEQRIGRCHRYGQKFDVVVINFLNKRNKADQRELELLTEKFKLFQGVLGASDEVLGEIESGVDIENWIAKIYATCRTEEEIQQAFDELQAKFADQISDRLQETKNALVDSFDQSVLERLKVMTQNRLNEMEYWFWSLSRFALDNKAQFNQTDWYFLLQDCPQVGIPLGRYLLPRKERNPQIQGYEYRLNHQLGEWCIEQGLQAFTPDCRLEFDYTNYSEKISLLEHYQGKSGWLRLDKINVQSNAENQERLVFTVCDEQGNALDAEFAQKLFLLSANVQNSTPKAPLAFKQLNQSELEKAKSQIQQENSALLMEKSRQINAWAKDQMQAAEDNIKEIKDELREKEKEAALADNIKQQIELQEEIAKLRKALRKARNELDDVQDEIADQEMALLRELKAKVNQTMTEEKVFEIAWHII

SEQ ID NO: 36530 - protein, 386 aa, Clostridium sp.
VITATKIKLKPTKEQEVLFWKSAGVARWAYNYFLSESERYYRKYSKTIKESDVRKHINNVLKKTSHIWLKEVGSNVMKQGVKDGNLARDRWFKGISDKPKFKSRRKSKPSFYVNYESFKKVKGGFRGEKIGFIRTYEALPKLKKGEKYSNPRISFDGKSWFLSIGYNVEVNPIELTDKSLGIDVGIYSLAVCSDGAFKKNINKSKRVKQLKCILKREKRKLSRKIEDNISHYEKNRKPIYKTPLKDMKNIQKQNKVIRNLYKKLTDIRVNHLHQCTSEIVKTKPSKIVMETLNIKGMMKNKHLSKVISEQCLYEFKRQIQYKCKKYGIEFVEADKWFPSSKKCSCCGTIKKDLKLKDRIYKCSCGFKSDRDLNAAINLANYSIQSA

SEQ ID NO: 36531 - protein, 285 aa, unknown
  TnpB Polypeptide
LKLSTLDKGSPVHIPLKNNPYYKELLKTGERIPFVQVCLNNKKLTVSPILAHNKAPLRTNTKELGLDFGLVTMFTTSTGERHGIKTFAKLKIWDELLLARTKELQKEGKKLSSDSYYKALQSKIKLFFKNEIGRILNKLANKGYAVFVVEKLDFRYSNLSKKMNRLLTRTYRKVIKDKLVRLEEKYGIKTIEVNAAYTSQECSNCGFVSKNNRKTQSEFVCKCCNYKINADVNAARNIVKRRSFDIELRKYANEHKVRISKCLILKKLLQKHNCICSNPSASCHL

SEQ ID NO: 36532 - protein, 371 aa, unknown
  TnpB Polypeptide
VILTHRYRLLPLKCQHRALERLCASQRELYNAALEERIDCYRKTGTYIDQCKALTECRHELPEMGEHPANLQRWTLKRLDDAFQGFFRRLKARKGKAGFPRFRGKGRWEAFGFNEFSGIRFDGKRLRFTGMPGGLKVHLHRQLPERADIRSCVFRHDGSGWFVCLQIAVPAPEKRAIASAIAVDLGLTLFAYCSDNVVIPNPRIARRAAKELRRRQRALFRCQKGSHRRHKVRVQVARLHRKISNTRNSWLHRESAELVKRADLIVVEDLKVANLIRNSTLARSIADASWSRFVSMLSYKVEKTGGHLIRVDPRNTSQECSRCHELVPKSLAVRTHQCPSCGLTIHRDYNGSLNILRAGIGAGALNVIGLR

SEQ ID NO: 36533 - protein, 396 aa, unknown
  TnpB Polypeptide
MSRYRLLPTPAQEAILRGHCSHARYVWNLAVEQHQHWRPGRAAAPGYLEQCRQLTQARAEHAWLEAGSQMVQQQALRDFGAAMAAFFDPGNPAGRPTWRKAARNEGFRIVAVRPGHVRRLSRKTGEVWVPKAGWVRFRWSRPVPPAARSYRITMDRAGRWHVAFAVIPDPVSAPGNGEIVGIDRGVAVSAALSTGELLCVPGVTAPERARMRRLERKLARGRRGSNRRGRVRLAIARMRARETDRRKDWAEKASTDLARRFDLIRVEDLKIMNMTRSARGTLQEPGRNVGQKAGLTRGILRSGWGLLVRRLEQKAPGRVEKISPAFTSQRCSACGRVDPKSRESQAVFRCTACGYACHADVNAARNIAAGHAVTARGGDGVARPVNREPQLLLQSA

SEQ ID NO: 36534 - protein, 541 aa, Polynucleobacter sp.
MTESSVFTYQTRLDLSPEQLLALDALCDLHSRLERKLYAMQKAENLTRNELKRYFIEHFGISARMFNSIAISIDGKKQSIKELLTRYISETKVRIGKMRIKITNLKKRKSLSQKQLFSLHQYQRKLAILMSKLSDFEKQKEIKSYAICFGTRKLFHAQYHLEANGYQNHEEWQADWRASRANQCFFVGSKDESAGNMLCQLKQVDGHFSLQLRLPDSLNLGKYLHITALDFAYGKDNILAAINSCVRVERADGDMRKGKQRIGNALTYRFVRDQAGYRLFVSTNVIAPKRISNRNCGAIGVDLNSDHLAVSQIDHRGNWISSSQLPLHLHHKTSRQAGAIIGDQVKVLVELAKNTCRPIVMEQLDFSKKKAALSKSNPDYARMLSSLAYNKIIQTIKAACFRAGIEVIEVNPAFTSTIGAVNYAQAHGLSIHQAAAIAIARRGLGFSENPTKRVVFVPTRNGSHVTFPLPARNHRKHVWSHWSDIRKSLIAAQKAHTQSGNLPAPLSSMKNLSSANCVSGMQMPRVSQGLLLPDVDQIIPF

SEQ ID NO: 36535 - protein, 471 aa, unknown
  TnpB Polypeptide
MCYAASKLWNVCNYERHHYKELGLEKYPDWYYQKKAHKENLWYKQLPSQTAQETCKQLDKAWKSFYVLKKTGGIKAPNPPRFKQDNIPVTYMQMGIRHEKGSDQLRLSLPKDLKSYMEETYGIHEKFLYLENKIFRDMDHIKQLRIYPPENGTCDLIVIYEIEEPEQLSQNGHYLSVDLGLHNLMTCYDSGNGRTFILGRKYLSLERYFHKEIARVQSVWYAQQSERGIKYPRSSKHIQHPNSIALEEVERIFIGMGYEVVEGPEVEYADYNFTKLNIPENHPARDEQDTFFINDSILLRSQTSPVQARAMEKGKLPIRMIAPGRVFRSDEVDATHSPSFHQIEGLVIDKNITFADLKGTLEVFAKELFGPETKTKFRPHHFPFTEPSAEVDVSCFKCGGKGCRFCKGSGWIEILGCGTVHPNVLRMCGIDPEEYTGFAFGVGLERIALLKYEIDDMRLLYENDIRFLKQF

SEQ ID NO: 36536 - protein, 465 aa, unknown
  TnpB Polypeptide
LLSLRTRGTFSTSAAFIITFVSIKRPARVPRPSENLRFSAFANLRFASTPWSGVKRVKTSQLTPFKPYRNVVQSLQLTHTLSFGLDIQTGSGDDLQTGCLEARRIRNEVNRLDKEGWEWDDIKSPVVDNANHVKNTSQLIVEKALGEIETYHDHRDDDWGRPYPYIDGLYPMVMNHGEGYRVFVEDEDTVRFRISSEPYNHVKGELRGSPDHFDRLRTAFTDDEWRVGTAEVVHKHDEWRLHVTVTHEHHRVANKTDADTVVGVDVNEDCIAVAAMGRDGAIQDSVVFEYPSVKEQRHEFFTKRKRMQKAKQTSCEAVVQTEERDYVHDCLHKVSRQVIEWVSQFSAPVVVFEDLKDMRDSLDYGTRMNRRLHSLPFAALQDMVSYKAAWDGIPCAEVDPEYTSQRCPRTECQHTERANRHSSDVWNADSKTTLTGRQQCALCRSGLTNSMKMCRLSKPFPELRR

SEQ ID NO: 36537 - protein, 202 aa, Okeania sp.
NWGLSLWNAAYIDGDKPNVSFGMLRKRKLREVFTNHTKPLYPWMKNLSSKVYQYAFINLGEAFKRFFQGLGKYPRFKKKGKHDSFPSECYANTIDNCGKPIELNGWNHKLPFIGVVRTYEPIELSTQKITISRQAGSWYLSCSYEFTKAPTPKTTEVVGVDLGVKTLATLSDGKVFESVKPLQRFEAKLSRLQYINRNKIIG

SEQ ID NO: 36538 - protein, 384 aa, Bacterium sp.
MLLSHKIALAPTAEQEAYFRRACGTARFVYNWGLDRWKKWYEGWKELSEDQKKTTSKPSKEALGKILRRAVMFNPGWFWLREVDSHIPTGALRNLGAAFANTFRRLKQGQKPGFPNFKKKGIHDSFYVHNRCMEFNGKRLLLRRGKITGPTTIKMREVLRFEGKIQGGAISREADRWFIAVQVEVKDYAKPRTADKKVGIDLGVLRAVTTSEQGIVYDSPKPLKTMLYRLKRKSRQLTKKKKGSANRERARNQLARLHRDIRNIRQDFLHKTTTQLCSENQAIMIEDLNVKGMLANRRVARAIGDIGMFEFRRQLDYKTKIYGSELVVADRWFASSRTCSKCGSKKDELKLSERVFRCSSCGLEIDRDLNAAINLLNYPEAQGK

SEQ ID NO: 36539 - protein, 377 aa, unknown
  TnpB Polypeptide
MRAYRFRLYPSKNQEKELLHHLWLEKNLWNTMLEKTKKKYDEEKKFYSKSELQLMVKDSGLYSQTAQAVAHRLHRALESKVRAKKKGVKWGFPRFKPLERMKSIYYPQSGFSLGEKLKVSPFGEIPIVRHREIKGEIRTLTLKRESSDKWFAIFTVGQEPQVQKLNNGPCVGLDLGLNRLATLSDGNIIENPHQFRKFEEKLAQAQRNFSKKRKGSHNRRKTRRKVALVHEAIANARNDYLHKKANWLLSNYSKIVMEDLRIHEMAEEGHGKSIHDASWGRFTNILQYKAASAGSEIVFVDPKNTTKECSGCRSNVQKSLWERLHSCHSCGLVLDRDINAAINILTRATAGMAGSNACGDGINIPSLKQEAASFRVQ

SEQ ID NO: 36540 - protein, 107 aa, unknown
  TnpB Polypeptide
MLCGEYAVICMEDLNLKGMQKLYGRKISDLGFAEFLQKLEYVAYKAGTTIIKIDRFFPSSQLCSCCGQQNHQLKDLRIRKWQCSCGAVHQRDRNAAINILNEGLKYL

SEQ ID NO: 36541 - protein, 259 aa, unknown
  TnpB Polypeptide
LVNGNILVESKRIRLPKLKWIAMKKHREPAEDFRLKSVTVSMEPSGKYFASLLYEGYSCENQVAESDYSTAKILGIDYAMQGMAVFSEKIETEEAGFFRKNEKRLAREQRKLSRCVRGSHNYELQKKKVARCHEKIRNQRRDYLHKLSRKIVDSYDAVAVEDIDMKAMGQCLHFGKSVQDNGYGMFREMLDYKLAWKGKKMVKVDRFFPSSKKCCKCGRIKKELKLSERVYRCACGNEMDRDRNAAINIREEARRMLTA

SEQ ID NO: 36542 - protein, 419 aa, unknown
  TnpB Polypeptide
MRRSTRTQDDETWRVAVIPVRLSGADHRKAHEACHKAALLWNFLLAEMRAYWDEHGSDPSDKELRHRLYEKRPDLRDGLHAHTIQGVLDGMNDAVATYRENRRQGNMDVHAPHRAKNYRPLDFTSGYGWRPTNDGERVALSFGRNHRRILVRMPNISDPKTNAPVPVERWGAMRLCWDRNKRQWSLHVSVPTSRPPQGNPNNIAAIDEGVINPMAVAVETDDAYEILVVNGRHARAVKHYRNTRIASLQERLARCVKESKRWCKLDAKRRRIEAEAADALRNADHQTTRKVADFLQEHDAGRIVAGDVRGIEQNTRKNETRRVRNRKDQRRRLSQWSRGRQESLLSHKTGMPVEHIDESWSSKTCPACQTRNHPNGRGYHCRNCGFTCNRDAVGAINILIRAKNGSYQPMDTNKKVHVK

SEQ ID NO: 36543 - protein, 434 aa, unknown
  TnpB Polypeptide
MFEAVKVALDPTPTQERLFLSHAGAARFAFNAGLAHVKEALEAGAKPEWSYYALVRWWNANKDVLAVNADGTPWWAENSKEAANTGLRSLASALTNWSKSRRGARKGRKVGFPKFKAKDRATPRFAYTTDFRLIEGDPKALRLPKIGRVHCMEDVAERVGGARVLRVTVSRRAGRWYAALTVERDDKPVTKPPRGGAVGVDLGVKTLATLSDGTVIANPRCLAASERRLKRAQKAVSRKTMGSNRRAKARVKVARLHAHVANQRLDAIHKATTWLAETYSDISIEDLNVVGMVKNHRLAKAVSDASFGEFRRQLEYKTARTSATLHVINRWYPSSKTCSACGAVKAKLPLVERVYRCDGCGLTMDRDLNAAINIKVAGSAPETVNAHGGTVRRSNQHGCATRVPVKCEPSRRGGNRAVRLGAGARKDTLQTTVK

SEQ ID NO: 36544 - protein, 376 aa, Clostridiales sp.
MNRCYKYRLYPTPEQEEYFQKCFGCTRFVYNALLERQNEVYQNGGSFLTRFDANNYCNHVLKDQYPFLREVDKFALTNSIWDLDFAFRNFFRFNTNYPRFKSRDRCKKTFTTNYCNNNIELSSNAIKLPKVKWVKAKIHRLAPDSWILKQATISQDSVGDYHCSLLYDCGEIPLQEGLKRDLALGLDYKSDGLFVSSEGEVCGSPQFFKQSEEVLAKEQKKLARMQKGSSNYEKQKKKVAKRMRHIANQRRDFSHKKANELAEAWDYIFAEDLDLKEMASRAGKKTMDNGYREFLEILQYKMEDKGKVFAKVDMYYPSSQLCSSCGYKNPQVRNLNLRRWTCPNCGTTHDRDINAAINIRDEGLRLIDEQQLQSAG

SEQ ID NO: 36545 - protein, 381 aa, Lachnospiraceae sp.
MANKAVRYRLYPTTEQRIMFARTFGCCRKVYNLMLSDKIESYKSTGKFAVVTPAKYKANYPYLKEVDSLALANAQLNLQSAFRNRFSKSRKKKNGFPKFKSAKHSRKSYTTNNQKGTVALTDNCIKLPKIGSVKAVIHRKPDDNWLVKSATVSQESDGKYYASVLFEFENPANNYIADKTNAIGLDYASDGLYVDNNGNTGTNHKYYRESHDKLARAQRRLSRMQGSKKHSVKSNNYIKQLRKVNKIHRHIANQRLDNLHKISTEIANQYDVVCVESLNMRSMANHGFGNGKATLDNGYGMFLNMLEYKLTDRKKYLIKVDKWFPSSQICHCCGTLHPEMKDLTIRTMKCDCGLTIGRDQNAAINILREGLRMLDTSFEVA

SEQ ID NO: 36546 - protein, 343 aa, unknown
  TnpB Polypeptide
MLPQRANDGIWERRHTRPKARQASGRDRRAELAWIHTHQPDAVDEVWQLCDTGRAKIQALTIKLEGGRWKAVFRLRLPDGTTRLRNPGESVRHYGGAIGVDLGLKHLVTLDRPVPGLTDEDGHVPDPQVLEEHLARLRRLDRAIARCEKGSKNRAKLIRRRQKLLGKIAATRKLFLHELSRRLAGGFDLVCVEDLHVAGMARRKGLRNGRSVAEASMGELVRQLEYKTADRHAALVKVGRSYPSTQTCSQCGARTKLALWQRVYRCNSCGLTLDRDVNAARNIRTEGLRLQLEKQQQVALIRGETVNGEPRPDETEPAQHSRAGGRGSFEAATGPAAASVAAA

SEQ ID NO: 36547 - protein, 409 aa, unknown
  TnpB Polypeptide
MNYNYRYRLNPTDALEDRLAWTVDTCRQVYNHFLHRLNRGDNTSAYSEQKRLPDLKDWWTDLKHVHSKVLQKVVQRLYDNLSILRGRKDSGYRVGTLNWKGANEYRSFTYSQSGFELKNTSGRTRLWLSKLGEIPLTFHRDLPDDADIKTVTVKQEPTGKWYAILGVETPDDPPEKPDELTDVVGIDVGILKYAHDTDGTAVESPDLSEERERLERAQRNLSRKQRGSNNWEEQRKTVARRHADLKRKRRDFLHKLSAYYAREYDLVAVEDLDAKGLVELPGNSRNRAGASWGTFLRMLEYKCEREGTHFVAVDPRGTTKECASCGTETDKPLWVREHSCPSCGFEADRDANASWNILSRGLEQVGTGCPESAPVETALPTDTNSVSAKRVMEAGSPTPKERTASAVSE

SEQ ID NO: 36548 - protein, 369 aa, unknown
  TnpB Polypeptide
MKTYKYPFYDQSNCIRFGNLLDDMWQVHAYFHDWQRQRYKDGLPYANHAAMCEHLTELKSTTHPHWNALPSQAMQEELKRIHLAYERFFKKLGGRPKIKKRHKFKSFTLKQTGWSLKDNRLTLNFRKWNNGKWRHDKVAYTFHKHREFEGNISRITIKRDACGDYWLYILTDFVETKSLPTTGQSVGADFGMKDAYLTLSTGEKKQHPQPLKSNLKKLRSLNKALSRKQKGSNGWWRCVRQIARLYRKITNQRKDFHWQLASELCKKFDTIVLETLNLSGMKRLWGRKVSDLAFYQFVEILKYKCQKHKRQLLQIGQWTPTSKPCSDCGYPNENLTLNDRQWTCPECGSHHDRDINAAINILRAGIAVA

SEQ ID NO: 36549 - protein, 489 aa, Streptomyces sp.
MAVGNGRRTRKPNKEPADTGRVYRLCPTSRQAERLLEWGHTCRAVWNVALEQRLYVHRQRRVYLRADEQCRYLTEARHDLEWIADLPSQAPQQVLRHLDRAYDNFWNEEHPAGFPRFKKRGARMAIPLPGQAVRVTRLNRRWAFVRIPKLGEVKFRLTRPLGGRIKSATIRTDGSGHWYVSFGVHIGRAVAPPNEQPPVGMDFGVKQSAYLSDEAAPRLMPQTLTEGEKHRLAGLERRKERQLAHAKKHRGGKYSNRLRQTLRAIAELRARQARRRLDFTHKLTTELAKNHGLVAVEDLRVKQMTKNARGSRVEPGVRVAQKAALNRSVLDNLPGERRRQLVYKCPVFGSALVAVTPVGTSQTCGVCLQRDPASRISRDVFVCTKCGHTDDADHNASVVILVRGLRTAAGEASTAGHCGEQHAGAGHARPAMSRARPGRTREPLNPSSAAARAIADTEGYKESLRCTPGRMPTSNRVSGRPRDTPKLTL

SEQ ID NO: 36550 - protein, 522 aa, Christensenella sp.
MVVRTLVLKLHKPSAAKRELIDQAVSRYNRALSYLFEHTKENVEPIMREMQEGGAYLTRRITGLLGKDVMDRLNRFGVQPFKDALKLDYAMAMVAWLSLRKAQKGARYPQLLDEENFDGQFFSALDAFDAGGISREELHLRIERLYNGLRVRKPLLFGRYAKNRDYCLLYDEERGRFYAKLYLLSVRDENRRGGIPRGNAKLRYVSDGHEPLEQDNKRERYIVVPLSFGKTQETVLREGLKNPRIFKTARLLKKKGEYYLSVNVACECEQAEKSKTYMGITRSLRDAVGYAVTDLKGKPLAEGGIPFRQDTCTKNGMHAAANELVEIARKNRSAIITYRMGNIGDKLTSGGETAKLTAGQFNRLVSMVAYKAEMKGLKKPVFVSARGIFTACPRCGANTQKNRFPGGRLLCVKCGFAGEIGKTGPLNAARRLLKYNGTALLFYARHTGEGLLIHNDILGLFYMAQPTQEGIRDFFRYAEKAVKDMKTGRKIPGGKSAREISYRKRFANLRDVREEITIVDEE

SEQ ID NO: 36551 - protein, 371 aa, Actinomadura sp.
VQLRYAFRLYPTACQRQALSRAFGCARVVYNDALRARRAAREAGLPLVSAAELSAALTRAKKAPERTWLGEVSAVVLQQSLRDLDAAYRAFFDGLAGRRPRVGAPRFKSRKDGRQSVRFTSNARWFITQGGKLSLPKIGPVAVKWSRALPSVPSTVTVIKDAAGRYFASFIVEAGRVDGAPAATGEVGIDLGLHHFAVLADGRKITSPKFLRRAEKKLKKAQQALSRKQRGSKNRDKARTRVARRHAKVADARREFHHQLSTRLIRENQTVCVEDLCVKGLARTRLAKSVHDAGWSAFVNMLEYKAARHGRTLARVGRTFPSSQICSRCGYQDGPKPLHVRRWTCEHCGTVHDRDVNAARNILDEGRRLTE

SEQ ID NO: 36552 - protein, 405 aa, unknown
  TnpB Polypeptide
VDKLVFCFYGGRCTSICHQAVRRKPEECVKGDATMEYSYKFRLYPTNAQKNQISRNFGCCRYVFNHFLAQKQEHYKETGKAPTRFQQDKALTSMKQELPWLKEADSTSLQAALQDLDAAFQNFFRRAKKGEKPGYPRFKSKKNRHKSYKSKCVGTNIKVLGNAVQLPKLGLVKCRISKEVRGRILSATVSQNPSGKYFVALCCTDVEMEPLPSTGAVVGLDMGLKSFAITSDGVEYPNHRFLAKSQKKLARFQRQLSRKSRDSKRREKARIKVARLYEKIANQRNDMLQKLSTELVKSYDLIAIEDLAPKNMVKNHRLAKSISDASWGEFRRQLKYKANWYKKVIVTVDRFFPSSQLCSACGAQWSGTKNLAVRKWTCPACGAIHDRDVNAAKNILNEGLRLLMV

SEQ ID NO: 36553 - protein, 391 aa, Lactobacillus sp.
MVLKAVKMRIYPNSEQRDRLMQTFGCARFVWNQMLNMQIERRKNNPDAKFVNAFGMNNLLKRLKEEYPWLKQAESTSLQSTNRNLADAFQRFFKGQNKFPHFKSRKYAQSYNSKCVNHNIKVIDNHHIKLPKLGVVYFRSGRLPQGKIKNVTVRLTVANQYYITVLTECENQTLAKTGKRVGGDLGLKSLLNLSDGYKEPIHHFEDKYRKKLHHWEKLRSRRYLLAKQAIAWDYHNKVLAPRQLDDFKNYQKARVMVAKYRQKIANQRLDQLQKFTTKLVKQYGIIVLEKLKIKGMLKNHKLARAITNASWSKLVSILQYKCDWYGKKLIQVNPAYTSQICINCGKNNHRLGLDKSEWLDVREWDCPNCGTRLDRDINAAQVILKKGLATQ

SEQ ID NO: 36554 - protein, 417 aa, unknown
  TnpB Polypeptide
LSVPAARRSRCCRVCLIDNVVIIYQAFRYELDPTNIQRGQLASHAGAARYAWNWGLNRVKLALEARAAGDSAAPVPNAMELHRMWNTWKKQPGNCSWWSENSKCTYQEAFRDLDRACKAYWRARRVGRRVGFPKFKKKGRTDHFRLNDPVRVQPRAVVLPRIGPVRTKEATTKLQGRILSATCRREADRWYVSLCVRTDRPDPIAVKGVAVGIDRGLKTFAVLSNGDIIDSPQALERGLRKLRRLNKAVARKQPGSRRRAKARMAVARHHRRMRNRRRDALHKATTNLARTKSTIVLEDLHVAGLARNRRVARRLLDQGWAEFQSQLAYKTTWYGSKLLLAPPFYPSSRTCSGCGAVRAKLRLSERIYSCGSCGLRLNRDLNAARNLVHLAKASPQVLRRLETPVERAALASPATTT

SEQ ID NO: 36555 - protein, 379 aa, unknown
  TnpB Polypeptide
MHTISIFVDKNRMPKPASYFECQTHLAKNLRNAANFIIRNLRTGLKKAPDTRTANENEVLETVRIGIEMANEKLLKDVDRLTKQLQKLPADDPARTKIQKRIENKQKNHPSMPTSDHWMLTYETLDAVMKNTKNPDYYAMPSQVNQQVLRKVLKDWKSYFEALTAYRQNPERFKSQPKQPEYIKTPYTTVTFTNQVAKRSDIRGKMYITFPRCLVPVCVGKSEGSYVRTEVKPCYGGYMIYVTFQDAVKTPEAPKNPTRILGLDPGLDNFLTALTNFPSAPFILDGHWLKSINQNFNRKRAVLMSELTRGLDSTKSVKNSARLNRISKTRSRGLTLVPATTSTLSAFHMQDFSGSLPALQQRQAFLSLKLRNHLLPGQV

SEQ ID NO: 36556 - protein, 490 aa, Vulcanisaeta sp.
VPFSSSDELVGRLPTVFTNPGTESSKSRGKGKRKQDENRRTIRLRLLPSGSQERKLRRIADATARLWNELNYTRLVQYREGGEVDFEGTEHEFYHKYKDRLGVNAGQVVNLNNNAWKSYFELLKLYKQGKLPKFMGKPSPPGFWKDKVLGKRLLRIFVRNDRYYLEPINNGEGYLVLKDWGLRVRYAGRIKWSGRQGMLVIKLEDNRWFAYVPITVGEKPARSNPKGYVRGIHEKIQIEKPRGDNKAFVDIGLNNLFAVVFNHTDTAMLIKGSTIKAEYYYWKREIGTYQSVRDWLRNHGFESWRKYHTYYLHAVYKRRERLRHYYRTAIRFLARTMHEMGVDEVFIGYPYMVSQDNGNEFNTNVWWYAKIINWLGEVLEEYGIKLNVVNEYGTSKQCSICNVEHENGRVKRGLYVCPLTGIKINADINAARNIARRVGYEVPIPRRILSYIVTTNGVKPITPKEGVTPETPKIKPDIHGGKGVIQQRLS

SEQ ID NO: 36557 - protein, 391 aa, unknown
  TnpB Polypeptide
MYLTERHIIKNNKELDMLCFNSKNLYNKALYLVRQHYFETKSYLDWIKVDRLMVDSKDVDYYTLPTRVSKQTLRLLDRNFSSFFALIKKKKKNEYDKLIRIPRYLDKEGRYIAIFPKDAVSKKYLKEGLIKLSSLSLEIPTKVTESNLVEVRVLPRNNHHVVEVTYKVDDVKPKSHNKRYASIDLGLNNLATVSSNAVKPFIINGRPLKSINQYWNKEKSRLQSLLKGDKKTSKRIESITNKRNNKVKDYLHKSSRMLVNFLVSNDISTLVIGYNEEWKQNINIGKRNNQSFVNIPFYTFIQQLEYKCKLEGINIILTEESYTSKCSFLDNESVEKHESYLGKRIKRGLFRSAKNRIINADLNGSLNILKKVVGEFQYPIEVCSTPLRMNI

SEQ ID NO: 36558 - protein, 401 aa, unknown
  TnpB Polypeptide
VLAVRSVWQYYVPPGDVLRLLEIFRRMVNESIRIGIANDASSLRKLSLLSYNQLAQYDSPSCYKLCAISRASGILAARKKSLKRGFATRTPYAVRQQLVSCYRFRVKNIGLEIPIARGRHISIPLTRHTLDIISQPRVKVRSFTLTRNRLSLCISREVAPVECVSTVGVDRNLRNLTVGNDQETRHYDLSRTVRIASTTMRMVASFRRDDARIRRIIAAKYGERRTARTGQLLHATTKTIVAVAVQRREAIVLEDIQGIRALYRKGNGQTRNYRGRMNGWSFSEAQRQLEYKARWAGLPVIHLSRRETRGSSIVCPRCGERLQSDTRLARKLWCGKCRLVMDRDRVAAVNLARRGRVRFARSRPPILLEAQGGAVEAVKGNPTPTVIPGVDAPKLTHPTKS

SEQ ID NO: 36559 - protein, 400 aa, unknown
  TnpB Polypeptide
MEIRKYRLYPTKEQSALIESTLETCRKTWNYLLSKRKTGRVSKFDQDHDIFVQKRKNPFLKAVYSHVLQNVSDRLDKSYRAFFKGIARSPKFKAFGRYDSFTYPDAYNGSVKLGSSLRKTKIYLSKIGYLPIVVHREPSVGKNKRATVKREGDKWFVVLEYQVSDVPEFAIVQPKSPIGLDVGLLSVVATSNGETFKPLQPLKKNLKRLRRLQQSVSRKKKGSKNRRKAVQRASRLHWKIRSLRSDFNHKLSTQLARTHDFFALEDLNIKGMVKNHSLARSIFDAGWNQLAQMLRYKAERAGKKVVFVSPNNTSTDCSRCGFRKEMPLSVRTFHCERCSFETDRDVNSAIRVLNRGLEQVGVGYAKLKSMESGVQSLNRWEIQPLVEAEISGSPEVYRGV

SEQ ID NO: 36560 - protein, 486 aa, unknown
  TnpB Polypeptide
MRVSVTPEQDQMLLEYAVLFGRVERTLYRDLEKGKAAHGLKSQYLVRFAITARQFNAVRIQLQGKIEGLRQLLPLQIANLATRIRKAQKIVARLRKRQPGSDQLHQKRRRLARLECRFQQLEAERKAGHMRLCFGSRKLFHSQFHLQENGFPSHAEWKQAWRQARSNQFFVLGSKDETAGCQGCVAIRNPEGSYALRVRLPHSSRGKDLVLTGVRFRYGQEQYEEALAASRAVSYRFLRDAKGWRVFVSLEPSSIEVMTDRRAGAIGIDINPDQLVLAELDRFGNFTGGQQIACVSYGKRQEQAKAIIGDAVKQAIAAAVGSGKPIVLERLEFAEKKSALENEGRGRARMLSGFAYRRVIQHLRAAAFRAGVEVLPVHPAYTSTIGAVNYAARFGISIHQGAAIAIARRGLALSERPAVRVAQLSTRQGGHVTFPLPEWNRGQHVWSFWSKVSRQMRAALRAPVQLLPAMAGSTPASRNFQTPCAT

SEQ ID NO: 36561 - protein, 276 aa, Aulosira sp.
MLVFEFKAYGKSTQLAAIDNAIRTAKFIRNSCIRLWMDVQGTSKNDLQKYCAVLAANFSFANELNSMARQASAERAWSSISRFYENCKKGISGKKGFPQFQKDCRSVEYKSTGWKLADNRKSITFTDKKGIGRLKLKGTRDLHFYQPNQIKRVRLVKRADGVYVQFCVDANRCENIEATGKTVGLDVGLKEYYTDSDGLVVENPKFLRKGEKVLKRSQRRVSRKVKGSKNRGKARQILGKRHLKISRQRKDHAVKLARCVVQSNDLIAYVSEAGRV

SEQ ID NO: 36562 - protein, 472 aa, unknown
  TnpB Polypeptide
MKRTVKIKANCSNSESEILLIGTIQRNIKNYVWSRYSGIGSLLKQSGWTIRDELIQQNLLSKKITKTFSRVAIEKSASIIKTNWIVTKKKVKKAISQNENLTKDDKRYLYLCLKHTPTLYNILNYKKIDYNTDYLKDLKVDVHRLNNLLRRYVRRYKTKSHTNKTNIIIASNIYNFDSNNKHLSCTGKKKKSRIEITLIGNIPNLKGTLELVKNQKDNQYYLHVPLDRVISKKNITNESEILGLDVGITDLITLSNGSVYGANSAELFYTLSDNLVNKNRSRLFSYKRKLEQKFSIELDQSKKAILEQKLKNLENNNLGSKKRISKISKYKSRIVSHINCELNKMVKEEDIEEIVREDLNWISKKKKNVSRKQQNRFSTWTKGVLLERLSVKLAEKGIKETIVNPAYTSQICSKCNHLGNRNGKMFKCSNCNLSIDADFNASINTKKRKFISEINIDTPYKEVKKYYENLPV

SEQ ID NO: 36563 - protein, 349 aa, Limnoraphis sp.
  misc_feature (260)..(263): Xaa can be any naturally occurring amino acid
MTEKAYRYRFYPTPEQEDLLRRTLGCVRLVYNKALAARTEAWYEQKKRVGYSQTSSMLTNWKFEEELDFLNEVSCVPLQQSLRHLQTAFSNFFAGRAKYPNFKIKRNGGSAEFTKSAFKFKEGQVYIAKCFEPLPIRWSRQLPTGCTPSTITVKLDPSGRWFVSLKIDDPTDHQLKPIDKKVGIDLGITSLFTTSDGVKVSNPKHYDKLYKKLRLAQKSLSRKTKGSLNREKARIKVARIQAKIADCRRDHTHKLTTQLXXXXLARQLLRNRNPNRKVWESPSFTEGRMSTNHYCFSAGFSKFEGRLHDTCETVWKSDKSFDSQSYGQFVLLCSKFLSGALALPSSVAQ

SEQ ID NO: 36564 - protein, 356 aa, Methanoculleus sp.
  misc_feature (30)..(32): Xaa can be any naturally occurring amino acid
  misc_feature (351)..(352): Xaa can be any naturally occurring amino acid
MLISYKYRAYPDTTTETRLITALDTCRWLXXXNTAREHGFTPTMRGMQARIVTLKEENPFLKGVYSKVLQMVNYTLWSTIAALSQTKKRGRKIGKLRFKSAFRYRTLNYNQSGFKIDREHSTITFSKIGALPFIMHRPYTGKVKSVLITHSGDRWYVIVQAEQEVSEPKREGRSIGIDVGLNSFAVDSDGAVIENPRFHEHSRKKIKTLQQSITRKKRFSQNWKKAKSNLEKVYDHITNQKRDFLHKLSRQYVDTYATICVEDLNIKCLKENGKFRGLRRSIHCASWGRFYSYLSYKAESAGMNFIQIDPRDTTQLCANCGSITTKDLAVRVHDCPYCGFVANRDYNAAVXXNLRG

SEQ ID NO: 36565 - protein, 360 aa, unknown
  TnpB Polypeptide
MMNRAYKYRIYPTTEQADLINKNIGCSRFIYNHFLALAKSDGYLSYNQYAKALPLLKKAYPFLKEVESTSLQQTLKDLDKSFARFFKKSGGFPKFKSKRNPKQSYRCQMVNNNIRITDNHIRLPKLGLVKFAKSREVEGRILNVTISRTNTNKFYISICVDTEIETMASSSGEIGIDLGLKDYLVTSEGLVVPNPKHFRKYERQLAKAQRRLSKKKKGSQNHKKAKLQVALLHEKIANTRKDFLHKLSTTIVAENQTIVVEGLKPKNMIKNRRLSKSIADASWGRFLNMLEYKSSWYGRNYVQVDSFFPSSLLCSNCGYINQNIKKLHIRTWECPSCGAFHHRDENAAKNIKAEGLRIAS

SEQ ID NO: 36566 - protein, 381 aa, unknown
  TnpB Polypeptide
MTNRAIKYRAYPTTEQSVMFAKTFGCCRKVYNLMLSDKIESYKSTGKFVTVTPAKYKNDYPYLREVDSLALANKQMDLQEAFRNTFSKSRKKKNGFPKFKSAKHSRKSYTTNNQKGTVAIIDNKCIKLPKIGKVKAVIHRVPDDSWTIKSATVSQESDGKYYISVLFEFENTVNPYVADKTNAIGLDYASDGLYVDSNGNTGTNHKYYRESHNKLAKAQRKLSRMQGSKKHEVKSNNYIKQLRKVNKIHRHIANQRLDNLHKISTEIANQYDVVCVESLNMKAMSNKGFGNGKATLDNGYGMLLSMLEYKLSDRNKYLIKVDKWFPSSQICHCCGMLHPEMKNLAIRKMTCDCGLTISRDQNAAINILKEGLRLLTEVARN

SEQ ID NO: 36567 - protein, 443 aa, unknown
  TnpB Polypeptide
MKIFTTYSVKIKHYNHIFKNTVSIYRKAVDFFIDVCLDKWECMLPISGNVLRQQYIERLCHKTGDNSNPQYADFDTKFYKMPSYLRRSAINEAIGKVSSYKANLANWETDPVGRKPSEPKAGYVFPSMYRTGMYNQTDEYTAQLKVYVRNTWDWITVDLRKSDMDYIYRRCNGRKQCAPTLQKRGKEWFLDFPFEEKVKLADIPVHEQTIVAVDLGINTAATISVMRSDGTILGRHFCKIPKETDHLTHSINRIKKAQQNRNHKTPRLWARAKGINHDIAVKTAVFIMDVAVLYNADVIVFEHLDKDGKVRGSKKQKLKLWRSQEVQSIVANKAHRLGMRISHVCAWNTSRLAYDGSGSVLRGKDGGFDTYELCKFQNGKTYNCDLSASYNIGARYFIRELLKSLPERERLHIEAKVPQCCKRSTCTFSTLVNLNAEFIAQAA

SEQ ID NO: 36568 - protein, 373 aa, unknown
  TnpB Polypeptide
MDAIVTLKLRIKDKHVAAMLEMARDVNTVWNYCNETQYRSLRRYCNKPKVWLSGFDLQKLTAGFVKCDGVTVGSSTVQQTCEEFATRLKQFRRQKLSWRVSDRRSSKYSLGWVPFKKHALRYKDGQLRFNGLNIGVWDSYGLSKYELLAGSFNEDSRGRWYVNIAVKGRTEKKQVPDGATLIGIDLGLKTMASYSDGSAFNMPRWYRQSERALGVAQRANKKRRVKAIHAKIANQRKDAIHKETTALVKRHAAIFVGNVNAKALAKTSMAKSMHDAAWTMFRTQLKYKAIRHCVVFEEVNEAFSTQTCSSCGALPDSRPRGIAGLGIRQWACSSCGSVHDRDTNAARNIARMGLHALAGGISGFSLERKSKSC

SEQ ID NO: 36569 - protein, 499 aa, Escherichia sp.
VKRLQAFKFQLRPGGQQECEMRRFAGACRFVFNRALARQNENHEAGNKYIPYGKMASWLVEWKNATETQWLKDSPSQPLQQSLKDLERVYKNFFRKRAAFPRFKKRGQNDAFRYPQGVKLDQENSRIFLPKLGWMRYRNSRQVTGVVKNVTVSQSCGKWYISIQTESEVSTPVHPSASMVGLDAGVAKLATLSDGTVFEPVNSFQKNQKKLARLQRQLSRKVKFSNNWQKQKRKIQRLHSCIANIRRDYLHKVTTAVSKNHAMIVIEDLKVSNMSKSAAGTVSQPGRNVRAKSGLNRSILDQGWYEMRRQLAYKQLWRGGQVLAVPPAYTSQRCAYCGHTAKENRLSQSKFRCRMWIYSERRCKWRSQHFSGGARRSCLWRDGAVRPPVEAGTHRNDSGDSLNVAGIHVLQGVEDVNIGFCQRLNSTPRNKRLRQLIPKTQNQSRPASIHLPLPEMPPPPRLAHAHYAAPDTNCRRWYLTAPDLPASGSNLRAGQPSSR

SEQ ID NO: 36570 - protein, 379 aa, Lactobacillus sp.
MTLRAIKTRIYPNLMQRAKIISNFGCCRFVWNQLLNMQIERYNNGGSYVNEFGMNYLIKCLKQEYPFLKQAESTSLLRVSRDLNQAFQKLFKEHVGYPKFKSRKFPKQSYQSNSVNHNIQQMDKHHIKLPKLGDIRFKAGRQITGKIKNVTIRLSATGKYYAIVLVDKDIFKLPTTNQSVGIDMGVADLIITSEGVKYPTIRFDKILSRKKHYWEKRLARRRLQATKEIAWDQHNKVLEPRGLNDFSNYLKAKHMVAKYNEKIANRRSNYLHNLTKQLVEQYDVIKIEDLKTKNLLHNHKLARAIANQSWRKLRSQLEYKCAWYGKQLVTVNPRKTSQICSNCGFDDGKHTLDVREWTCPKCGINHDRDINAAKNILSA

SEQ ID NO: 36571 - protein, 493 aa, unknown
  TnpB Polypeptide
MVVYQAFRFELDPNDVARSALASHAGAASFAYNWGLATVTDRLDARRALRVLALRQGASTDEAGAWATELVGPVPWNLPGLRRAWNQAKAEVAPWWAANSKEAYNSGLDALARALDGWSKSRRGQRKGRRVGFPRYHKRGSRRSWRVTTGAFGVVDDRHVRLPRIGILHTKEPTTKLMAALGAGTTRVLSATISERAERWYVSFGCQVDRKQRPAPSGPPVGVDAGVKSLAVLSSGEVVPNPKHLSKWARRQARLQRQCARRAGPAKGRAPSKRWWRSKARLARTHAKVATARSDGLHKLTTRLATTNATVVVEDLGLAGMTATAKGSGHWRGKAGLNRAILDAAPGELRRQLSYKTTWYGSRLVVADRWYPSSKTCSRCKAVNAKLALSERTFWCERCGLVIDRDLNAATNLASLVEAYSITGTASGAGTSTPLPPAGAVCANAQGEEMSMAPARCSSTNREDGTGAGRSDKTVTATRQRVAPKPVLVQSDR

SEQ ID NO: 36572 - protein, 539 aa, Firmicutes sp.
VVAVKVTFETRIKDRSLYPLLEAFAALFGRVERTLFRDHYVRGEPLADCKRRYLPAFGITARMFNGVASVLGGKVKAAHEARKRHARRLKAEIRSLEESLACLKERLEQAEGPGSRWRLRFQIHHKKRRLAQLESRLALVEQDLNRVVPRMCFGSSRLFYRQFHLEENGYRTHGEWLRDWRRARSSQFLCLGSKDETGGNQTCTLLPDGTLRLRLPDVLAESLGKKWVLVPGIRFRYGQEAVDRALARGQALTYRFLRRERKGKPAWYVQITLEQEDAPVVTSRLLGALGVDLNPGLVAASQVDRHGNPVSWRHIPVLTRGRRQEQVTASLAEAAADLVAWARAQGVPVVVEKLDFEKKKAHLGEMGVRYARMLSGFAYAKFHALLLSRAAREGVEVMRINPALTSVIGQVKFGPGYGLSPHAAAAVAIARRGLRFGERLRSRSALLLPARNRGRHVWSDWSRLSRGLRAGSARGRRPSEGNWGRGLPLSQAAPTARPWLQGPPGDGLSPVPGRDPPAQTVGRAVRPASQQCAAIHTHC

SEQ ID NO: 36573 - protein, 403 aa, Actinomadura sp.
MACTVKRAFKYRFYPTDEQAAELARTFGCVRLVYNKALEERTRAWRSQRHRMSYADTSAALTAWKKTGELAFLNEVSSVPLQQALRHLQAAFAAFFGKRARYPSLKSRKKSRASAEYTRSAFTWRDGALTLAKMNGPLDIVWSRPLPEGAVPSTATVSKDAAGRWFVSLLCEDTVIRLEPSDKVVGLDAGVTSLVTLSTGEKVANPRHERRDRERLARAQKDMARKAKGSANREKAKAKVARVHARIADRRRDFLHKLSSRLVHENQVVVIEDLNVRNMVKNHSLARAISDAGWRELRVMLEYKAGWYGREFVVIDRWFPSTKTCSKCGTLQKDMPLNVREWECGGCGARHDRDVNAARNIVAAGLAVSACGAGVRPQRESSRTGRSATKQETQRATAGLPRL

SEQ ID NO: 36574 - protein, 269 aa, unknown
  TnpB Polypeptide
QGVGSLRAGNFSQDSVGDWYLNVVIDRVELPLAAIYGADSSIGLDPGQKVAMTGSDGSYYQTYNDEILKANEIPELRSQRYREIEPKIQQAQRRGHRRKAKRLHRKATRQRKNDRDVFCKEIVSLYQRIWIGNLSPRKMAKSALKGQAKSIMDAGIGMASATLKSLGHRAFRVVETIDERYSTRRCSVCMKLSGPSGLESCDVRQWVCGVPVGNIMLGIRGCNTLHLRDVNGGENIRHSGELQWNGLSLQQRRANTAAPRYWRPFAGTR

SEQ ID NO: 36575 - protein, 500 aa, unknown
  TnpB Polypeptide
VSPEDAGVLTAAGRHLGSLAGRDLAARCAEGRLDAKGRAASRAARKRALTAASSSRWAGAITRASEDAYQLASRNLAAERATLRARVRKIEARLAVQAGEKAGRVAGYATPTERHGKSLRAKALKARLARVERRIEGGAVSVTRGGRRLMRARLNLAAAGLTAARWRQRWDAERLFLTADGEKGKAWGNETLRWNPDEGWLEVKLPAPLAHLANRPHGRYRLSCPVAFGYRGGEVAAQAATGAVRYDVSHDPERGRWYLDASWKAPERPVPSLGELTASPVVAVDVNARHLAVAVLAPDGNVSGVPFTVPLELAGLPAAARDARVRAAVSRLVATARAAGAAAVVIEDLDFAGAREQGREKTGNRPSRGRRGRGFRRLVAGIPTGRFRDRLVQMTANAGLSVVVVDPAYTSRWGAQHWLAPLRRHHPGLTGHHAAALVTGRRGQGHRARNRATGNRAAPRGTRPPDGCKTGMPHRTTAGNQAPEDRSRAPTEPIVTITRC

SEQ ID NO: 36576 - protein, 184 aa, Acidobacteria sp.
PKVNKAVGVDVGLNSFCTLSTGEQVDNPRFFRADKKALARAQRQKRRKVARRIHERIKFRRNNFAHQLSHALVSVYSVIFFEDLNIKGMVRNHHLALSISDAAWNQLISFSSYKAANAGRICEQVDPRGTSQECSACGATVVKDLSQRVHNCLCGLTLDRDVNAARNILSRGLARVGNNAKEAA

SEQ ID NO: 36577 - protein, 254 aa, unknown
  TnpB Polypeptide
MPIRRMDGNRYPLTKKLGSVRIRKRDRLRYPIENLSSWTVKRENRTYYLVLLFNVDIQPKMRAEGRIGIDLGVKNLLTLSTGEKIDYPNRLRRLEEDVRWEQRKLSRRTKVEQPPQAEGDRSQGVRQAPPLPRQLPAPTVPQADRREPIHRHGDPDGAEHDAEGAQKAGRGRQAHAQRPVAQTRDEPFHTPRRVERLVAKLSHKAEWYGRAFVQVDRFYRVPNSAMTAGTSTRDCGCPNANGPAKTATADMTGT

SEQ ID NO: 36578 - protein, 394 aa, unknown
  TnpB Polypeptide
MISYKYPIFPNKATQQKLAEALDACRWLHNRLLQELKEAKEKGIKLKTYDTQNMIPSLELENPKLNLVYSKVLQMVNYTLWSNIRGLSASKKNGRKIGHVRFKGSGWYKTMNYNQSGFKLDQDHGRLHLSKIGDIKIKMHRKVHGCIKAILIKREGRQWFAIVQADQEPEPLPETGKSVGLDVGLKSFVVDTDSNSVENPRFAEKAATKVKNIQRRLSRAEIGSNNRKKLRDKLDKVHERINNQRSDFLHKLSRSYVNNCDIICVEDLDVKGLKENGYNKGTHRNIHDASWSKFIFMLSYKAESAGRRLIKVDPRNTTQRCSSCGSIVKKELSDRIHECPYCGFSCDRDYNASRNILIAGMEQPAEPIESKPLHRVSVMQVLAMKWEALPFRVG

SEQ ID NO: 36579 - protein, 288 aa, unknown
  TnpB Polypeptide
MPRHRDQRSPTVVYRTARSGLRLTRGQRRRLLGLLVSAGDVWACVLELNAWRRSRQDAPLAGYPALCRELAAAGPGCFGELDTAGARSVLRRYSDAWFAAAARRKKGDASARFPRRRRKMMSVRWYHGTFALEGRRLRIPVARGCPPLPVRLDRDLPYPPGQVRSVTLLYDAGRLWADVTAEVPVTVYPPGAEPDPGRVAGVDLGIIHPYAVAGPGGQALLVSGRAVRAEHHLHLKDTKARQRPPPAAPRIPGSAGRGAGGTTDAASASWRRGTGAGYARPSTKPQSP

SEQ ID NO: 36580 - protein, 277 aa, Synechococcales sp.
MLVLEFKTYGKPIQFSAIDDGIRVTQFIRNKSIRIWMDGGAKSWVELSRHCAVLAKEFDFANKLNSMARQAAAERAWASICRFYDNCKKKVAGKKGFPTFQKDCRSIEYKTSGWKLSDDRKAITFTDKLGIGRLKMKGTRDLGFYPLDQIKRVRLVRRADGCYVQFCISAERTEVMEPTGKAVGLDVGLKEFYTDSNGVMVENPRFLRKAEKMLKRSQRGVSKKVKGSSNRRKARQVLGKRHLKISRQRKDHAIKLARCAVTSNDVVAYEDLRIKIW

SEQ ID NO: 36581 - protein, 248 aa, Ruminococcaceae sp.
LPVVSKKHENTVKYINPRVKYIGGKWILSFGIECESTKQELNDYSVGIDLGVKELAVISYNGETKSFRNINKTKRVKRLKKRLKQKQRSVSRKTPASAEVPSMRKRARKKSARLLKEEAKVAKLHRKIANIRHNHTHHVTSEIIKLNPRRIVLEDLNVSGMMKNKHLSEAIAEQTLHEFRRQIEYKAEWAGIEVVTADRFYPSSKKCSSCGAIKRDLKLKDRVYKCEKCGLSINRDVNAAKNLEQLAV

SEQ ID NO: 36582 - protein, 453 aa, Moorea sp.
MRIAYQYRLRPTKEQMTKIDNWLSRLCAQYNYLLADSAKPTLRERFNWYEQNRCRSNACPLVCHLPELRNNPNYYSQNKSLPNLKKSHPWYKEIHSQVLQDVVKRVKLAFDRFIKGNGKRNGKPRFKKRHRYRIFTYPQIKDGCLEGNLINLPKLGKVRIVLHRPIPDGFKIKTASITKKCDGYYLVLSLEDKTVPEVKPDINPESIVGIDVGLKEFLTTSEGETIDIPQYYRKSQKRLKVIQKRVSRRKKGSKNRLKAIKQLGKQHKKVADKRKYFHFKTANYLFSKYDVVAHEKLNVKGLAKSRLAKSVLDAGWSSFLTILKSKAVRVAWPTALNAGLLAVPVSPKNTSQNCSNCGKKVPKKLHIRWHDCPDCGCNLDRDHNAAIRRSRRYANNIKNRAAGQSVLKAQRLLSNSRIGCVRVAWPKAKPTLTHWVQCRSCHKCYISLIYIAQ

SEQ ID NO: 36583 - protein, 448 aa, Lactobacillus sp.
MLVRKQKSKKTTLQTFRDIRAKKTEIQYEYLVEKHVIRANDSRYLILDKYAHLANNIYNQALYRFRQSLFKGKWLSYGALDKSFKQSYQQKDCMLYRSMKSVHLAQQILKLVMQNITSWNKAVKAYQKNPSKFNGRPKLPKYKDKGGKSIVIIDNQTAKLRPNGIVEIPVMNNLKIKLQHQDTTKIQQVRIVPKNNQFVVEIVYKTNKVIDYKEDNGRYLTIDPGLDNVFTLASNVKEFQPVIVNGRPLKAINQYYNKQRAKLTKLYGFNKQSRNTKRLNNLDFYRNQKVLGFAHEASKRIVEIALSHELNTIIIGKNKDQKRSINLGKINNQNFIGIPHQKMIEMIEYKANLAGIVVIQANEAYTSQTSFLDNEEPINQNGDKARKRKGLSPAKRRIKRGLFKSNKGILINADVNGALQILRKVVPNAFVDGIDGIGLVPVKLNLNF

SEQ ID NO: 36584 - protein, 372 aa, Clostridioides sp.
VIAVKKAYKFRMYPNKKQQELINKTFGCCRFVYNKYLAKRIDVYKSDKETFTYKQCSSDLTNLKKELKWLKEPDKFSLQNALKDLDNAYKKFFKEKAGFPKFKSKKINRFSYKTNFTNGNIMYCGQHIKLPKLGMVKIRDKQVPQGRILNATISKEPSGRYYVSLCCTDVDIEVFENTNNHIGLDLGIKEFCISSCGDFIENPKYLKKSLNKLAKLQRELSRKTIGSLNRNKARLKVAGLQEHIANQRNDFLQKLSTKLIKENDIICIEDLQVKNMIRNRKLSRLISDVSWSEFIRQLEYKANWYGRKIVKVGKFFASSQICNKCGYKNEEVKDLNIREWICPSCNETHDRDINASINILKEGLRLITIQNK

SEQ ID NO: 36585 - protein, 372 aa, unknown
  TnpB Polypeptide
VRLLPDQIQEQLLWKHVNTARFVWNYGLSYQRKRYKNKEKHLSGYDLRKVFINLKQQDGYAWLKEVSAHTISNVCLDLDDAYKRYFKKQNGKPKFKKKNKCKNSFPVRKDTFYFNNNCAVIEKIGKVKYQTNYKLQQGRQICKFTNPRIKYDNNKWILIFGMECDNQTQTLTDNSIGIDLGIKDLAFVSCRNEFRVFKNINKTKEVKKIEKRLKHAQRKVSKKYHVNDNNYKKSKNILKAEKRVKQLYNKLSNIRKNYIHQTTRTIVNMLPKRIVMEDLNISGMMKNRHLSKAIQEQCFYEFTKQIKYKCENFGIEFIQVDRFYPSSKTCSKCGHIKKELKLSDRIYKCDNCGLVIDRDENASINLMNYKVN

SEQ ID NO: 36586 - protein, 606 aa, Streptomyces sp.
MVKLLDQFVKGLELLPLGCVRASVMVSVSARNWRSLIECVTFTGGARFPWRRDRRVGPGGGDRVGELRSLAAPFVASGPGGVAVRTRLKQLTPGDEEVLRQVGGHLGSLASKDLKARCRDGLEHSGQAWAVRKRELTPLASSRWAGSITKASHDQWALARRGQSAHIQNLEAGIRTIEDRLSQPIGHKGPNGAPGGYRSRREWHAKSRRLRVLQDRLAAARADREAGIVHVVRGGKRLARTRHHLEAAGLTEGAWRERWEAERWFCQADGESGKRYGNETIRVSPDGEVSIKLPAPLTYLANAPHGRYVLACRVAFAHRGSEWADRVATDRAIAYRVHYDVGRDRWYLTASWQIPLTPALPIEAALAHGVIGVDMNADHLAAWRLDVHGNPTGAPRRFFYDLTGTASHRDAQVRHALTGLLYWARACGLKAIAVEDLDFAAEKTREKHGRKRRFRQLISGMPTGKLRARLASMADQTGIVVIAVDPAYTSRWGAQYWQKPLTTKNRKTTRHDAAAVAIGRRAQGHPVRRRTAPPPAHRSDEQGHRTVQAGPGVPGREGTRPRIPGPRTRSAGAGRGANAGNQNAQHRPGRSAEHETWQQDSLPLSP

SEQ ID NO: 36587 - protein, 452 aa, unknown
  TnpB Polypeptide
MATVSYGLKITKENHIFDHTIKFYRDAVNYLVGIALSHYPELKEIHDSEKATAGQLRRQYVEWLVHSTKGNEAAYPYFDQHFYKMPSYLRRDAITTAIGKVFAYRKWIENWEKGGKKGHCPFLNRSQDVMPCFYRGNTFKQDGNTAELKLYDGHDWIWYPVRIRNTDFKYAVTSMSDWKAKAPVLAKRNRRYELRIAYTKSGKEFPTYVSDSNVESVLGVDLGINTDATCSVLHRDGTVTGQTFINSPVEKDRMNGLLNTIKKAQQHGSRRNARLWRFVNNYNREIAIKTAQQIVAYADQQNVQVIVFEYLKISGRKRGRKKQRLSLWRKRDIQKRVEAMASRHGIRVSYICAVNTSRLAYDGTGRVLRGRDAGFNTYELCRFQSGKVYNCDLSASKNIGARYFIRVFLKSVSAKKLLSVSAKVPELGRRTYCTLATLINFHAELSATKGAA

SEQ ID NO: 36588 - protein, 461 aa, Nonomuraea sp.
LTRLVLLLGPPRVGDEHSAGLTVTFHDGRLAGEVGDVDAAAEVVSEFSNAHTLSHGTHGTFGTVQLRYSFRLSPTPGQRQALAQAFGCARVVFNDALRARQDAYAAGLPYISDGDLSKQVITAARQTPERAWLGEVSAVVLQQALADLNTAYRNFFASLSGKRKGPRTAPPRYRSKKDNRQAIRFTKNARFSITAGGRLRLPKIGDVAVRWSRSLPAEPSSVTVVKDAAGRYFASFVVKVAGQPLPQAQTEIGIDLGLGHFAVLSNGRKIGSPRFLRRAEKKLKRLQRALSRKEKGSNNRAKARHAVARQHAKVADARREFHHQESTRIIRDNQTVIVEDLAVNGLARTRLAKSVHDAGWSAFVAMLEYKAALYGRTFHQINRWFPSSRMCSTCGALAESMPLNVRSWVCPCGAAHDRDVNAAINILAAGRAERLNACGDLVRPPLAVAQVSEAGSYRGAA

SEQ ID NO: 36589 - protein, 411 aa, Okeania sp.
LYAKKLELKLSNQERSFMAKCAGYARFVYNYGLSMVNGTSAMTKVNKRGQEVSLSYALRILEAKKVFTNYVKKQPEYAWINNYSSRIYQSAFQHLGEAFKRYKEGTSKYPKLKRKKDRQSFTVYDGNGKVTINPGKKIKIPTLGTFRLWESIPYTTASQTFTISRTGEKWFVSFSIEAEKLPVHPLLDKRQYETFGIDVGVKQFASIANQKKRENEVVSLPDSIKLEQLNLAKFQWRNRNKQVGGKGKPPSKNAIKYYKKLAKYHCRIANVRRDFIEKTTTKLVTQVKHVCLESLNVKGMMQNGKLAASIARQGFYQFRQRLTTKIVSSGGTVVLADQWFPSSKTCHSCGHIHQELKLKDRTFDCPNFGMIIDRDLNAALVLSQYGEINQKNRVGCTRIYACELEEGGLPG

SEQ ID NO: 36590 - protein, 938 aa, unknown
  TnpB Polypeptide
MKLSFKFKPSISKKQLEIVEELSYHTTKLYNIINYDLRENGVKTYYDIEKEYKSNWHCDFLHSHTRQQMFKVLEQNWKSYFASVKDFGINPTKYKAKPRPPKFKNTDKNKNEIIFTNLAIRYDNGLLKLSLSKAIKSLFNVESLNFEVSKKLQSIIDWNSLQQARFNYDKVQKCWYLIVIYKKEELENNKTNVGSIDLGLDNIATLTFKDGLNQYIFCGKKLKSVNSYTNKKIAHLQSIEMFKCGSDKFKNTKLNFNIVPVLLDELIDYGENNMHDIHSRLTITDVDDLTDDDKEFIINNFFDANFHSMILPNEEYNRLYQKYQLCENNDINIFSPQEYSDLMALFNLVWFDPIYKNKYPELKKLIKKGKNYTLEDRIKIIDIQRDIIRKIIPTYKKFVEKGRIEITTSPYYHPILPILLDIKSIKKSSDSDLPTNLKMELDAKMQTKMAIDRIEELFGKRPKGIWPSEHCINSKVMEMLKELGIKWTISDEGILSNSIKFEFVRDFRGYLEDPYHLLKSYNYKDVDIIFRDSVIPNLIGFEYPNHSAEAAANDLYDRIKVTQSKLLSSPDENHLLTIAMDGENCWESYTEDGSTFLQTIYSLIENDPTLETVLISDYLEKDTPKPLNKLSSGSWINRNFKLWIDEPLKNLAWTYLKQVRDDFCAFVKQNPLHPNIEAARKELFICEGSDWFWWYGEPNDSGRDNIFDYIFREHLKNIYLYLGLEVPQYLDTPLLSAISKPSRYPKGEFTPILNGQESDDENWLNAGCIKIPDGPVLDEDKFYDKICFGYDKDNLYLRFYINEYNKQAAANAKRVNQMYVYMRNQNKKQALSPIRIIQKTESILPISKEKFHNEMQISIYNGEINLVRLVRAIPNNLWVITSSKNITAIYDKVVDLSIPFDDIGIDKGDTLEFLFVNANYGIKDYFVPNEMLLTIKRM

SEQ ID NO: 36591 - protein, 198 aa, unknown
  TnpB Polypeptide
  misc_feature (7)..(7): Xaa can be any naturally occurring amino acid
  misc_feature (169)..(169): Xaa can be any naturally occurring amino acid
MNFYTIXTIYLACSQDFEQYAHIRRNLQRKKRLDLVKRIGCREERIVNQQLHIIANEIIAYAKQFPNPIIVMEKLDGIRENMNGSAKLNRRLHAWSFRKIQTYIEYKANLERMAVVYIEPRDTSKKCHRCGHVTQANREFRCRKCGLRYNRDLNAAINIAHALTRGMGXGSREPLELPHEVLTQSQDGTGEAPSVRVG

SEQ ID NO: 36592 - protein, 350 aa, unknown
  TnpB Polypeptide
MKITRTARLEFGEQLPAFLESVRNFNAACNWLSGVAFAEKIWHWLPLQRRVYGELRERFGLSSAATVTAVRKVAYAYRNKARRARPARFRPLGAMTVYRHAYKRDGTVRFYGFRVPFKCAPGAVLSSKCEAKLVVRKNRVILLQSVEVPESETAPAEDYLGVDLGIVNIATDSDGETFSGAHTNGLRRRHNRLRARLQRKGTQSARRFLRLRSGRESRFARCINHRISKRLVAKAHGSGRGIALEDLRGIRTRIKARKAQRGVLHSWAFAQLRGFIEYKARLSGVPVATVNPRNTSRTCPRCGHISKRNRPTRDLFKCVGCGLAGPADHIAAENIGRAAGNRPYAVAAQC

SEQ ID NO: 36593 - protein, 350 aa, unknown
  TnpB Polypeptide
MLLSKKTSIKVSREYANLIGHMCYAASKLWNVCNYERQHYKETGMEQYPDWYYQKKAHKEDLWYKQLPSQTAQEVCRLLDKAWKSFYALKRSGGIETPRPPRFKQESIPITYMQMGIVHERDTDRVRLSLPKTLKKYMEETYQIHENFLYLENKIFRGMDQIKQLRIYPPEKGSCKIIVVYEVPDQEELPQNGHELSIDLGLHNLMTCYDSENGKTFILGRKYLELERYFHKKIARVQAQWYGQQSGKGVKHPVTSKHIRKLYKRKQDSVTDYLHKITRYLAEYCREQEITCVVTGDIRNIRREKDLGHRTNQKFHSLPYNRIYIMLEYKLKRYGIRFIKQPANKKSRLN

SEQ ID NO: 36594 - protein, 235 aa, Lachnospiraceae sp.
MKQTLTAKLKILPDQEDRQLLIDTMHAYTAACDFVSSHVFLFHDLSLSSLNRELYRAIRGRFGLRAQMAQSVLRTVVARYKAVLSGQHHWIRIRFNKPQMDLVWNRDYSLNRDRTLFSVGTLQGRIKVPFFAKGVDIDGRFGTAKLVYKHGRFFLHVPVTKELDEISAADVTNVVGIDRGIRFLAAAYDSEGRSTFFSGSAVKQKRAHYKALRITASARHSLRTTPRAPSSSWRI

SEQ ID NO: 36595 - protein, 494 aa, Streptomyces sp.
VTVVRSFRLHSSANEGKRAQVAALLPRWQAGLGRAQSEAVAIFFTTGKLPRWIDAKTWGGGLSQRQWDSVVAQAIAAHRSWLGSCENEFRRIVARSALSAACKRDLFYLNKAHAWHAPATGERVAISGKSSIPEEVLRLARRIFKQARTRVRHPDLRRARTMVMDGKIAAVETSEREHADYWVRISTLRAGKPVWIPLHAHRAFLERLATPDARLASHCQVRVAEDGTVTYRLAVHTPVARPREGGRTVGVDWGLSTLLATSDGHLRGRGFLARLRAYDDRLQPLAAALQRNGIKLGNSRRYRALVNDIREFVTNETNRCLNRIAADPAISTLAVERLDLRGMVRQGQLSRRMRRLITVAGRGAVRAKLDSLREDTGLSTVEVNPAHTSRECDGCGYTHPGNRRTQDIFRCRFCGKTVHADIGGARTILGRSRLERHWLDRPRGHILTALDNGFQARWGLRFADVVQRRNTMVPRVAPAPAASAAEANAHPRVA

SEQ ID NO: 36596 - protein, 321 aa, Pseudobacteriovorax sp.
LIQLDRAFRRFFKKQADFPKPKKKGKREAGIRFPTLKEGAIEYDKHSRRKAWVTLPKIGRLRFVSSRPFSGKVKNVTLTKQGMDFFVSFGIDQDLKVVGNTSGSAVGIDRGVVHTLAISNGEFLDMPTERIKLLEDKIAKLQARLAKKKKFSANWMKQNKKINRVHHRITNIRKDFLWKSAHNLTKNHGMIGIEDLGIQRMTKSAKGSIDNPGRKVAQKSGLNRAILRQGWYDFSVKLKWQAEKHDARIIEVAPHNTSIICSACSHKSSANRIFQELFRCVECRYEDNADTNAARNILERAAGATVHNALMDLGLDKNPPL

SEQ ID NO: 36597 - protein, 332 aa, unknown
  TnpB Polypeptide
MTTNSPQAPSFRAGSRTLSLVLDIGSDDVERRAATGRGEIGGRPQDPVPVAPLSTVSTQRPPRIGWVKLRGWRDLPGAQRSLTVSRKAGRWFVSVLCRIEAQDPQASTLPAIGIDRGVATAIATSDGRLLAGPNAYAAAQDRLAFLQRALARKMKGSSNGRKLKKKIAALHARVAAIRLDWLHKASTTIAKNHGAVVLEDLRTRAMSESAKGSVKAPGSNVAAKSGLNRSILDQGWGIFQTLLDYKLAGRTLSGALALVNPACTSQTCSCRRHKAADNRLRQDLFSCVACGHTEHADINAAKNILRQGMPSTPVEGGGCAPGEAGTILEIAA

SEQ ID NO: 36598 - protein, 571 aa, unknown
  TnpB Polypeptide
VRTLAPVGVAAPPLGARIRTRLRLNADDEQVLRAVGQYLGRLAGQDLARRCRLGQGPDQRTDRKRALTAPSSSRWAGAVTRTSGDQWARAYANLLEARTGLRRAVKRLRARLAVPVGQARGRGRSRVRGYESQAERFEKQRRLQHLRSRLGEVEGRLAAGRVSVCRGGRRLAKLRQAVAGDGGGGGGGGGGGGGGGGGGKDGRTTQVTEAQWRERWEAGRLFLTADGEADKAWGNETIRIHPDEQWLELRLPGPLAHLSNTPGRAATYRLSCPVVFTHRRHEWAAQAASGAVRYDLRFDPAKRRWYAAASWRLPARQVPSLEGLRQDRAVAVDLNAGHLDAWVLDPSGNPVGEPATVALDLDGLPASTRDGRLRAAVAAIIRLARAGGCRSVMVEDLDFADARQTGRETLGRGARGKAFRRTVAGMPTRAFRDLLVGMAANADLWVVAVDPAWTSKWGGRYWQAPLTESTKTSVTVSRHHAAAVVIGRRGLGLGARRRPGVTRPHQRMGKGELPARLGGRAVGCEGPGPPGGQRAAARPRKTHPAERIGLGDQAVQDRLGPPGQDPLLLTQ

SEQ ID NO: 36599 - protein, 241 aa, Okeania sp.
LHKRLVAEVKSVNPWYYEVSKCAPQQALRDLDRAFKNFFTVPGRGFPKFKKKGKKDSFYLEGSIKILKGNYIKLPRIGIVKTYEILPSVPVKNVRISKRAGDWYISFKYDECQPKPLTKKRAIIGVDVGINALATCSDGTTYPNVKAYKQAKKRLTRYQRRVQKKEPGSKNRAKAIKKLAKTHKKIADIRADALQKLTTWLAKNHSTIVIEDLNVSGMLKKRCDPATTSARLRNAHQDIIN

SEQ ID NO: 36600 - protein, 404 aa, unknown
  TnpB Polypeptide
MQLVYKFDINHSDRLCAICRVTNNLYNQALYIVRNELKDNDRWLFYPDLDRIMKNVTNLEGTINYRLVKSHVAQQTLRVLDKAMKGYVKAVKDWAKNPGKYNGKPELPCYHKRGGMSNAIYTNQSCKIHDGYIILDRDLKIPVPQWEKYNDRIERFKQVRIIPKRTYMTVEVVYDCGYSDNIGTGMASIDLGVNNLATLVCGCNALLFSGKVVKSYNRWFNKTLSMLQSIKDRQGIDKLTNRMRKMYDKRERFMNDAMHKTSRRIVDYLVSHHIGTLAVGYNKGWKQSVNMGGVNNQKFTFIPFARLRSCLRYKCELAGISYIEHEESYTSKCDALSMEDICKHDIYLGKRVKRGLFKSAVGKVINADVNGALNIGRKVFGDSFMIADSGRWYRPERINVLKCV

SEQ ID NO: 36601 - protein, 396 aa, Cyanobacteria sp.
MLVLEFKAYGKALQFNAIDEAIRITQFIRNKALRLWMDGKAKSCFDLNKYCAVLAKEFDFANKLNSMARQSAAERVWSAITRFYDNCKKQIPGKKGFPQFQKDCRSVEYKTSGWRLADDRKSITFTDKCGIGKLRLKGTRDLHFYQPSQVKRVRLVRSADGYYVQFCVSVDRSESVEPSGTAIGLDVGLNDFYTDSNNQTVDNPRFLRKGERRLKMAQKRVSKRVKGSNNRRKARQVLGKRHLKISRQRKDHAVKLARCVITSNDVVAYEDLRIKNMVRNHCLAKSINDASWYQFRVWLEYFGKVFGKITIAVPAAGTSQECPKCHAIVKKSLSTRTHACQCGCVLPRDYASAQIILRRGLSTVGHTGTFGLEPSNAWGEDTSTHTGATLLEQVTS

SEQ ID NO: 36602 - protein, 552 aa, unknown
  TnpB Polypeptide
MAKTPQCSPRRLTLGNEPLNIVELRRPWSFEPSPLLFILPGEPRRSVIRDKWSEHHDAVRQYGCRHRVVHDISIAPRHVTRRVKDQGVAPPPTTAPISHTGQVLSRAVTFQFALDPNLEQRILFAKCAGARRYTVNHHLARVKSNLDNRSTEREILSDCGDPCEPTTPSLSWTAFSFINEFNAWKNGQSDDSLVSEVGTRGLAWRHELPNDVFECASVDAARSLENFSASRRGERCGTPVGFPRFQAKGKVTPSFRVRNRATSAQVSSSQPVRFTDPTHLRLPKIGPVKLCGPTRKVRRMIDAGRFHVYSATLTQRAGRWSVSLTGVAAEIHPAERSRTNRHVVPVGVDRGIISLCVAADANGVPIESFEGVKTLKHAHASLKAANQALARTTPGSKGRQRARARLAKRHRKVANTRRHLVHQASKALIERCQVLVIEDLNVAGMVRNRHLARAISDAAMGELFCQLLYKARWHGVEVRVADRFFPSSKTCSGCGEVKIDLDLSTRTYSCGSCGLVIERDLNAAINLARWQPREPTAVTVLDPTRVPLRSSA

SEQ ID NO: 36603 - protein, 370 aa, Lactobacillus sp.
MMKKHLDELCDYRRYCWNQGLALWNDMYYESLIMDNKKLRPSERKVRNILVAEKVDWQYALSARCLQLAISDLGKAWKNFFDKAQPDWGKPRFKSKKAPRQGFKTDRAKIINGKLRLDKPHGVNDWADIKMVGAKSLKGDLKVVSVFRENGKYWASLPLEVEIAKKSKTGKKTAVDINVGHFNYTEGKVNTLPDHLKKLYKRIMHYQRQLARKRTVNGKKATQSNNYAKTRAKLQRDYRRVANIQHDIIQKFTIKLVTDYDKVVIEDLAVKQMQMSHVASKGLQRSLFGYFRQALTYKCQWYGKELRLADQFYPSTQRCSQCGFIKTGTDKVGLDGNKLHHTKHNEYICYECGAVMDRDENAVQNLLALA

SEQ ID NO: 36604 - protein, 473 aa, Lactobacillus sp.
MLKLPKTTEYVRTRRYHLVVTAELTEKHMCNLAVENELHNYALKFLERTYGYKHLGRTFPTTRTGKNYIIKDEILPRFLKEYYNLKRWNAKKIGLHSQAAYQFLVTMLTNFGEYRKVLKKASMMTEQEKEDYRNNKHGNNPKHRSWYRKGSLTFLRNEASHKTVSLPDNGQIEVLSPHWIKLQDYGVVQVLEDIRNLKNQKVVTSKIKRKGDDTFELQLVLKSTVERVKPARKAGADWNMKDEKIFHTSNDERIYLPLRTSALADKYESIINGLKSRRDILSAHLNKRCRRLADLNQQIRYYNVRRTNLLTEAYRKIAKQLFDDYDLLAIEQLDAKEMRREAKALSKAGNHGKNRHLAKVKPYELAQLLTQVANCEGKTLLKVDSYKTSQVEYGTDYVQKHEVVERHWRSELTGKEIIRDLNASWNILSWALDPKKHYKYRERQQEIKDAKKKGVAKTRLPKAIKPEYLVEIN

SEQ ID NO: 36605 - protein, 421 aa, Bacteroidales sp.
MNKVLGVPHAIILRLYPNRAQAASLRQWTGGLRFAWNKTLTWCNDQRTTTGKWPRQSAIQSFIVRLKKEKETEWLSKIPSHSLLSLAADLDRAFSNWFSSLSGKRKGPKIKKPKFRSKYAKQHSVYMVNQATQFEDKAVKLPKLGRIKWRGGDLPEGKLLSSRVYQEARKWYMASVFDCDKPKVTVAAIEMVGIDMGLSRLATVYDGKRFFYVDNPKALQLHETRLKRYQRRMSRRVKGSHRRYRAGIAVAKQHQKIANTRKDNAHKATSIIVENAQIIKVETLNIKGMMQNRHIAKSVADAGMGMFINMLAYKADRANRTFIKADRWFASSKTCSVCGKIHDMPLHKRWFSCDCGNEIDRDENAAVNLFAYREELGNVTLSELKRAGRWEVQNVVERPSSVPIDELRILKWSGSVTAGLK

SEQ ID NO: 36606 - protein, 424 aa, unknown
  TnpB Polypeptide
MAQEQTLVKTLDFQLNIQSNNECLLCDACLEARQVYNETIRLAKQGVDWNEIADRVADGIDLVKNTTQRIVAKALDAMENYHEYDDFGLPSHTKDGTYPLRANYKEGYNLSLTDEGDVTFRISAKPYKHVKGVLKGSDAHLDILKTALRSDEWKIGTAEALFRNGNAELHVNLTNTEQTVLDKKGSQTVVGVDVNEDNVALAALSGDDVEDTVVIEYPEIKFERHRYFTIRKRVQNARKSSMHDTLQGREERFVRDRLHKVSRHIVNWCRQFEKPCIVFEDLKEMRDGIDYGTRMNRRLHHLPFRALQFYTSYKASFEGIPTAWTNPEYTSQQCPMCGHTERANRNKKRFKCRDCGHQDHSDRGASVNIAVKGIKGLDWNVPALNSLPTVRTVRRQASGAVDAPTVTHDTVQGYQTDGVSGVSD

SEQ ID NO: 36607 - protein, 392 aa, unknown
  TnpB Polypeptide
MVLAFRYRLLPTKAQHRALERILESQRQLYNAALEERIGAYRKAGKTITYFDQSRSLTELRRDDAEFSGIPVSLQRATLKRLDEAYRSFFRRVKAGGKPGFPRFRGKGWFDSFGFHEFSGIALDNQRLRFKGMPGRLRIHWHRELPGSSIKSCIFKREGNGWCIAFAVEVAPAAPRKTRRAVGVDLGISTFAALSDGGFIPSLRAARKAERRLRIAQRALSRKKRGSNRRRKTRADVARCHAAIARQRREHLHQASARLIRDYDAIAVEKLQVKGLARSALAKDVHDASWAKFLSMLRYKAEWAGARVIEVDPQHTSQDCSRCGTRVPKALAARHHDCPICGLSINRDLNAARNILNRAGVGPGLPNVADCGMRAGENLRLTYASSIALSSN

SEQ ID NO: 36608 - protein, 317 aa, Proteus sp.
LERAYKNFFQKRTAFPRFKKRGKNDAFRYPQGVKLGQSNSRISLPKLGWMRYRNSREVVGEVRNVTVSQSCGKWYVSIQTEYEATEPQHESTSIVGLDAGVTKLATLSDGTVYPPVSSFKVNQRKLARLQQKLSRKIKFSANWQKQKRKIQRLHTHIANIRKDSLHKVTSEISKNHAMIVIEDLKVSNMSKSAKGTTERHGRNVKAKSGLNRSILEQGWYEMRRQLEYKQLWRGGQVLAIPPAYTSQKCACCGHTAKENRQSQSQFECLECGYTANADINGARNILAAGHAVLACGGKVQSDRPSKQEPAELIQTSV

SEQ ID NO: 36609 - protein, 337 aa, unknown
  TnpB Polypeptide
MLIRNDRYHVEPVSKNEGYIVLEDFDLRIRYAGRIRWEGKQGRLEIIYVNGRWFAHLPIEVGVDPPKSNLKGYVKPLYDNEEKKKKQRITNPKSTRLRDPIGYKEAFIDMGLNNLFAVVATDGSVMLIKGGSIKSEYYWWKREIATYQSVRDMLRRLGVSTWIYYHEKYLDAMYKRDEKLRHLYITAIRFLADELYRRGVRKLYIGYPIVLSQNNGNEYNTNIWWFRKIVLWIVDIFMEYGIEVEIFPEDYTSKECSICGIRHKNGRIYRGLYICSKTGKKINSDINAALDIARRLGYRIKIAKKIESYHVTHNGVKPINPHQRANTRDPSDRSPAH

SEQ ID NO: 36610 - protein, 410 aa, unknown
  TnpB Polypeptide
MEVQSNFWRKTYTPKDLTYKLSLAFSLASAIHKAGREQVNVARKIRVYPSEPQKVDRQISVCRRAYNLCVATYREWVKGDSPIDFSDLRRNVREKVRQEAIENGWEICITSLDEACQEVKRANQAVIRKRLVGQKAELQFRKKTTTKQGFIYQKLSSMGLPKVLGDLHLTEELPDESIGKQARLLREWGRYFLVTKKLVLTAEPKIQGNAVGIDPGVRTFATTYSPEQANKLGESFQLNKLQPLGIQLDKLYSERARLFNRWSKLPDQLRHDLLRSIEKKVNKLKQRRNDLVEDLHKRICYWLVTTYDFLFLPTFEVKQMTNKEKRKIGSKVVRSMMDLCHYKFKQMLTWMCQKYGKTLVIVNEAYTTQTQSWDGKRQKLGSEKTISDGSIKMDRDINAARGIFLRAITR

SEQ ID NO: 36611 - protein, 454 aa, unknown
  TnpB Polypeptide
MDYAILEFLSIFAHKFMHHMIQLVKRFHIRPISEVIELCKLSNNLYNQSLYEMRKRGEEEGVWMFHRQLREHMYGVTNLEGEINFKLLRRDIADYVVKQVSDNVKGFFKAIKKWKAHPEEFKAKPEFPKFHKRGGMNVVQVRYNHDCKISDTGVISFGCMPEVCISIPQWGKYKAKILAGCKMVRILPEKNFMTIEVVYNVELAAPDAGTNNVAAIDFGIDNLATVVTPNGCYIFSGKVLKSYNQYFNKELARYSSIKAKQGIEKGTKRMTAMYDKRNRYIDTFMHTVSKAIVDMLIEQKVGKLVVGRNKGWKQEVNIGKTNNQKFVQIPFYSLQSKLQYKCEMAGIEYVEQEESHTSKCDALAMEEIGHHEHYAGVRKKRGLFQSSTGRYINADQNGALNILRKNIGDKEYKEKTKDWQMNSPVRIKHPQMRNEICNPSNGQQIQRRSSVSSQ

SEQ ID NO: 36612 - protein, 407 aa, unknown
  TnpB Polypeptide
VTKTIKLKLLVDKKQAQQLLAVSMLYRDVCQYVSDWIFEHDFVLNFMTLQKEIYHDIRAKYPLNSQMVISALKTTTARYKTTKEQLAQKPYRYQDENGKWVEIKRTLEWLQKPVHFRVPQCDQVRNRNYRFLKDGRIALSTLDGPIKVAYQASPAWKEHLNDGWTIGTAKIIRQKKCWYICIPMKKDLPEVEDSSIKTIVGIDRGLNFIIAAADSKGKSTFQSGRAIMHKRHHFAELRKRLQLHNTQGSKRKIRAIGQRENRWMADVNHRISKALVDQYGKGTLFVLEDLTGVSFSEENLRRRKQQKQDLRSWAFYQLEQFLSYKAECAGAKVIKVSPRYTSQRCPRCGIIEKKHRHHDTHEYRCTCGYRTNDDRVGALNLLELGRRYLAGDQHPRYSKSKKVAIDK

SEQ ID NO: 36613 - protein, 503 aa, unknown
  TnpB Polypeptide
MSSFTLELEISFSKKLLTAYKSDPKLEAGSIRTLEKKLDTAIVIRNTAKGEALKRLHKLQHDRTYQQLQKEYATRKKKDPKADVSDLSPKYRECMNFYGYTEYALQSYVIQAKHQYHDILGADECQKLATQAFRAVDGIRTKESKKVRFLQRTSDSSVEGKSGKSTLKYIGDCCIQFGKGNIYPLVIKKKDHYAQEALTHKVKYVRLIRKTIRRKRRYFAQLILEGTPPKTKHLKYGKRDQRVGLDEGTSTIAIVTQNEVSLKELAPEVTTDEKELRRLNRAIDRSKRAMNPDNYHEDGTVKKGRHQWIKSKHCLILEARRKELYRRAAQKRQRSHNQLANHIVSLGTDVRVEEMRMKALAKRSSKTTKNKKNGRIRSKKRYGKVISNRAPATLIATIDRKLRYIGFSIQKVDTAKVRASQYDHISNTYKKKQLSDRWHIFPDGTRVQRDMYSGFLVFCTAEDLKHIDRDLCIRNYQKFKRLHDQEVERLRKENKKALRWYIA

SEQ ID NO: 36614 - protein, 222 aa, Armatimonadia sp.
VNRNCLKIRLYPDRAQKHTLEATLETCRRVYNSMINDRKFQYDTVQVSVGYFAQKAYLPAWKKAHPELKLVYSQVLQDVVHRVELAFKAFFDRVKKGETPGFPRLKGAGQYDSITFTQNDSFKVGDSTIRLAKIGQIKAKIHRKPWGELKTCTVLRINNKWFACLCQEIEAEHLPPSEEAIGIDVGLKTFAAFSNGEFIENPRFFRKEEKALAKAQRKLAKQ

SEQ ID NO: 36615 - protein, 584 aa, Streptomyces sp.
MGGVRGLAAPFVVPGPSGVAVRDRLKHLTAEDERVLRAVGEHQGTLASRDLKVRCAQGLQHSADTWAVRKRELTKVSSSRIAGTITKASHDQWALARRGQAAHTRSLEDGIRTLKHRLSLPIRAKGTKRAAGGYRSKGEWFRKSRRLKDLEARHTAAVADWRTGRVRVVRGGKRLLNTRHHLAAAGLTEERWRERWEAERWFLAADGESGKRFGNETIRVTPDGRVSIKLPAPLAHLANTRHGRYTLASTVAFAHRGTEWADRIQSNRAVAYRIHLNTARGRWYLTASWQRPLVQTVPWEAARAGGVIGVDTNADHFAAYHLDQHGNPVGEPHRFPYDLSGTAHHRDAQIRHALTRLLHWAQQTGVTGIGIEDLDFTAEKTREKHGRRKKFRQLISGIPTAKLKARLVSMAAEQGLVVIAVDPAYTSKWGGQHWQKPLTTPRRKMSRHDAAGIAIGRRALGHPIRRRTAPPPHDRRDRAGHRTAQAAPGAQEREGSRPPATDHAPGGVPPSGTRKRQPSAPKTVRDAPRTHQWVQHPLLDTGQERSPPRDLKRGFPYLRAQVTPGQARRLPPGRLQFGICRRSL

SEQ ID NO: 36616 - protein, 362 aa, unknown
  TnpB Polypeptide
MITRELKLKLNTKQEESLNEWLFILTGVYNWAIRKIELNARDKIYFSRFDFKGALPSLSKKIKIPSHTINGILDRAYLAWKHCFKKIHGKPKLKSVRNKLNSIPFPDIIPANRVTKGTIRIPILGKVRYHKQEIPEGKIKNARILKRSSGWYLQLIIDVVHEFPVQATDKKVGIDTGFKYLAVLSDGTKIGNQRNFVKTQKRLAQAQRGGRKKLTARLHERTKNRRKDYNHKVSRKIVENYSEIYITNDNLAGQAKLFGKSVGDAGISQLRQFILYKSDVHGRKCALVDSRHTTMTCSNCGVLTGPTGLGGLAVRNWECGACGAQHDRDINAAKVILNSGLGYSLDNVGTHAFGPETSKLES

SEQ ID NO: 36617 - protein, 406 aa, unknown
  TnpB Polypeptide
LRNKSYKNTIDSNTAQKLGLRVWKGVESCLFGKGKKVHFKKFNTLDSIEGKTNKSGIRFDKDTLVMTFYGMVIPVKIRKNDYYAKEALTNDISYCRIIRRPFENGYKYFVQIVFRGVPPIKPNRIPGVKKGNVAFDIGPTTVAAIGDDDGLLEPLCPKTVKECNKEIIKLSRQLERIRRLANPQNYNKNGTIKKGPRLWIKTKNYYKVLFRLKNMYRLKTLYLREYQAVLAKRIMALGDNFATETINFTSWQVKSKKSTEKTDKIMEKKDKNGNVKKHNKCKSKRNKGRSLNNNSPGRFVEEFGRKLECFNFQLEEINTKEMKASQYNHDTDTCVKIPLSQRCKIIDGRWVQRDLYSAYVVQNRKDSESVDRDKCIKGFDNFIEIQTRIIKNLKERGDDLPKCMGI

SEQ ID NO: 36618 - protein, 528 aa, Kribbella sp.
LPGESTPAGRTRKRRGNGRLWTLARRTSRVSAVRRSSLSPSTPVASARRATRGIAPAAGKMTRTGCMARFEIPEGWNVQAFQFALDCTPDQAACLRRQFGGRRRARNWAVGTLMADLARYRETGEDTEKPSLAGLRKRWNRVKDSECIDTETGQVWWPEISKEAFADGIRAAVDAYWNWQTSRAGKRAGRRVGFPRFAKKGRDRDRVTFTTGAIRVEPDRRHVTLPRIGTVRVHENTRRLERLIAKGKARILAATVSRKGTRLVVSFRVLIQRPQQPTVKDLASRVGVDVGVRVLATVANGRGEVIERVSNPRPLEAALKDLRRLGRERSRRTPGSRGYIETQTRITRLQCRVADIRARHIHRLTTRLAKTHGTIVVEGLDTAGMLRQKGLTGARARRRGLSDSALGEPRRQLGYKTGWYGSNLVIADRWFPSSKTCHACRHVQDVGWAEHWTCGQCHADHQRDENAAINLARYETPTAADSAVGPVRAAVKRGADRKTEPRSAGGNEARKEPKRKARDQPRDGAPVG

SEQ ID NO: 36619 - protein, 386 aa, unknown
  TnpB Polypeptide
MKQERTIKLKIGQSDDLDLLCTKFLSACNWLSDIVFSTKETNSIKLHRKHYATIRKRFGLPSQLTCSSFRHVTAAFLSQRSQRRWHPVKFRREVIPVVWERDFSFSKTKGLCFWGKPIKIEDKRIPPVDTWQDSKLQKKGGCWHLILCHKVAIPEPKTEGCIVGVDSGIKRIFTATNSANSRTFTFSGGELNHRRRNIRKVKARVQSKGTRSSKRLLQRMSGNEAKVTTHLMHIASKRLVQYSETVGARRIVMEKLSNIREASLAKGKEMRDRINRWPYAQGQFFVQYKAEAKGISFELVSPKNTSRGCPRCGHIDSRNRNGLKFRCPLCGYRGDADRVASINIRNRSVVTRHNLVTEGSCNTPEGSGTPEIVSRDVVHNTSSVTV

SEQ ID NO: 36620 - protein, 486 aa, unknown
  TnpB Polypeptide
VIGGRQSFAVPEGWVARGFRFEVQPTTTTQWALIRQHFGARRFAYNWALAQVKANLDARAADPSVASLAWNLPVLRKQWNQAKQQVAPWWRDCSKEAYACGIADLVAALHNWSDAKHGRRSGAPVGFPRFKARRRDRGRVRFTTGAMRLEADRRHLVLPVIGRLRCKENTRRLERLQVKGRARVLSMTLSEQGGRLFVSVATIVCQTPRTPAEPDARCGIDLGIGQQWAVIAHHDDTIQRIAHPAPWAAVAQQRRRVARQRSRRIVGSRGYRQANAKLAALDRRAANLRTNQLHILTTSLARRYGTIVVEDLDVAAMGRSMGWRAFRRTLFQAGIGRVRPMLAYKTSWEGGRLLVADRWLASSKTHHGCGGYLADLQLRQRVWHCPSCGGLVDRNANAARNLRDWTGPVAVAVNGDPDVQRGGVAAPVPCVGDHGGQAHASRGRARPQKTTLVVAGADDTRTKPQQHRGEEPRTGVPVSTQVAVAY

SEQ ID NO: 36621 - protein, 388 aa, unknown
  TnpB Polypeptide
MRVRAYRFRAYSSKTTARVLKTKLEAACRLYNTLLHAEQEEYKRNRHSMSKNELRQLALHLRKKNPELQILHSQVARQVAERLYQARQRFLDGFANKPKVKKPHRFLSLVYPQGGWRLSNTREVGLGKNKKKRRARLYLSKIGFSTLILHRVFPENRVCQVCVKLEPSGRIYVVFLVEESEVGERSSEEPKRAVGVDLGVTRLATLSDGRFLENPRPLERSLERIRVLQRTLSRKKFLSGNWLKAKRRLAKEHEHVGDFRRDLFFKIGVLLALEYDVLVLEDLNVQGLIQRGVTKKRRRLRLHDSSFSELRRILEWEFLKRGKLVLPVPAYNTSRECFLCGGINRNLTLEDRVFHCAHCGFTVDRDLNASLVLLKCAGWVPPFWCACG

SEQ ID NO: 36622 - protein, 404 aa, unknown
  TnpB Polypeptide
MKIVERHIIKKSDKRWKSLDNICFLSKNLYNSALYYIRKHKEETGKFIRYNDLEREFKLNDQPDYRNLPISSSQQTLMLIDKSLISYFKLLSKWKKDKKSLNGCPQFPHYKDKITGRFPVIFTISQAKLKNEYIHFPKKSLIEPIKTNVESLKQVRIIPQSSCYVIEIVYEKQEKEKIINDNYLSIDLGLNNLMTCYDTKNNKSLIINGKPVKSINQYYNKKKTKIQSKLIKNHNKYSSNRLNNLTLKRNNKITDYLHKSSRFIVNYCVNNQISNLVVGYNKEWKQEINIGKRHNQNFVNIPHGSLLNMLEYKCKLDGINFIQNEESYTSKCSALDLESLSKHENYVGKRVKRGLFVSSKGIKINADLNGALNILRKVAPDKGKEIIQTKRCRGQAIWPSKINL

SEQ ID NO: 36623 - protein, 376 aa, Methanobrevibacter sp.
MLVNKSLKVRIYPNNWQEEMFKKNFGSCRFIHNQILDRLNYLHQNYKGQYKLNYKLTNTFLKQLKEENNFLNEIESTSLQQTTRDLVKSFINFFKNPKNRKPKFHTKKNTKDSFRQSIRKDKPPVMGKYLHLRKYGKIRYRTSKKYTNTLNSTNIKINNITISQENGKYYASINIECEQEEMKYTGKNIAFDINSNKNSWLVSNNGQKEKFNIDHENQMIKYLNQQLSLKKPNSRAYKKIQKRLWKYYNKRTNKLNDYTQKLSTKIVKKYDNAVFEKNPQNIKILIGGEQNMVFPLIKFINMLKYKFKWYKKESEGVVYVNPKNTSKTCHKCGHIHQELKVKTRKWKCPECKTVLDRDVNAAINILNRWDNGAGLV

SEQ ID NO: 36624 - protein, 387 aa, unknown
  TnpB Polypeptide
MDRTLRLSLSPTTEQAESLLETMRQFTHSFNAVCAQGWRLKEGNAYTLHKLTYRNCKSLCPELVSDLHVQARQKAAEAVKSALALARKGKKVSKPQSTLCPPRYNVNSFSVDWQKGVVNLATVAGRQKVAFSVPAYALALVGNRVSTADLVYRPAGRGTNRKGRFTLHVVLKLGDVEFADNGQCLGVDLGVTRPAVTSDGRLHGKKRWREVSKRRFRLKRKLQSNGSKSAKRHLRTLAGRETRFRRDCDHVLSKRILDGITVGTTVVVENLTNIRQRVKATRGEAKRRLHSWSFAQLRWFLDYKAEALGCRVVGVDPRHTSQRCATCGHIYRGNRPSQSRFVCRSCGHRANADINAARSIRDKYLVGWSSPSDAAPSEVASSQPLLA

SEQ ID NO: 36625 - protein, 403 aa, unknown
  TnpB Polypeptide
MDKQILKKTYKYRLYPTQSQQSILEKHLSLCRWLYNHFLTERRDTFQKDRTRISCYGQIKKIPVLKQEKSELKDVYSQTLQDVVRRLDKAFQNFFRRIKENKNSKKQKPSYPRFKGYFRYDSLIYPQSGFELKVKENKLNLSKIGFLKIEYHREIEGNIKTLTIRRTNTNKWYACFSTEIHKELPEKKEIKQVIGIDVGLDSFLTTNQGEKVNNPRYLVQSEEKLAQIQRWHSRKKLKSLNRQKSRLKVARLHEKVASQRLDFLHKLSHKLVSNFQLIAFEKLNIKGMMKNRYLARSIADVSWSRFLQMLIYKAAEAGIWAVEINPKNTSQVCSGCRKVVKKTLATKTHKCPQCGLVINRDINAARNILQLALNTVGTTGINACGVGRLLPTMKQEAIGFNRW

SEQ ID NO: 36626 - protein, 480 aa, unknown
  TnpB Polypeptide
  misc_feature (273)..(279): Xaa can be any naturally occurring amino acid
LGSAVCDQEYVARGFAPLNAWARLQLELCGDPCGSGGRWAQAVRVKRVDTLRLLVTPELEDFLRRVGDAAARLVNMENFRRRKLFFDTGKIDCSWKSAWEQRKTEYFDIYKLLGSANFHETCRLISDQWKSFVGLLKAAREGRLEPWQKPKPPGYRKDKDGQRVPIIVVRFDNYRIDLERKVIRLGYWNVSIPFTGKPRWLTKPGAKLERLIIQYDPVKKRWYARVSVEVTLERKLDNGLKAGIDLGRERLIAFVTEPVNGSGEGVALLYRGXXXXXXXLYRGGPLKSDYFYFEKKIAEIDRMLSDPKLEEIGRSVLKEERRRLYEKRRRRGDQVFANSAAHLARLCLELDVSAVFIGGLRGLAHDKPGKGNTNMWSYQKLKMRLATTFENHGIAAFEIPEDNTSKVCARHGCEVVRKPRGLVWCPFGHTMHADLNAAMNILARGGGKVPARVRVQSFIPTANKVIPVNEKNSNPAPSAG

SEQ ID NO: 36627 - protein, 398 aa, Haloferax sp.
  misc_feature (70)..(73): Xaa can be any naturally occurring amino acid
MSRTIRTFEATITNQQQVRDDLDQLGWAASKLWNVGRYYTQEQWDETGEIPDDGELKAELKSHERYTDLXXXXRPPGYRKNGDSHPRSTVSFKAAGFKHDAQFTRVRLSKGRNLKEHRSDFILCEYQTRPDVDLTEWDIQQVRAVHKRDKWRLQFVCRTTIDPEPPGDGVAGVDLGVCNFAAVSFGGESVLYPGGALKEDEYYFTKKKAKCDDSSSREATRLDRNRTGRRTHFLHSLSKAIVEQCVERDVGTLVVGDLGGIREDDETGDSRNWGDHGNLDLHGWAFDRFTTLLDYKAEAEGIDVELVSERDTSKSCSVCGHTDKNQRVERGLYVCEECETVANADVNGAENIRQKVLPSLATDGGDRDNGWLAQPAVHLFDRSEGVFAPREQVANREP

SEQ ID NO: 36628 - protein, 427 aa, Bacillus sp.
MLELVNRGYVYRATPISQEVETYLRQCFGADRKMYNLHVAHLYEYLEKTNYQVGDKLPSLKMMDMPTVSEFKKQCVNDNVAYLYLVDAFASNEAKQHFNKAITAFNKIAYKKQYKKSALEREKTLGIKPTFRDLKGMPKFHSRKGSKASYTTFNQNGNIYIKDEVLYLPTAQKSSVKVVGLELNTHRPLPQGSKIKNVTVTMNTKGQFDVSICVEFPMEIASIGVPARILGLDYSQSHFFIDNEGKKANYPQYYREMEERLVKEQRVLSRRIKGSNRWEKQRLVVSRLTSKVANQRKDWLHKKAYALASRYDMIVVEDLDLRVIGQNKYYAKNQQDNGFGNFRLYLKYKLEQRGKYFVKAPKDFASTQLCSTCGYKNTALKGNVDIREWDCPSCGTHHDRDINSAFNLKHYGERYTKEEILPQIVVV

SEQ ID NO: 36629 - protein, 368 aa, unknown
  TnpB Polypeptide
MERAYKFRIYPNQQQRLLLAKTFGCVRFVYNYYLDKRIKLYEESGASINNNECSRDLTVLKQELEWLKEPDKWALQNVLRDLDVSYKNFFRNPSHFGFPKFKSKRDNHKSYRTTFTNDNIAVIGKHIKLPKLGLVKFRDKQILQGRILNATISQDPSGKYFCSLCCTDVFVDKLPNTGSVIGIDLGLKDFLITSNGDKINNPKYLSKSLEKLAKLQRELSRKPSKSNRHEKARIRVARQYEKITNQRRDFLRKLSTQLIRENDIICMEDLQVSNMVKNHKLARAINDVSWSEFRRQLEYKANWYGRKIPVIDRFFPSSQICSCCGYKNSETKNLNVREWVCSECGANHDRDINAAKNILIEGLRLLNC

SEQ ID NO: 36630 - protein, 402 aa, Kribbella sp.
VSRYRLAPTPAQATGLLEHCRHARYVWNLGLEQRLMWRRGRPAAPGYVAQSAQLTEARAAESWLRAGSQTVQQQALRDLDQAWRNFYAGTHGRPTWRREGVHEGFRIVGPAAQRVDKLNRKWGRVLVPKVGWMKFRLTRKLPDAKSYRVTRDRAGRWHIAFAAIPSPIPAPGTGDTVGVDRGVTVSAALSTGELLSCPGLSGRERTRLKQLQRRLARSKRGSNRGAKIRAAVARWKAREADRRKNWVERTTTDLARRFDLIRVEGLKIRDMTRSARGTVERPGRKVRQKAGLNRGILANAWGQLVARLEHKAPGRVEKVNPAYTSQTCNVCGHCAPENRESQAVFRCVACRFEANADVNAAINIARKIVRNVAAGRAVNARGESAVLVSEKREPQHAPPSVA

SEQ ID NO: 36631 - protein, 279 aa, unknown
  TnpB Polypeptide
VKRKIGAVIGIDLGYTELMATSEQELLGTDLGKYFSEIADKRGKNSEGRNRMHALFRSLLKKTGKDNLAKAERIRRQNLGRKKQRARYIRDIGVIKTIVNRELNLLFTRKTNPVRAIVVEDLSARMKAHFGKKWNRRLSDWMRGYLQERIRYKAKKYGIELNEVNPAHSSRECPRCYCTDKKNRHGDAFKCSHCGYHGHADLVATLNILDCLGDKEIRKGMSPSQVKAVLDGRHVGWKSLNHTVTDKTLDEARVVDESLRSASPKSELRSNVQVCTASR

SEQ ID NO: 36632 - protein, 352 aa, Shewanella sp.
MKCTKTLKLRVKDKHNLILDQQSKAVNFVWNYINELSSRAIKERGRFLSAFDIHPYTKGANKELGLHSQTLQCIAKEYVTRRVQFKKARLNWRKSGGAKRSLGWIPINTGAAKWKNGQVFFNGHYYSVWDSYCLSQYQFRTASFNEDAQGRWYFNVVVEVDIQPSSGTASVGIDLGCKEAATASNGHKVVGRQYRKLEQKLGIAQRANNKHRVKAIHAKIRNRRKDDLHKFSRQLVNNNAAIFVGNVNSLAMTKTKLAKSALDAGWGMLKTMLEYKCDHAGVVFEEVNESYTSQTCSCCGDIPASSPKGRAGLRIREWSCSDCGATHDRDINAAKNILAVGHGRLAVGIHLL

SEQ ID NO: 36633 - protein, 408 aa, Methanoculleus sp.
MFPEDYQKQYIPVRSTDTCMLQAYKYRMYPNCEQTAMLMKHIHACRFVYNHSLEQKIRAYEQEGKKLSCYDLNNRLPVLKEEHPWLKEVNSQSLQNANKNLDNAFTRFFREKKGFPRFKSKKNPVQSFQVPQHYTVDFGRRRIKLPKIGEIKTIFHRMFTGKMKYAIVSVTTTRKWFVSILVDDGQPAPDPSPFCLDTTLGIDVGLTDFATLSTGEKIKNPRYLKNSLQRLKVLQQRVSRKVKESKNQQKAIQRLARCHEMIANQRNDFLHNLSNRIVSENQAIAVESLNVAGMQKNHCLAQSIGDASWSTFFTMLEYKCRKYGKTLLAIGRFDPSSKICHQCGHLKRDLTLSDRDWVCPDCGTHHDRDINAAINIKKFALQEQNLVGVAGAERAREPVDPAFSREEG

SEQ ID NO: 36634 - protein, 416 aa, unknown
  TnpB Polypeptide
MYLTVKQQLKHLTSDEYEILRELTRTAKNLMNEYIYINRQYYFDEHKYLGYYKTYHLLKNSDNYKVLSTNIAQQSMLLIDRSFKSFIGLLKLVKKGQYNSKLVNLPGYLPKDGFAPLCIQKFSIRDKTFTLPYSHKYSKTHKKIKIRVPSILDVKNVKFVQIVPKCDAKFFEIQYIYEVTENQRDLDYQKALAIDFGVNNLMTCVTNEGKSFIIDGRKFKSVNQWYNKEIARLSSIKDLQKYKGFTSKQKIITMKRARRVNDYISKACRMVIRYCLENNIGILVCGYNKDFQYKPRMNKETKQNFINIPFGKIREKFEYLCKLYGIEFVEQEESYTSKASFWDKDEMPVYNSEDKTEYIFSGKRVKRGLYRTSSGFKFNADINGALNILRKSNVVSLEGLYSRGDLCTPLRIRVPS

SEQ ID NO: 36635 - protein, 391 aa, Streptomyces sp.
VKADAGRKYRAYPTEVQDQVLVRWGHTARALWNVALEQRVYLWEQRRYTLRSVEQCKFPTAARTDLDWMGDLPAQSGQQVLRSLDRAYDNFWNPSHPAGFPARKKRGHRLSIPLPGQAVEVRKLNRKWAEVRLPKLGWLRFRLSRAIGGTVRNATMSRDGNGWHVSFGVHTGRMPDVPNGKPACGVDFGVAASAFVSTETTPRLMAPSLKAKEKKRLKALEQRKARQITYAKKHNDGKYSRRLRTTDLSVKSMTASAKGAAEAPGKNVRAKAGLNRSVLDNTPGERRRQLEYKARMYGSVLVAVPPFHTSQTCAACGLVDPGSRKGRGRLFACTRCGYEDDADHNASMEIEARARRTGGSDINSTRSIPRMRVPATGRRRMREALQPAHAG

SEQ ID NO: 36636 - protein, 372 aa, unknown
  TnpB Polypeptide
MIRSSKHTLKFANKRKLALLEKIHEDFKQCVILYIDLIVKGELPLKKLMSCKDLHNDVFEYSSWKELSYKTASEIIRSNLKYTKNKTFKRYQKLYTKCKIKDIHQSFLNKKYSELNINYLKRIKIDVKTISINLGYHLWNIKESSSFDSFIRITTPYKKDKRLYQTINVPIKQHKNSLKFKDWTRKNTIQLSKINGNFYVTFFYEKEQAQVKQHGKSIGLDCGYNKLISDSNGFHYGEELKQIYAKLADKKRGSKNYKQLLIHKKNLTNQIVNNIDLGSYNLVVVEDLKNVKYKSKLNTKFKNRLQYWSYKQVLAKLALRSEEEGFYLLSVDPAYTSQTCSSCGVVDKSNGAINIHNRGIYSSSNKESELFR

SEQ ID NO: 36637 - protein, 302 aa, unknown
  TnpB Polypeptide
MLSKTVVSRTYPRTPYAAFDKNGGPLNLDEVMNGVKADAELVAHYALQEMTEQNLALSTYFERLKPSGAGYMMGLHLPTEVKSKFKSGASRLERMFREQVVTNLRSWSARAEVVNQTSTRHVSAGWKRAADASKPESLQPRLALSATDLGYHKNFSVTPERISLDMVVQGQWVTLHFPAPPQLLDAGCEPGVPDIWIDKNNRVVFGFHGKTDPGRPNFSERYVVGVDVGVKNPAAYVVWDTEKKQVVEKSLLGQRARSLNNKIKRTQIQVSSLKRQGRDEEAVSHREHLSNRRRELSIFIAQ

SEQ ID NO: 36638 - protein, 348 aa, unknown
  TnpB Polypeptide
LSEYELTSKLAREKQIDYIALPAQTNQQVVKLLFKNWKSFFKLCKVNNKLNGNPKLPKYKNKIKGRNIVIFTSQQCKLKNGYVCFPKKANIKPIKTKVDNIKQVRIVPKCSCFAIEIVYDKKKQASKLNNDAYLSIDLGLNNLITSYDPLNNKSFIVNGRPLKSINQYYNKRKAFLMSCIGNRGTSKRIRKITLKRECKINDYMHKASHFVIKYCLNNNIGNVVIGNNKDWKQKCNMGKRNNQNFVSIPFENIISMIQYKSEECGINVIITEESYTSKVDHFANEEMCKHEHYLGKRVKRGLFKSSTGKIVNADTNGAIGILRKVADEKFKDLIVSRGDVVSPIRLNV

SEQ ID NO: 36639 - protein, 379 aa, unknown
  TnpB Polypeptide
VLRTASIRLNVTCAEAATLYALRTAYADACNRLVPIVREHRCWNRVGLHHHAYSRLRAETPLGSQMVCNAIYTVCKAYKAQKALGRISKDAVPLVRFDRASVHFDKRTYTLKKDALSLNTLEGRIRVVPSPGEHQQRILNSGRPKEADLVFRKGRWFFNLVVEGEDPKPIESGPVMGVDVGENNLAATSLGKLFGGERLRERRDRYLARRRRLQSNGSQSARQALQQASGKEMRRVKHVNHETSKAIVAQALSAGVATIRLEDLTHIRDRIKAGRRMRTRLHRWAFRQLQQFIEYKAQAVGIAVEYVNPAYTSQDCSRCSGLGRRVRHRFVCEQCGLRAHADLNASRNLARIDETAVSPRAAVDTPDVGEVGKHVYVSP

SEQ ID NO: 36640 - protein, 364 aa, unknown
  TnpB Polypeptide
VAIIPLAQREVAGELDERPSPPGYWGNEDDGRVLRTYVRNDQYTLEYGERSRLEVPIGSDLKDEYGFGYRERLRLEVAGDPKWRGEQGRLELVYDELADAFRAFQPVTVPDSRLDSPLASHEAALDVGANNLVACTVSTGSQLLYDGRDLFEQFRETTEKIAHYQSLLDDQRTSSERIERLYRKRTNRRDHAQDGLVRDLVERLYDEGVSTLYVGDITDVLSTHWSPVVNEKIHNFWAFSRFIDRLDSVCEEYGITVEEESEAWTSQECPECGERKETVRHEDTLTCPCGFEGHADLVASASFLRRQNNAVGSMARPVYLKWTNHEWREDQSPPSIAVETTANEEYTDRSTASSGNIAHGNSDD

SEQ ID NO: 36641 - protein, 371 aa, unknown
  TnpB Polypeptide
VVFNDALAVRRAAHEAGKPYVTDAAMSARLTALKGTPERAWLSEVSSVVLQQALADLNTAYRNFFNSVSGKRKGPHVAPPRFRSRKDSRQAIRFTANARFKVLGNGRLRLPKVGDVEVRWSRPLPAAPSSVTVIRDAAGRFFASFVVAVTPQALPGTDGECGIDLGLGHFAVMDDGTKIAAPRFLRRAEKKLKHAQKVLSRKEKGSRNREKARLKVARAHAEVADARRDFHHKLSTRVICENQAVTVEDLAVRGLARTRLAKSVHDAGWSAFTGMLQYKARLYGRDFRKIGRFEPTSQVCSACGVKDGPKPLSVREWACKQCGTVHDRDVNAARNILAAGRADKSNACGGRVRPLATAAQACEAGSRRGAA

SEQ ID NO: 36642 - protein, 396 aa, Ruminococcus sp.
MESKTYYATTTKRFILRTKHQDWLVETQIFYNEILAFYYNLYLKMSDFHEEGGQRVMRELEKLTIVGRDKQEVLYPLPWCKVPLYFRRAAINAAIAAGKSYLSRDEQQQRTQTFTKSVTFYKGMYRNLNEKSVELKVWSGEMWTWLHCRISGNVFSKGEEQLSPSVVLKEKQAELHVPVKSVVSDGRKAKLRIQDQEKIAAVQFINRDRLAVIAILDAKGNQCAVHFLKGGTVYERQCQKILTAIEKSEKATGYEESHHSNKKYWMKLKHLNEYYSHKFSKDIVEYCNEQQAGILVLPLYSKTYTKYVMNAVGNWSVLHLSGQIREKLKYKAWKSGIIVLETEAAGISSKCAVCGQKIQKNGTEYICKEGHRGSRYLNSAVNLGRKCLKSFEKQAV

SEQ ID NO: 36643 - protein, 412 aa, unknown
  TnpB Polypeptide
MHRVERHIIVKSKEMDRICFLSKNLYNYVNFILRQAHLKKFDQIPEYQHLIKSFKIKDNEYFKIKEFDLEKELAKNKQIDYISLPPQTSQQIIKKLYKNWKSFYGLLRNRSKLNEIPKIPKYKDKGGKNVVIFTNQNARLKEDGYIYFPEKSNLNPIKTNIQKGQLNQVRIVPQSSCYVVEIVYTKEKQELDLNENLYLSIDLGINNLATCVNNADQKSFIINGRIVKSINQYFNKKLAKLYSFTKSKSSKRIKRLCLKRSNKIYDYFHKTSRFIINYCIQNKIKNIIVGYNKEWKQNINIGKVNNQKFVNIPYLKLINQLIYKGEEVGINVILNEESYTSKCDSLALEELKQQENYLGKRIKRGLFQSSVGKLINADINGALNIMRKVVDDSLVKEIINRGLVFNPFVRIQ

SEQ ID NO: 36644 - protein, 303 aa, Paenibacillus sp.
MCYNVNNITKNEVSHMLIHQAYKYRIYPTPEQQQLIRRMFGCCRFVFNTFLDTWNQSYAETGKGLSYHACATKLPVLKAQYNWLKEVDSIALQSAARHVADSFDRFFKKQNQAPRFKSRKHPVQSYTTKFTNGNIAIEGSRLKLPKLGWMRFANSRKLEGRILSATVRQNASGKFFVSLSCEVEKNPLPQVDAHIGIDLGLKEYAVSSNGERYANPRFYRQYEKKLALWQRRMARRTPGGSNWKKAKQHVARIHERIANKRNDFLHQLTTKLIRENQTISIEHLRVANMIQNPKLSKSIADAS

SEQ ID NO: 36645 - protein, 211 aa, Paenibacillus sp.
VRQNASGKFFVSLGCEVEKNPLPQVDAHIGIDLGLKEYAVSSNGERYANPRFYRQYEKKLALWQRRMARRTPGGSNWKKAKQHVARIHERIANKRNDFLHQLTTKLIRENQTISIEHLRVANMIQNPKLSKSIADASWGEWVRQLTYKALWYGRTLRIADTFEPTSQQCHVCGTIHPEVKNLAVREWTCNACGTLHDRDENAAHNIAQVAV

SEQ ID NO: 36646 - protein, 426 aa, Natronococcus sp.
MNYNYRYRLRPSDALEQQLAWTVDTCRQVYNHFLHRLNRTDDTSVYSEQKLLPSLKKRWNDLKSVHSKVLQKVVQRLYDNLSTLRGRKENGYRVGTLKWKAPGEYRSFTYSQSGFKLKNTGGRTRLWLSKIGDIPLTFHRHLPDDTEIKTVTVKHEPTGKWYAILGVETPDDPPEKPENPEKCVGIDVGILKYAHDTDGTAVESLNLSDERDRLERAQRDLSRKQHGSANWEKQRRVVAERHADLKRKRRDFLHKLSNHYAREYDFVAVEDLDAKGLVELPGNSRNRAGAAWGTFLRMLEYKCEREGTHFVAVNPRGTTKECASCGVSTDKPLWVREHSCPACGFEADRDANAAWNILSRGIKKRLGAGRSESMSSESPCDSDVRTRAPLSSTPVETALPVDTSVSAKRVVETGSPTLKREPSGER

SEQ ID NO: 36647 - protein, 385 aa, unknown
  TnpB Polypeptide
MQIYRGYKFRLYPNEEQKILINQNIGSSRYVYNYFLSRKNNYYQECKGNLSLKDLKSELVQLKKEQLFLKTCDSMVLTNSLEDLDTAFTNFYNKRSSLPVFKKKGIHDKYKTDCIRSSYKNNNYANILLDLKNKTISLPKIGKVKIRGYRDLKKDLYIINATISKVGNKYYVSLCCKETTVEKEFVLRNAIGIDVGVSSLITTSDEIKYPKLKVERIEKHIEVLQEKLSRCIKKSKNYEKIKNKIARLYQKIKNMRKFYLHQITNEIVEANDLVVCETLKTKEMIENSESKKLRKGIVNACFNEIIRQLEYKTKWQSKILIKVNQYFPSSKLCSHCGTKNAINDLSIRSFECCKCHYENDRDINASINILDEGIRIAFNKGLIIV

SEQ ID NO: 36648 - protein, 363 aa, Sphaerisporangium sp.
VLVTEMLKLAPSAEQREALLATMRACNAAANRAAEVAFAHRTANKMALQKLVYADLRAGFGLSAQMAIRSIAKACEAYKRDKDIKPVFRELGAVAYDPRILTWKGRDAVSVLTLTGRTLIPVAYQGRWLRTTGATARGQADLVHRDGMFFLAVVIDVPQPPRGGEPDAWLGVDLGIANLATDSTGGEHTGKAVRAVRYRNRLLRARLQAKGTKSAKRLLKARRRKESRFARDVNHVISKQLVGKAKDTRSGIALEDLQGIRDRVTVSKARRADLHSWSFHQLRTFVTYKAAIAGVPVRLVDPRNTSRTCPGCGHIDKRNRPTRDDFRCIRCGFAGPADHIAAINIARRAADGGAVSHAADDAA

SEQ ID NO: 36649 - protein, 500 aa, unknown
  TnpB Polypeptide
  misc_feature (143)..(143): Xaa can be any naturally occurring amino acid
MLSGYRTRAYPTAAQAAALRVWVGHQRFIYNAKVREAEYWRAFARRSLSLTGQAPLPDQAYSQFIGEDTAFLRAVPSQVLRNGAYRFATGCARSLKGLGGAPVIRKKHGRQSVLLTSELFRFTEVADPATGELRAQLHLGTKXKDLGRLQFKAKKGVPFAPPKMLTVSIEPDGKWYMSFCYEMQAAPGEQPQVLRTEQELAYELGLRSAPELEQLVVGIDRGIQRPVATSEGQAFVIAPACAARIARKDRQAGRHQRRMARQQLGSKNRAKTRQRIARLKGYGAEVRRDFAHKTSFQLVHSQAQVFVFEDLKLQNMTAAPAPKQAADFKKTGRYTANGAAAKAGLNKALLSSALGLVKQYTAYKAARRNKLCLSVSPYRSSQECAACGHTAAENRPSQAVFACLACGHAGNADHNAARVLKARGIRQLLEGVPAKRKKKTARVRGAARGKNRVGPVRPEPGESPKPVESVSAAVSSRAANGAVLYEAGNRHLDASASGGR

SEQ ID NO: 36650 - protein, 302 aa, Planktothrix sp.
MIYVSIALGRKKEIFMIVLEYKCKGKPNQYKAIDEAIRTTQFIRNKAIRYWMDNSIQFKIDRFALNKYSTTLRNQFSFVADLNSMAVQSAAERGWTAISRFYDNCKKKISGKKGYPKFQKDCRSVEYKTSGWKLHPTKRQITLTDKNGIGKLKLLGNWDIHTYNVKDIKRVRLIRRADGYYAQFCLNITVTDVQPKTGKEIGLDVGIESFYTDSNGYQEVNPKFLRKAEQSIKQSQRQIYKKVKGSSGRRKVRKVYAKKHLKVSRQRNEHAKRLARNVCKSNDLVVYEDLSVRNLVKNHCAR

SEQ ID NO: 36651 - protein, 826 aa, unknown
  TnpB Polypeptide
MPRGQRQGQLTREHLLKRLASDPSRPLPPRDASSATLVGHAIHYGLLTADEIRESVPRVETTIACYLRTILPSDLHNAVETYAIVASRCYNRGTYLLNLVAMHLYGNRMPLATQSELLPILSDEFGRLGREEVRYDRATASDAADPFLRFIGEDVRNSPFKQAFLPERWPTASVHLHPTISSILRNEVHLPPEPTGWKFVMCATGWDNAINRMATKALGNFKVHSCCGLTKRTSAWLGCGRFFDEPLTQDTLHALQETLTKRPRPLAVHSDVYEMVLDLRSVLGVTETDKTWYPPDSPPYTSETAALHLFVTCYGPGERSYMPVARRSRKFSYVDHKVYSALKTALGKTSAEDPPARKRRAKAKGPKEEEDEMHKESISLGNSMGLTPSEFNEKRRDLRAVLQRRATERKRKHPNSPSARRLQKKRMRLGSGMMNRHAIIQSMETDGVGARLCVRTPIDIRPYVKAVEVVQPSEDLPSSSVSKGARSTRKRSRKEKSDERDREKEAAVLKARLESPPPITVGFDAGRKKLFVGAVCRDVIKKPETVTFTRARYYAEMGYWRHQTWSKARTSNSTVARALADVSVSGGYRNCDLDTWRSSLEAERRHEKVLDEEFVVSPDYALWKMRLHRKKRSSLDRNTGHVIRLATHGQSPERLLLLGMGDAKFSSSGKGEQSAPTSAVTEAFRRSMKKEMLRNPKRQILMENVSEFRTTLCCCACGSVTTKARVRSYSIDGGWENRESRRLRLCTRCEETGGKRRDRDVQGARNMLWILQHEYYGGRENRPWYMTRKGCCGNVASTCIRPMTSKAKRHAGAFSTSDRESAVKKG

SEQ ID NO: 36652 - protein, 404 aa, unknown
  TnpB Polypeptide
MGGGEIMKNYKTILIPVKCSKEELHILFQYNRLSAQVWNLCLELDKKYKEENKKHISNNDLQKQTKKCIELPAKCIHHVVHKYLFARDSMFKSIKAKHKNSNKVKLPYRTKKYFTTGWDYQSIKTDYNKGLIQLVRPKIKTENGIKRQESIKCYSKNLPQNIKEVELIWRNKLYLAIKYLDNTEYQQIQSNNTSAIDLGEIHAITSIDNNGNAIIITGRKLRSIKYLRNKNQARIYEKMSKCTKGSKQYKKYIRSLEKLRIKTENHIKDGVHKVSKHYLDYCLNNNINTVYYGDLDSCTRNTRKKHVTNTNVRQKLSQWNYGLLMQILENKLKQYGIKLIKVKEYYTSKTCPECGCLNKPKKRNYKCDCGYTQHRDIVGSINILNTNSSYRIKKYNNKKYLQIA

SEQ ID NO: 36653 - protein, 457 aa, Okeania sp.
LKARYKYRIYPNHIQTTKLNQLFGCCRYVWNQSLAHCNQLYAKGDKKPSYTDLTKQFITSAKKELIWLKDVASTPLQQSLKDLDQAYKNFFDSCKGKRKSIKAKPPKFKSRKSRQAARFVGANYKVCQDKIYLPKVGKIKIVWSRPLASQPTSVTIIKDSANRYFASFVVETNSEFLPKTNNSIGIDLGISTFATLSNGDKINAPKPLQKKFKKLAKFQRKFARTEVGSKRREKARVRVAKLHAKIQEIRTDFLHKLSTNLVSKYDTIVLEDLNVSGMVSYGMLRKRNHKLAKAINDLGWRQFRTLTESKCDKYGKEFRVINRWEPTTRKCSHCGFKGGKKELNVSCGMLRKREWTCLNCGTFHDRDINAAVNILNTPIIETVTQRITKVETIKAEVLETPIQLSIFVSEAPPQEAVVAEGQRSIIYRTRRRRKAGSKSADSNDVSTRPEFKQLRLF

SEQ ID NO: 36654 - protein, 252 aa, Haloplanus sp.
DVTVGNIQQVRAVWNGDRWELHIVCKVQIPVEDAPGDNTAGIDLGIKNYRAIADDDGDAESYPGNVLKRDKHHFTRDEYDTEGENGLSKRALRARQKPSRRKDHFLYAPGKHVVEQCIDHGVGRIAIGDLSDIREDETGDSRNWGKRGNKKLHRRGFDRFATLLEYEAEEHGILVDRESERDTSKTCSCCGRRLDILPALKHGAFSSHFRNANRVERGLYICESCGATICGCECCSEYPQKDNSGSSHRSYE

SEQ ID NO: 36655 - protein, 313 aa, Haloplanus sp.
VWGGPRESTSPVSCAHPWSSSDTNTAGTMAAAELRAVARLRARWSRRWTVGRQVGSLRSARDVTVGNIQQVRAVWNGDRWELHIVCKVQIPVEDAPGDNTAGIDLGIKNYRAIADDDGDAESYPGNVLKRDKHHFTRDEYDTEGENGLSKRALRARQKPSRRKDHFLYAPGKHVVEQCIDHGVGRIAIGDLSDIREDETGDSRNWGKRGNKKLHRRGFDRFATLLEYEAEEHGILVDRESERDTSKTCSCCGRRLDILPALKHGAFSSHFRNANRVERGLYICESCGATICGCECCSEYPQKDNSGSSHRSYE

SEQ ID NO: 36656 - protein, 455 aa, unknown
  TnpB Polypeptide
LPTERPRPSQRPPGRIREAAAGRVPTKSASWGAPGLPVRARSHPEPRAEAPLPCRSGALRLELGSGPGEGAVRSREEVVLSRGSPSALERGEEDRSRSGLVERELQVRLPGGLQEPGPALGDFSKSKTGLRKGRRLGFPRSKKKGRCRDSCRFSTGVMRCSGSTVTLPRLGTIHTHESTEALAGKIAEGKARILSASVSRTAQRWFVSFTVEVEREVPDHHRRPRTAVGIDLGISSVITAVDHRGRVIRFPGPKPLKAALGRLCRAARAHSRKKTGSANRRKSARRLARIHARIANCRLDALHKATTWLAARYETVVVEDLNVAGMLRNRRLARSLADQSFGTVRHQLGSKTVWRGGRLLVAERFFPSSKTCSGCGTVKAKAGRAHLPLRRLRPGHRSGRERCEEPSRARRQWQRGLWSRGKTQPCWAHGGEAGGDPTKQASWGPQAGTRHRASG

SEQ ID NO: 36657 - protein, 404 aa, Nitrosopumilales sp.
MLRVVKSVKQSIQPNNDLENMMDIFRDMMNHCIRIGIKENCSTLKRMSILSYHELRNYDILSSYKICAISQACGILAKYKKEFKKNPNAKMPYITKPYITNCYQIKHNGSLLTIPFKPHQPINILLNNHTQQILSDDTLKVRSFTITALNISICISKEVETIECTKIVGIDRNLKNVTCGNNESVTFYKTNKLLSIKQNTIYARAGFKRNDHRKKKQYYKNMQNRLQNRTKQFIHKISKDIVTNAVQTKSIIAFENLKGIRKLYRKGNGQGNKYRKKMNGWQFYELQRQVQYKASWEGIPVVLVDPKRTSKLCPICGDRIQEDRQNRRKLLCINCGKSMDRDVIASMNIAHKAWSGSTHARGDTSEAKCSIFEEPMTEPKSSNYDDVVIRIVDVSKLTCRVGSL

SEQ ID NO: 36658 - protein, 261 aa, unknown
  TnpB Polypeptide
MAQQILKEVDGPFKSFFGLLKLAKQGKYPFSSCRLPKYLPKDGYASLIVGFVRLNGNQFVLPYSAAYKKYHKPVTITIPSVLADKTIKEIRIIPKADARFFEIQYTYQVEAAQRNLNPTHALAIDFGIDNLMTAVSNRGESFLIDGRRLKSINQWFNKQNACLQSVKDKKHYGKKTTRRQAALQRKRNNQVRDYMGKAAKQVVTYCIRNDIGTLIVGYNTTFQRSSDLGRRMNQVFVGIPFGILRRKLKYLCEMNGIRYVE

SEQ ID NO: 36659 - protein, 367 aa, unknown
  TnpB Polypeptide
LASKLGHKNDVEEKPVDAMCVSTVIRIPDSFFPILDSLLVRIRERTLPKMLEHRDLSSSKYYSEIPCVLSKSLIRKYQKNKTLKQVKHIVLPICGDKGRQIKLADGGIRVPVLGKAIIPMQFPKPILGHVLNMEFFKRKDKWLASVQYNTLKQPPIEVNGCVGVDRNSVGHVATLSDPQNGKVHHFGYNPAGAKKAFRQRRANLQSFGAGGRRIRHAFRVKQSRRTKYENHLVSKQIVSYAKKHCRAIAVENLETIGKGKAKRYVQKSQWAFYQLLLYITYKAALLGVPVVSVEASYSSQECSRCGKRNKPNGKSYVCAHCKHKDHRDANAGFVVASRGNKLLSMGIVKDSESLGGAILVTPILEAA

SEQ ID NO: 36660 - protein, 367 aa, unknown; identical to SEQ ID NO: 36659
  TnpB Polypeptide

SEQ ID NO: 36661 - protein, 422 aa, Oscillatoriales sp.
MWVFTPFANTFLKNVNTCAMSRLCDLCKENENYQALNTDIAQQTLKVVDRTFNSFFGLINAVKSGTYQQKVRLPHYQPKDGYFVLIIPRIKVKDGKFKVPMSYAFKKEFGDIVINFPQRLDPAQLKEVRIHPKYDARFFEVEYISKRANEPSETIAGSSLAIDLGLDNLATCVDTNGASFIVDGRKLKSINQWFNKENARLQSIKDRQKIEKLTERQARLYINRSNQIRDYLNKAARLIIDHCVNTKIECLIVGFNLGMKQDINLGRRTNQNFVQIPFYTLRNKLRTLCERYGLKYKEQEESYTSKSSLLDGDELPLYNADRPATYQFSGKRVKRGLYRSKEGHLINADAQGAANIGRKSKQNGFTGLSRGCESPAVTNESLLRLDFLKNPRPFYGGECQKIVRMLKNVNIVSGVCRNFQRD

SEQ ID NO: 36662 - protein, 447 aa, unknown
  TnpB Polypeptide
MKRTNTFAVRPLSDDGEQVLRDLLDASAALWNEINYQRLMRYNDEDGFEGDVWDANTGKLEGKYKGVLGASTAQTVIRVNSEAWRSFFENKKAYHNESNTSVTEHPSPPGFRGNEDEGHVLKGVIRKDAYSVEWGDRSRLEIVVGEELRDKHNSPGSRLRLEVAGEPNWPDYSDQSRLKLWYDETETIFRASQPVTVSENTRATPLADETAALDIGANNLIACTTTTGEQYLYEGRDLFDRFRDTTREIARLQSKLEKGRYSSERIRRLYRTRTRRRDHAQEALCRDLLKRLYESGVDTVYIGGLTDVLDTHWSVETNAKTHNFWSFKKFTERLVCTAEEYGISVEVRSEAWTSQECPQCGSTDRTTRHQDTLTCPCGFEGHADLTASETFLKRHTEQAVRPMARPVRFEWDDHNWSGIPHPHESPKEQRTDPSTVHRDGNVASGES

SEQ ID NO: 36663 - protein, 591 aa, unknown
  TnpB Polypeptide
MSVKKNPQEQKAKARDNEGAKFAGQGEWFPENYPSERSPKWARGEEDPLATEMRLFGACTRWAFNRLQEGYSRQELKKGGQGLFGLNSRYVDDAILKAGEIIKAQRELLPLEIKETEKKLNRAKKKLRWAEKSLREAGKSDAAEKMPKKMTRTRKMVHGRQARVKKLGEKLAQLQRHVAERTLPKVVFGGRSLWQKVGKGKANRGEWRQARQNRLYARGDETKGGNPNIKIAYGDGQFTLSVTVSHLSEEKGVDKKGRPVMTRAPRVKGKLWLPEKHRLKVWELLLTGVPYTVELIKGRDGRYRVHVAFTMMAPALVTAPNLGYLGLDTNPDGVALANVNHLGQPEPWPRGFVIPHPKALHKFAGEFQVTMHPNGFLYLKIPELAYSRSHRRTYLVGVLAKVVVDIGKRLGKPLALEKLDFGKDRLDTNKRFNRMATNFPFQKIVEAVLRRAYKEGVGIKMVWPAHTSTVGYWKYRQRYGITVHHAAALAIARRAMGFKEKIAGELKEKLKALQRTLEESSKRKERLKQKEKPNQAVDSLPGEGKGMTRKVKRLFWRLDGKIPRHNGLDRFKQESFTSVWHDLKELALLSR

SEQ ID NO: 36664 - protein, 544 aa, Moorea sp.
MQTMGHSDAKGHQAELDSLTQQIFSVLEKLQSLTDQAVIPSVTAELAVQSSERILPAKSPTSTPSSRKQKSSKTSAQVSTTKEKDLEPFWNELCREISSRLLLPVETDLPDSGLNSLSTWSASTVEKSWFSTSLRAAQNQNLPQIFSPSFTSSHAGFTDSGNTVKKSKKIRLFLNSEQRSLARKWFGVSRYVFNKTIKILQDGEIKANWKAIKTGILNDLPEWCKEVPYQIKSIAVKDACTAVREAKKKYKKTSQIQRVRFRSRKNPTQSCYIPKSAVSAMGVYHTKLGKIAYSETIPDNICDSRLTSRNGDYYLVVPYQETKNKTENQGRVVALDPGVRTFITFFSETSVGKIGNGDFSGIQRLCQHLDNLLSKISQACGGQKRRMRKAARRMVIKIQNLINELHHKTARFLVDNFDIILLPTFETSQMSKKGNRKIRSKTVRNMLTFAHYRFKEFLKHKAQETGKTVVDVCEAYTSKTVSWTGELVNIGGSRIIKSLVDGRRMDRDINGARGIFLRALVDTPWLRNQLALVSQDLLLVDSGS

SEQ ID NO: 36665 - protein, 423 aa, Moorea sp.
MIVREAKLLNGSQSQYARLDSAIRTAQFIRNKAVRLWLDEPDVDKSRISRLCKELAQQFPFAKKLNSMARQASGERAWNSISSFYRRCREGAKNKGYPQFKKYSRSVEYKTSGWKLSEDCLTINFTDGFKAGRFSLFCNHQTREDLFRLKINRVRVVRRADGYYAQFCFDASRFEAGNYTGNVVGIDLGLKYFYKDQNDNSAIYPKYLRQAEKRIKKLQRRLSRKFFKGKKPQSNNYHKARIRLGKAHLKVQRQRKDWAVKLARCVVHSNDVVVYEDLKIQNMVRNHHLAKSISDASWYQFTQWLDYFGKVWDKTVIAVAPNYTSQDCSHCGHRVKKSLSTRTHQCPKCQTEICRDTNAALNILKKGMKILGIEWNTGTEGHSGTSEYSGTLEETTTSAVDGQPETVSGVAESRITVCENPAL

SEQ ID NO: 36666 - protein, 402 aa, Escherichia sp.
VKRLQAFKFQLRPGGQQECEMRRFAGACRFVFNRALARQNENHEAGNKYIPYGKMASWLVEWKNATETQWLKDSPSQPLQQSLKDLERAYKNFFRKRAAFPRFKKQGQNDAFRYPQGVKLDQENSRIFLPKLGWMRYRNSRQVTGVVKNVTVSQSCGKWYISIQTESEVSTPVHPSASMVGLYAGVAKLATLSDGTVFEPVNSFQKNQKKLARLQRQLSRKVKFSNNWQKQKRKIQRLHSCIANIRRDYLHKVTTAVSKNHAMIVIEDLKVSNMSKSAAGTVSQPGRNVRAKSGLNRSILDQGWYEMRRQLAYKQLWRGGQVLAVPPAYTSQRCAYCGHTAKENRLSQSKFRCQVCGYTANADVNGARNILAAGHAVLACGEMVQSGRPLKQEPTEMIQATA

SEQ ID NO: 36667 - protein, 386 aa, Proteobacteria sp.
MRKTFKYKLYRSKRTRRLHRQISIGGAIHNHCIALHRRYYRLYKKSLSCFTLNTHLATLKKLPKYAWWKQLGSQAIQNIAARIDQGYKAFFAHVKARKAGTIARRVGPPTFRKVRNAKSFTLSQAGWKLLEGNRLKIGSTIYRYAKSREIDGTIKTVTIKRDPLGDLYVYFSCLLDAQPPKVKAMTGHSAGFDFGLTTYLTGSDGTAFQAPQPLKQSLNALAQANRRVSSTKKGSRHRTQALRHLARVHKRIANQRQAFHWELAHTLCAAYDVIALEMLSLSGMKALWGRKVSDLGFATFVETLHYVASTTGTIVQHIGKWFPSTKRCSACGWLNQAITLRDRVWTCADCGITHQRDVNAAVNIFREGASSHGGHPVRLALASVDG

SEQ ID NO: 36668 - protein, 372 aa, unknown
  TnpB Polypeptide
MKTYKYPLGKQSNTIRIGNLLDDMWQVHVYFHTWQRERHKEGLPYVGFEGMCDHVKVLKDTTHPHWKALPSQAIQQELRRIDKAYDRFFKKLGGRPKIKKRHKFKSITYPGEAGWSLKNNRITLTFRKWNPKTRKWQLDKVPYTFHKHRQWHGTISTITVKRDNCGDYWVCITTTYTDFKPLPTTGKSVGADFGMKDAYLTLSTGKKIQHPQPLKTNLNKLRNLNKALSRKQKGSNGWWQCVRAIARLYRKITNQRKDFHWQLASKLCKKFDAIFLETLNLDGMKRLWGRKVSDLAFYQFVEILAYKCQKHKRHFEKVGQWTATTKPCSDCGFHNETLTLDDRQWTCPECSSHHDRDINAAINILRAGIAVT

SEQ ID NO: 36669 - protein, 376 aa, Leclercia sp.
MKRAYKYRFYPTPDQVELLTQTFGCVRFIYNSILRWRTDAYYKHQEKIGYVQASARLTALKKEPEFAWLNDVSCVPLQQSLRHQQTAFANFFAGRAKYPTFKSKRHKQAAELTASAFKYCEGKLYMAKSKAPLNVRWSCPLPSTPSTVTITLDAAGRYFVSCLCEFEPVSLPISPKTVGIDLGLKDLFITDTGFKSGNPRHTAKCAARLALLQRRLSRKARGSKNRAKARLKVARLHAKIADCRQDALHKATRKLINENQVVCVESLKVKNMIRNPKLSKAIADAGWNEFVRQLQYKGDWAGRSVVTIDQFFPSSKRCNCCGFTMQKMPLDVRQWICPACGETHDRDINAARNIKAAGLAVLAHGEPVNPEPLPAA

SEQ ID NO: 36670 - protein, 443 aa, Lachnoclostridium sp.
VKWRIFTLETRLNKQDAEYFEQYIGFYCKVYREVWQDYIHGEALSSKYITKICQKHNMLKRTVNSIIRDVKGRYNALKELQKQQCADLRHKIDFLCNSIDELREEIGMLSKLAGQNKLDAEALQSYRNKKKRLFSLQRKKLKYQNKMDNMGKLSFGSKEFWHKQYHLKENGFRSHIGWYNKYIRRRDKCIYYIGSSDETCGNQMFQLSYNKDLNYFQCKIRKENNYSSESRYLYIDVDFKSPRRDMLINTLECNDSMSFRVLRRDKKWYLQVMFSTDFEVLTDKRNGCIGVDFNNGFLAVTETDKQGNIADIDILELRYHGGGNKAKTEMEGLVKKLVFLCKNVNKALVIEDLNFSKKKSSILSKKNKWYNQMLHKLDYSRFAQLCSNCTAVYGVEFIKVNPAYTTKIAKQKYCNQRKLNTHIGASYVIARRGQGFKDRLLAY

SEQ ID NO: 36671 - protein, 402 aa, unknown
  TnpB Polypeptide
LLQTEATAAKQETVRTFSEAATAESNRLLCERGKYRRFNDFWRGEGMASKANTGFNIQVICDLARGAWKKQRGCTSVNGVTVKFNVPRNCKRFDTKGFPFVELGLYPRKRTAVPIRKNRNWDRFSGLLGSGWTCKTFGLAPTLEIVAYLSKPDAPLPTRKNVLGVDVNSKCFVATVLSPEGKVLKQLYLGRDIWERRRRIFERKSILRSQADGGSRSARRKLQMTRTKEHDFVKNRIGEVVRDITKLALRYDADIAIENLKRFSPKGKRFNRQVMRIPFYAFKRNLEQRCLDRGIALNTVDGWHTSRWCTRCGAVGKGHDEANYSLFRCNGCGLVVNSDRKASLAIAAKSLLERSANTHSVFQISGRRVPVSGLVGRPHEIDGRQAVPSSVDRGKPADLSHR

SEQ ID NO: 36672 - protein, 196 aa, unknown
  TnpB Polypeptide
VEYLDKTGKEVGIDLGLKNLATLSNGQEIANLDLTHEDKMIRKYQRKLSRQKYMSQNYQKTLKKYYKWLNRKNNKLQNAYHQFSKFLVEKYDIIAMETLNIKGMFQNKKWSPKLQKIALYKLIQMIKYKAEWYGKEFIQIGRFYPSSQKCSNCEYQYTNLTLEIRKWTCPKCKTKHHRDINAAKNILNEGKRIIKK

SEQ ID NO: 36673 - protein, 503 aa, Aphanizomenon sp.
MKLKVKNQLTVTRIAILGTEKLNNWKSNELDLIALSLGKLRSDLWNEFGSLKAWGVSKFEIDKQLRTSKDKYQLPAKLWEATLYDVLDDIHLVQAACVEKVMKYLGQSFQSFQTKKGVLQLTLESREWLDHPRLCTLVRKFWYRGHTKVCNQIIVKAYDTKMDDKGVVWLRFGGLTPCKTLKLPTTLPTEIKCQLRLIKRNSRWEIHYTTDIQKAGKKTDGKIIGCDRGYTEVYATSSNDGARFLGNDFGKIQIQETDYRTAKQVKRNKIRSVFNKSTKKGNSAKADRIKRNNLGKIKWNNRETSFKGRIQTIVFTATHDLMTDAIKVAFEDLTEALKGKKPMRKRMKRNVSSWCKGIVADALKQVSTRVGCTVVSVNCAYTSQLDSRFSTLTGSRNGDKFTGHDGVVMHSDTNAADNVLTRMSDVEITRYMKHSDVKVILLERTQKFRDSLIVETEATTGMDKPQTLEPKSKLTSKVNQRANYKQLTLFDQGLTTLFVYPVN

SEQ ID NO: 36674 - protein, 300 aa, unknown
  TnpB Polypeptide
MIRGKYRVYLHLTIEGKAKPKYDRFGSPRHKYGKGMIGADIGTQTVAYTSDTEVGLKNLSERGNSIQTSERKERLLYRAMDRSRRATNPQNYNDDGTVKKGRKVWKYSNHYKKLKSKHSELCRINAINRQLAINEDANHLRSLGDVFITEPKNAGRLMRRAKETTVNSKGKFNRKKRFGRSIKNRCPSGFQAAVEQKFKVSGGIYIEVSNDYRASQYDHTVDDYIKKRLSDRMYKLQDGTEVQRDWYSSFLLYCYDYRTQDIDKNKCISEFDKCYSKEKALIEWIKVNEIKVLNSGIKIA

SEQ ID NO: 36675 - protein, 432 aa, Halorubrum sp.
VRRTNTFVVRPLSDDDKQLLRDLLDASASLWNELNYDRRQQFFDGDSVWDTADYRKKYVDVLGSATAQQIIRKNKSAWRSFFAAHETGENTAPPGYWGNEDDGRELRTYIRNDQYTLETGKRSRVEIPVGHELKDEYGLGYYDRLRLEVCGTLKWDGEQGRLEIQYDETDDTFRAFQPVTVPDSRQDSPLASHEAALDVGANNLVACTTTTGQHYLYEGRDLFDRFRETTEEIARLQSKLREGRYSSQRIRRLYRTRTRRRDHAQDALVRDLMERLYPDGVATVYVGDLTGVLSTHWCAEVNAKTHQFWAFRAFIERLSHTAEEYGITVEVRSEANTTRTCPACGERDETERDGDVFRCPCGYEGHADLSASRTFLERQAGEPVRSMARPVRLTWDDHIWSELPHSPERANPNEERTNRSTGDGKLASVGTV

SEQ ID NO: 36676 - protein, 438 aa, Halorubrum sp.
MFVVVKRTNTFAVRPLTDADERLLRELLDASASLWNELTYERRQQFFDGESVWDTADYRKQYIGVLGSATAQQIIRKSNSAWKSFFALRKDGEESSPPSYWGNEEGGRELRTFVRNDQYTLEVGERSRVEIPVGQDLKRKYDLGYHERLRLEVAGDPKWDGKQGRLEIQYDDVSDTFRAFQPVTVPDFRQDSPLASHKAALDVGANNLIACTTTTSQQYLYEGRELFTDFRETTEEIARLQSELREGRHSSQRIRRLYRKRTRRRDHAQNTLARDLMERLYVEGVATVYVGDLSDVLSTHWSPEVNEKTHQFWAFRSFINRLATTAEEYGISVEVRSEAFTTATCIECGERFETERRGDMFRCSCGHEGHADLDASRTFLEQETGTTFETGSMARPVRLKWDDHRWSELSHSPERAGPNEERTNQSTGDGKLASAGTV

SEQ ID NO: 36677 - protein, 416 aa, unknown
  TnpB Polypeptide
MILRKAFQFKLKPTGLDRRALARFCGCARFVYNKALAWNQEMRTKDPTFKVSYAKLCALLPQWKREKETQWLAECHSQVLQQSLKDLMRAFTNFFEGRSAFPKFHKKFRDEDAIRFPQGFKIDEARKQIYLPSVGWVKYRRSRFIEGMPKNLTVRRKADGWYVSLQTEYEVLQPVHPKEGSEAGLDMGVVRFATCSDGTFIPGFAFLRSKLDKLAKEQRRLKRMVKFSGNWKKQQQRIARLHKSIADARHDALRKAAIEICKNHAVIYREDLKIKNMTASAAGTVEEPGRNVKQKSGLNRAILDQGWGTFFVYLNEEMDKRGGLVYAVPAHHTSQECPVCHFVSSKNRKTQAKFKCVQCGYEANADDNAAASILRRGQRRRACGELRPVNGVQVNRPSRKRSAGQQQEPVEVTGSG

SEQ ID NO: 36678 - protein, 365 aa, Proteiniclasticum sp.
MIVNKAYRYRIYPTDAQKVFFAKTFGCVRFIYNVMLYDKIKHYEESGQMLKNTPAQYKKEHEFLKEVDSLALANAQLNLEKAYKNFFREQKKGNTNQGFPKYKKKAYGQSYTTNNQKGTIDIIDKKYLKIPKLKSMIRIKYHRHIPDEVSLKSVTISRTSSGKFFVSILTEEDIQPKAESQNKIAIDLGIKTYASLSDETVILNPKFLAQGEAKIKKLQRDLSRKVKGSNNYYKNKQKLAIVHEKVANQRLDYLHKVSSRLIDENQVINIETLRVENMLKNHKLAKSISDASWSTFVSILCYKAEWYGRTINKADAFFASSQLCHVCGHKNSEVKNLAVREWTCPNCHTTHDRDHNAAKNLLKIG

SEQ ID NO: 36679 - protein, 372 aa, unknown
  TnpB Polypeptide
MIRTAKIRLRPTKEQEQQLWKSAGVARFAYNWVLARQKENYDNGGKFLNHYDLRKEFTLLKQTKEYSWLYETSNNITKQAIKDACGAFLNFFNKKSKFPRFKSRRRSKPTFFNDNVKLKFKDDKFLIEKVGWVRISEPERIMTEKFTNPRISFDGKYWYISVGQIAHKPNSALTNETIGIDLGITNLAVCSNNMIFENINKTLKTRKQSKKLRRLQRRISRKYEQNKNGKEYVKTSNIIKLERKIKLTHRKVANTRLNHIHQTTTTLVKTKPSRVVMENLNVSGMMKNKHLSRAIAEQGFYNFKRILEYKCNFYGIEFVEADRFYPSSKTCCKCGYIKKDLKLSERLFKCPQCNNEINRDKQASINLSRYIA

SEQ ID NO: 36680 - protein, 392 aa, unknown
  TnpB Polypeptide
MIRTFQYKLYLNQAQVKTLERWIGTCCWTFNRALEQRIKAYRRRGESASYNSQSALLTAWRSRMDFLRLCPLGFERDALRRVDRGFKAFFRRIKAGDAKPGFPRFRSRHRYNSLEYLAVGTYLKGDRIRVPGMGRIRCRGRLLPEGEQKALRIIRRASGWYAQIVLDDGKQPPATKPVESAIGIDVGLNHFAVLSTGEAIENPRFLRKSERSLRSHQRRVARRKKGSHRRRKAVKSLRRKHELIGDQRRNFCHRHSTALVRKYGLIAVENLNVKGMVRSRLGKSILDAAWSTFLNQLAVKAEDAGRQLIRVDPRGTSQTCPNCGVIVPKKLSERWHSCACGCECQRDHASAQVILARAVGVTAANRPWTDPASDGALVAHGQAGRMKREGSN

SEQ ID NO: 36681 - protein, 492 aa, Ignisphaera sp.
LEISLTIGIYTIREGRLFTINTIGKVYKALTKHILVGCFLQASLALADDGEDALIITRTVIVRSERIPKKLFRFFIELEGMYRNIVEQLVIHAAREEITSFIKLKALKYREMRNLYPHLPSHYVHTACQDASTRVKSFLKLKKEGSTNKEYPSVRRISIWLDDHLWKLDGLMRIGISTHKGWVHIDLIPHKQFYRYYNTGWRLASEARIKLDRKERRLIVYLIFRKDVRLYKPSGYIAVDVNENNVAVLINRKAYLLETNIERVTLGYYYRRKRIQEKYDKICGVKCRAKRKILRKLREEERKEDTRWKIANIIVREALKHGYGVVLEDLGDKPATNMISRIKDDQLRHRIFQAAFKGIQRAIEEKAKEHGVPVIYINPRNTSKQCPIHRSEIKYNGSRIGVCSLGKEKWHRDVVACYNLLFKALGGDGSIAPSHPGDDLLNLDGSHVPFGSTAAHDLTGIPRSLWARLKSLDMREHQAILKISRDKRRDSI

SEQ ID NO: 36682 - protein, 432 aa, Spirillospora sp.
VQRAFKCRFYPTPEQADLLNRTFGCVRKVYNLALEARTTAWFQRRERINYNATSAMLTGWKKTEDLAYLNEVSCVPLQQALRHLQGAFTVFFDKRAGYPRFKSKHKSRASAEFTASAFRFRDGRLTLAKMTDPLHIIWSRPLPVGQVPSTVTVSRDAAGRWWVSLLCQDTITPLPVSGNAVGVDAGLNHLVTLSTGEKVTNPRHERADRDRLARAQRNLARKQKGSANRAKARVQVARIHARIADRRRDYLHKLSTRLVRENQTLVIEDLTVRNMVKNHTLARAISDAGWRELRTMLEYKAGWYGRDLVVVDRWFPSSKTCSACGALAEKMPLNVRKWRCRCGVVHDRDVNAARNILAAGLAVTACGAGVRPQRDSSRTGRSAVKQEHPRATKGIPALPDGEDVKEAPFAVAESDSVAPGRGARRRPGVLSS

SEQ ID NO: 36683 - protein, 439 aa, Spirillospora sp.
VQRAFKFRFYPTPEQADLLNRTFGCVRKVYNLALEARTTAWHQRQERVNYNATSAMLTGWKKTEELAFLNEVSCVPLQQALRHLQGAFTAFFDKRAGYPRFKSKHKSRASAEFTQSAFRWTDGRLTLAKMTEPLKIIWSRPLPDGQAPSTVTVSRDAAGRWWVSLLCQDTITPLPATGHAMGIDAGLHHLVTLSSGEKATNPRHECADRDRLARAQRELARKDKGSANRAKARLKVARIHARIADRRRDTLHKLSTRLVRENQTLVIEDLSVRNMVKNRSLARAISDAGWRELRNMLEYKADWYGRELVVVDRWFPSSKTCSACGAVAKRMPLNVRLWTCPCGAVHDRDVNAARNILAAGLAVTACGAGVRPQRDSSRTGRSAVKQEHPRATKGIPAPRDGEDANVRSRSFQCRVFAKSHATLGHRYANAPPDPLPCFS

SEQ ID NO: 36684 - protein, 389 aa, Levilinea sp.
MIRTYKYLLRPNTEQIEKLDFLLWQSRLVYNAALEQRIAVYQETGKGIGYGAQWMNFRNTRRENPNTLGQVNASSLQHLLRRLDKSFTGFFRRLKAGDKPGFPRFKSSKRFHSIEYTYGDGCKLRQDEYGRKSFYVQNVGEMRMCYHRAIPTNAVIKHVVVKRVGERWYVCLMLKLPDPGIRQVQTGQQIGIDFGLKNLAALSTGELIDNPRWLRESLAKLRRLQRHASRQAKGSHRQKEAYHQIARLHERVANQRADFLHKISNRLVAGNDLIAIEDLSPRFMNRNRHLSLSSHDAGFGLFRHMLEYKAESAGIQVIAVNASNTTQACSECGSIVPKGLSVRVHVCPNCGLVLDRDINAARNILSMALLPPLGRSGQPITYPVGESVG

SEQ ID NO: 36685 - protein, 404 aa, Oscillatoriales sp.
MLNLTYEYKLKPTAKQLAIFENWLEQCRRVYNYALAERKDWFKSRSCQVNACSIRSEYIIPADTPRPTYASQCNALTAYRKTSETLQSVQSQVLQQTLKRLEKAFVSMWEQNHGFPRFKKAGNMRSFVFPQMGTNPIQNQTVKLPKIGVVKFHQSRPLPDGATIKQARVVRRTSGWCVMLTLQWNVSIPSILPHGEGLGIDVGLTNFIAISNGLLIKRQRFFIDAQRKLKLLQQRVSRKKLGSNNCKKAQKKVAKLHEYIANSRKDWHWKLAHQICQDAGMIFVEDLNLVGLSKAMLGKHCLDAGWGQFFTILEQACFKHGVFFQKVSAHKTSQICPNCGVETGKKELSERVHSCSSCGYTTDRDVAAAQVVLIRGLAAVGHTVKMLSEGKFVGIPVTKESSSL

SEQ ID NO: 36686 - protein, 315 aa, Okeania sp.
MVKPKNYWYYEVSKTAPQYALRYLSEAWKRCFNRVSGQPKFKKKGRDDSFTLDGSISVGFNQIKLPRIGWIKTYEVLPDNVNPKSVTISKKAGRWFISFKIEKETQMTEKSVDVVGVDLGIKSLATLSTGEVFEGAKSYRKLEAKLSRLQYLNRHKTKSSRNWKKAQLKIAKLHSKIANIRKDALHKLTTYLAKNHSHIVIEDLNVSGMMSNHKLAKAIGSMGFYEFRRQLDYKCQLYGSSLTIVDRWFPSSKTCSRCGFVKESLSLSERVFKCEHCGFSCDRDLNASLNLAMAGSSSVSACGLDNADVARLKQE

SEQ ID NO: 36687 - protein, 412 aa, Okeania sp.
LYRSIKVRIYPSSEQSQKLTQVMGCARWWWNYALNLCNETYQQTGKGLSQVALNQVLPKLKKSEETAWLKECYSQVLQSITLNLTKAFKNFFEKRANYPKFKSYHGKQSAQYPQNCQVVDNGVKIPQVGVIKGSIHRLFDGQLKTVTITKTPTGKYYASLLFNTEQETPEVLIFDKVVGIDLGLKDFCITHDGEKTSKYNNSRHLKKHQRNLARKQAKLARKKKGSISREKARQLVARVHEHISNVRQDFLHKLSRKIVNDNQVVVVENLNIKGMVCNHKLAKAISDVGWGMFVNFLDYKLQQKGGLLIEIDRWFPSSKTCCNCLYQMSEMPLEMREWTCPNCGTHHDRDENASKNIKNRRHQTIIGLGRTAAVRAASRREGGEVRPKAGRKSVLRHSPVSSEAPLQPSKLG

SEQ ID NO: 36688 - protein, 419 aa, Okeania sp.
MVEKAYKFRFYPTPEQENLLRRTIGCVRLVYNKALDARTQAWHENKQRVSYKQTSAMLTSWKKQEDLDFLAQVSCVPLQQGLRHLQSAFTNFFSGRAKYPKFKKKRNGGSAEFTKSSFRWKDGQVYLAKCCEPLAIRWSRQLPPGPVPSTITVRLSPSGRWSVSLRVNETRDLRLKPIKKQIGIDLGITNLLTTSDGEKVANPKNLNKLHKKLRLAQKSLDRKPDPKSNNYHKARLKVARIHTKIKDSRLDYTHKLTTQLIRENQTIVVEDLAVKNMVKNHKLAKAISDANWGELVRQLEYKAEWYGRELIKIDRYFPSSKRCSNCGHVVEKLPLNIREWDCPKCGSRHDRDINASINILRMGTRVGERRKGTPTKKAAGLAVSVCGATVRPSGSKSSKASAMKQKAPNSNGRESRAVS

SEQ ID NO: 36689 - protein, 238 aa, Okeania sp.
VHTYNCSVKLSFDRWLKADKNGHKLGKPRLNGIGRYRSFTYPQIKQNCIEGNKINLPKIGKVKLIQHRPLPSGFQIKTVTISRKADGYYVTLSLEYKSVPKFNCDVEPTTENTLLIDMGLKNFLVTSEGESVSIPQYYRSSQKRLKTLQKRLSRKNKGSKRWLKALLTVAKQHKKVADKRKDFHFKTANELLLKAEVIQYENLNIKGLAKTRLSTSINDAIWGTIPVYFDCQSRKCWR

SEQ ID NO: 36690 - protein, 136 aa, Okeania sp.
VGSDANWGELVRQLEYKAEWYGRELVKIDRYFPSSKRCSNCGHIVEKLPLNIREWDCPECGSHHDRDLNASINILAAGGAVSAPVAHGGDPQDRAGLSVERAFRPSGSKSRRAGAMLAFAKHDHRKAPPEEETESP

SEQ ID NO: 36691 - protein, 415 aa, unknown
  TnpB Polypeptide
MSRSLVVRSLSFPLKEMPPPLRGVLAEFRLIVNKSIRIALREDICSRSRLTRAAYAILSAEHAIHKKYIPSAFEVALGILKAYRRRVRKGKATHTPYVRRLFLKAENQSYWLDRETGRIRIPIRGTEGVQLMLPLSDWHRSFLSDPSWGLGSLTVTPDRIIVTIRKGAPTPYEPVAAIALDTNEDSLDGVEAAGTDARLLTIPFGGVREVQATHFRRRRRLAKKKAHDRRVKRRLLGREGRRERDRVKQRLHRVSKALVHAAGEAKAAVVLEDLTLHGAGGRSRRTNRRLSSWPRGELHRQIEYKAALAGVPVIKVNPAWTSRTCPVCGARRRERVGQDFVCTMCDWEMDRQHNAALNILKTALASNEALARAVRFRPGALRHDAMSPLYDVPAVPARAREEPSGVESLAALITR

SEQ ID NO: 36692 - protein, 378 aa, unknown
  TnpB Polypeptide
MLRAFRYRLYPTRKQVTSLEDQLEGHCVLYNQALCQRKETYERTGNGIGYSDQATTLLPEIRENSRLLDSCNYSSLQQTLRRLDKAFKAFFRRVKVKENPGYPRFKPFERFNTINYATIGDGCRIKDGRLYLQNVGCVKVKWHRAIEGETKTVSITRRNSKWYASFFVECKPKLLPMTGNTVGIDMGLNAFLTTSDGEQIEAPKFFRSSEKRLKKAQQCLSRRKRGSHRRRKARRLVAKCHEKISNQRLDFCHKVALPIVQLNDHIVVEKLKIANMVQNRHLAKSISDAGWGIFLSVLRSKAENAGRRYEEVNPNGTSQICASCAEIVKKSLSVRVHRCPFCGFIVDRDVNAALNILARTGLSALAVKSAVSLRSRLL

SEQ ID NO: 36693 - protein, 346 aa, unknown
  TnpB Polypeptide
MAQQILKEVDSSFKSFFGLLKLAKNGKFAFKDCKLPHYLPKDGYTTLVIGFVRLKGNKLILPFSNSFKKSHKSIEITIPPILIDKKVKEIRILPKANARFFEIQYICETECIQRNLNKQNALALDLGINNLVTAVSNTGKSFIIDGRKLKSINQWFNKENARLQSIKDKQHLSKKVTNRQKTIARDRNNKVNDYMSKTARKVIDYCITNDMGTLVVGYNVTFQRNSHIGKQNNQNFVNIPYGKLRDKLSYLCELNGIAYIEQEESYTSKASFWDKDHIPVYNNDNPKEYQFSGARVHRGLYQIANGKCVNADVNGALNIMRKSSVVDMSILYGRGDVDTPVRIRIA

SEQ ID NO: 36694 - protein, 394 aa, Nonomuraea sp.
VRRSFTFLLRPTVRQAAALAACLEDHRTLYNAALEHRRTAYAKAGVSVRYGEQSAELKHIRADDPAGQGRWSFSSQQSTLRRLDKAFRGFFDRVKAARTPGFPRFKGRGWFDTVEWPKDGDGCRWNSQPEHPTATYVRLQGIGHVRVHQHRPVSGRVKTISVKREGSRWFVALSCDDVPAEPLPATGAAAGIDMGVAALVTTSDGGRVAHARHLAATADRLADAQRDLARKKRGSRRRRKQVARLAALHGKVRRQRLDHAHKAANTLVGDYDVIVHEDLRIASMTRSSSGTIETPGRNVAQKSGLNRSILDAGWGVFLTILAHKAESAGRKLIAVNPRNTSRTCARCGHCAKENRVTQADFACAACGHTAHADVNAATNILRAGLALRQAAQAA

SEQ ID NO: 36695 - protein, 401 aa, unknown
  TnpB Polypeptide
MLVNRAYKAELDLNNVQRTTCLRHAGTARFTYNWGLQRKKESYQATGRSPTAIDLHRELNRLKHTDYPWMYEVSKCAPQESLRDLDRAYRNFFEGRAKYPRFKSRKRGIGSFRLTGSIRVFENAIQIPRIGRVRLKERGYLPTTGVHIHSATVSEHAGRWFVSLQVREEIEVPENVGSVAGVDVGVSHLAAVSDGAIIENPRALQRYDRKLGRLQRSASRKRLGSRNRAKVNRMVARCHFRITNIRKDALHKTTTMLAKTKSVIGVEKLAVKNMLTNHRIAKSLTDASLSEFKRQLKYKAIWYGSSIVEANRFFPSTKRCSACGAVKLEMPLSERVFRCEECGFEVDRDLNAAKNLEIVAASWVETLNACGEEISTQPSMVEQTVLCEAGTEHHLGDVLNG

SEQ ID NO: 36696 - protein, 354 aa, unknown
  TnpB Polypeptide
MTGNSKPNSKTTNATRTYILNPVSAFSKSSLKRSTAGSASVGTVMTVPDRPATVKTETPTRVRLSKGRNLKEHRSDFILCEYQTRPDVDLTEWDIQQVRAVYERDEWRLQFVCRTTIDPESPGDDVAGVDLGICNFAAVSFGGDSVLYPGGALKQDEYYFTKKKANCDDSSSREATRLDRVRTGRRTHFLHVLSKAIVEECIERGVGTLVVGDLGGIREDDENGEPRNWGDHGNLDLHGWAFDRFTTLLDYKAEAEGIDVEWVSERDTSKSCSACGHTDDNQRVERGLYVCEACGTVANADVNGAENIRRKVLPSLATDGGDRDNGWLAQPAVRLFDRSEGGFAPREQVANREP

SEQ ID NO: 36697 - protein, 420 aa, Moorea sp.
LRTAYQYKLRPTRKQTATIDKWLSMLCAQYNYLLADRFNWYEQNRSPVNACPYVCHLPQLRVNPDYYSQKKTLPQLKKDRPWYKEIHSQVLQDVVKRVKVTFERFLKGDSKGKRTGRPRFKPLSRYRTFTYPQIKQECLQGNCIDLPKLGKVKLVLHRRIPEGFKIKTVSISKKSDGFYVTLSLEDKTIPEIRTDINPSSIIGIDLGLKDFLTTSEGETVAIPQHYRKAQKRLGLIQRKISRRNKGSNRRLKAIKLLAKEHKKVADKRKDFHYKTANQLLSKYDVIAHEALNIKGLARSKLALSVLDAGWSNFLSILTNKAENAGLLVIPVSAHNTSHDCSSCGEKVPKKLHIRWHNCPNCGCSLGRDHNGAIKIKNRAVGHPVLKAQLTSDGIPGVTEKPTLTLSGKCGSMSQKEVSVT

SEQ ID NO: 36698 - protein, 383 aa, Crocosphaera sp.
MGNKAYRFRLYPNQEQQQFLAKCFGCSRFVYNYFLRLTTDIYVDSKKSLRYKEWSKLLTSLKKEFQWLQEVNSQPLQQTLKDLETAYSRFFKGLAKFPRFKKRSNKQSFRVPQNFSVTEEGKLKLPKMSPMKMVIHREIEGDIKSVTISQTPSGKYFASIATELDIPKAPLNGEKIGMDLGLKDFCITNKPERFENPRYFQRSLRRLKIRQRRLSRKAKDSNNRKKARVKVAKIHEKVANQRLDYQQKISLKLTNENQVISCEDLNIKGMVKNRKLSKQISDVAWGQFLTLLEYKGDIYGCEIKRVDRFFPSSKRCSKCGYIKEDLTLKDREWTCPECHAHHDRDINACWNLLQFSDSKIPLEERKSTPNQTVEMQCIKSVSS

SEQ ID NO: 36699 - protein, 375 aa, Enterococcus sp.
MKVLKAYKYRLYPTSLQEEFIKKTFSCVRLVHNLLLQERIQLYKKLKENPNLKVKMPTPAQYKKEHPCLREVDSLALANAQVYLDRAFKKFHREKSVGFPKLKQKKNAVCSYTTNNQNGTIKIIDEKYLKVPKLKSLMKMKMHRPVIGKIKSATISLTPSNKYFVSILCEEEIPAVEKTHFAIGITLGASEFAVLSNGRRFDNDKYTKEFERRITREERKLRRRKEIAKLKGTDLSQQKNYQKQKTKVAKMREKLMNQRIDFLNKITTEIVRKYDLICIEDIHQADFYRNNKLHRGVTDVSWALFVSKLEYKASWYNKRLVKVSVCQKCSEHSDNNRMSKIFFHDINEKKGRQDPETAASIHVLTQGLKEATVTD

SEQ ID NO: 36700 - protein, 215 aa, unknown
  TnpB Polypeptide
VQNPSGKYFASVYCTEVCIADLPKTDRSAGLHLGIQNLAVTSDGECFENHRYLEKSRRKLNRLQKELSRKTSGGKNHEKARLKLAKAYERIANQKMDTLHKLTTELVRNYDTICVRDISFEELRQSRIFTKYCTDAGWSLIIRQLSYKCEWYGKEFIKTEQLFPSTRLCSCCGHKNDKLKPHQSEWNCPKCGKHHNRRINAANNILNEGLRMKTA

SEQ ID NO: 36701 - protein, 375 aa, unknown
  TnpB Polypeptide
MSESIYKAFRFRLYPNREVQSIFNQWFGCCRKVFNVTLDESIKQYEAGNKNFVNRSSFCSMITKLKADGEHDYLKQVPIHTLQASVDNLLDSYDRFFDKHGGFPKFKSKHESKQSFTVRCSPSIIRNCRFDNNRVWIPNLKKLIQFKQHRKIEGVVKRYTITRESTGKWYISFLCHIATPQKIEKDGVIGLDFGVIDFFTDSNGNKVPARKFLRSMESKLKKMQRALAKKARGSNNYKKLKQKIARLHDYISNCRKDANQKLSTILVNENQVISIEDLAIGKMSRNHKLAKSLLDEGWYQFTNMIDYKIKWYGGSLVKIDRFFPSSKTCSACGSKVSKMPLNVREWVCPNCGCVHDRDINAAQNILTEGLRLLSL

SEQ ID NO: 36702 - protein, 414 aa, unknown
  TnpB Polypeptide
LQERRDAWRISRTSINYYSQSMQLPEIKVIRPELGLVYAQVLQETLKRLEKAFDAFFRRVAENKKLPKEKRQPVGYPRFRSRSRYDSFTFPQVRAGFGIQFNKLRLPKIGKVKIKLHRPIEGKIKAITITRSSTGKWFACFSVGCEPESLPKSTDASGIDMGLKEFAVLSNGEAIANPKFFRVEEKQLAKANRKLSAAMKGTPERRKRRKVEARVHERIANRRFNFAHQESRKLVNRFALIVFERLNIDGMLKNHHLAKSIADVAWGQLVQLTTYKAECAGRRVVQVNSYNTSQTCSGCGEIVKKDLSVRIHACSGCGLTLDRDHNAAINILALGLQSIGQSTIEAALFRARSSHYALKPFKEKFHPILAAIEEIEGQTVEPDVPPAATGESVKRRATREHKRPNRPIAPAETT

SEQ ID NO: 36703 - protein, 348 aa, unknown
  TnpB Polypeptide
MLTKKKINNNLSCYDLIKEIPSLYEEYPFLKEVDSCSLRCTIFDLDNGFSRFYKKLGGYPNFKKKGYKDSYRTSFISSTYKGKVYENLKNKIITLPKLKEIKIRGYRNMEYLNGRVINATLTKEGAKYYVSVVVEEEVILPDKKESYAVGIDIGVKSLVVTSDGEVYGNPEYNKKYDKRIKKLQKELMRKEKGSNNYKKTKLKLSEAYRRLKNARKKIVEEIVSKVTKNNDIIITEKLKVKEMIIKKDKTIQNKNLRKSITNATFGLIIKKMEEKCKMLNKTFIQVDTYYASSQICSRCGNINKSMKDLQKREYKCSKCGIEIDRDLNASINIEYEGVIKYFKNKYAS

SEQ ID NO: 36704 - protein, 278 aa, unknown
  TnpB Polypeptide
VHLDLEPSKEFYKLLARGFKPTSHAKIKPGRRNRRVIFHLSLEKEVEIYKPVDVNENSVATLYEVFAVILETDLAETILGYSYRRESIQRRYGSDSREARKAMEKLKEGKKRDYRWKTANMIVRDAMRMRGVIVIERISREDIRVMISRYRNKQLRHRIYQSALKGELNAIIDKAREYGVPVLMVDPRNTSKICPIHKAVIEYGEDRMGVCSKGSERWHKEVVVLINIYLKALEALYEGNAQKGFGVPILDGSLVPLGLKATYEPIEIPRCLWGVKIP

SEQ ID NO: 36705 - protein, 302 aa, unknown
  TnpB Polypeptide
LSTTRLATRSGLFNQSPYLILDWIHHWLRKKPPSTLERTISSRVPRLLGTSTSTTVVSCSDGSARRQTKSPAYSRKLREGRYSSNRIRRLYRQRTKRRDHAQNALVRDLVERLYDEGVATVYVGDLTDVLEAHWSVRVNEKTHNFWAFKKFIHRLACVCEEYGISLETESEAWTSQTCPERGDHEKTVRHEDTLTCPCGFEGTPTSRRQRRSFGKTAIAKSGRWHGPCDSRDDHDWSGKLYPSRKSQRSAHEPASCLRGSVAEPSTEESSRFSAGRMSSTARPYKIVGRGVLQTYVTTVKLV

SEQ ID NO: 36706 - protein, 232 aa, Okeania sp.
MVATHVNLPKIGLVPFVFNRQIPKGFKVKTGTVILEADGWYISFTIEDKAVPLRRAEIQPTEKNSCMFDLGLLHYAVTSNGEFIEVPKFFRKSEHRLSKLQVRLTRKQKHSPPWKILKRKIAKLHQLIARQRLDWQFKLAYYLFSDVSVIFLEDLLLANLVRRCKAKLGNNGQFLPNGQSAKSGLNKSLQDAAFGQFVEVLEYVAWKLGKRVITRRPKRHISALLEMLKQSF

SEQ ID NO: 36707 - protein, 367 aa, Polynucleobacter sp.
MSGSTPIVTRTLRLRIKDKHAKVLNTLARETNFVWNFCNELSLRHTQRTGKFMSGYDLQKYTAGACKEGLLLNSATVQMIGHELATRRKQFKKVKLSWRKSNGSRRSLGWIPFRHDCISYRGGQIRYAGYKFNIWDSYGLADYELGSGTFSEDSRGHWYFNTTVKVEKKPNTATQSIGIDLGLKECAVTSDGQRLVGRHYRKLEQSLGMAQRANKKSLVKALHAKIKNRRKDELHKFSTMLTQHYGAIFVGNVSSSKLIKTKMAKSTLDAGWSSLKTMLEYKSDHAGVVYEVIDEAFTTQTCSCCGSIAVSSPKGRAGLGIREWTCSDCGSVNDRDLNAARNILARGHSRLALGIPFPFAVISCFST

SEQ ID NO: 36708 - protein, 736 aa, unknown
  TnpB Polypeptide
MPKLDLGLPSYDSLFSTEKERQESSAEKVMKIPIDKISDFKGHPFLKEVDSLALANVQLNQRKAFKEFFRSCKTKKHDRGFPKFKPAKTAKRSYTTNNQNGTIKVGDRYIRLPKIGKVKAVVHRRPNESWKLKSATVSQSSDGNFWCSILFEYEEEIIPVIWFGLLIAPYMDKELLYALPNLNEAISHPFQIQWTNNTLKSIGLCLLTYGITVGIYLSSSKNYRRNEEYGSARWANPFRVCKKYADKNYLLNKVFSQNVRMDLNGKKHRRNLNTLVIGGSGAGKTRFYAKPNIMQCNTSFVVLDPKGEIIRSVGYLLEENGYEVKVIDLIDMSKSLGYNPFHYIQSDKDVLKLITNLIRNTTPKGSSTNDPFWEKSETALLEALMLYLYHYAPEDEQNFTMVMEMLNYAEVKEDEEDYESPLDELFKRLEMIDSNSLALKQYKIYKQAAGKTAKSILISVGVRLAAFNLEELASLTKYDEMELEQIGERKTALFAIIPDNDSTFNFVVGMLYTQLFQMLYYQTDYVHGGELPIPVHFLMDEFANVALPDEFDKLLSTMRSRQIFVSIILQNLAQIKALYKDSWESIVGNCDETYYLGGNEQSTHKYISELLGKETLDTNTFGKSSGRSGNYSTNYQQTGRELLTADEVRLLDNNYGLLFIKGERPVKDKKYDLLKHPNIKQTLDGGREPYIHGQAYHFIDDWQNILLTDNEYELLDQEEAEKYVKEIKENEESKNN

SEQ ID NO: 36709 - protein, 420 aa, unknown
  TnpB Polypeptide
MENAVDASGKRTLMQRAHKIRLNPTSEQEQYLRQACGVARFCFNWGLSEWKRQREEGGRPSAYLLKQQFNAVRREQFPWTLNVSKCAVDTGFRNLDAAFKNFFRRCKNGDAKKGYPSFKSRKRSRRSFRMDGTRVKVDGHWLKLERLDTPINMAETLRFDGKIVSVTISEDIDHWYATINVEVEKPKHEHPRESVGVDLGVKTLAILSDGTQFENQKLLQSELRKVKRLNRELSRRQQGGGRWQRTKWKLAKLHRRVANRRLDYQHKMTTRIAQTYQVVGMEDLNVRGMLRNHRLALSIADAGFGEIRRQLTYKTEWYGGQVVAIDRFFPSSRLCSNCGAVKDDLTLGDRMFVCECGYTANRDLNAARNIEAAAFKMISHRSGFTETLNAQGQDVRPQTGQSWMNCENSAEERQPARLAI

SEQ ID NO: 36710 - protein, 411 aa, Calothrix sp.
MIVLEFKAKGKTTQYTAIDEAMRTAQFVRNKAIRFWMDNRGVGQKDLYRLSKSLRGEFPFVKALNSSACQASIERAYSSIARFYDNCKKSVAGKKAYPKFKKNYRSVEYKTSGWSLSETRKQITFTDKKGIGKLNLKGTWDLNFYQLEQIKRVRLVRRADGYYVQFLVSADNKVETQPTGKTIGLDVGLKEFYTDSNGHSEPNPRFYRTGEKRLKFRQRRVQSKNKGGCNRKKAINKLGRVHLKISRQREEHAKRLARCVIQSHDLVAYEDLRIKNLVKNHCLAKSINDAGWYQFRKWLEYFGVKFGRITVAVNPAYTSLECSHCGAIVKKSLSTRTHICECGFVMDRDWNAAINILKLALSTVGHTGTWILDPNATLRERQGRTGDSTSTHAGVILSEQVGSKIEESSPL

SEQ ID NO: 36711 - protein, 442 aa, unknown
  TnpB Polypeptide
MITISHKIELTPNNKQKTYFRKAFGCARLAYNWGLAEWQLRYKEGEKVDAYGLKKAFNAIKKDEYPFVLEVTKYATQQPFINLGKAFRKFFDDLKKGVVSYPQFKKKKDNERSFYIGGDQVSLSDINCNSKTFKNVPHNEKLKRQYLRVPNLGWVKMTERLRFIGKINGVVISQQGNKYFASFSVQITEDEYKRTHPKACSDKANRKAGIDLGIKSALILSDGIAVDNPKPLKKNLRKIKRISRQLDKRTHARTKQERLEGRKKSNNYMKLSVKLSNAQRKVSNIRRDFIQKVTTILTTHYSHIALEDLNVKGMTRNHRLSQSVSDVAFGELCRQIEYKSQLNGVKILKAERFYPSSKTCSVCGSIKQDLKLSDRTYHCDKCGAVIDRDYNASLNLLSLIIKKQIGADYPESTPEDLAALFFCFARNGIATSKVETGRQRKL

SEQ ID NO: 36712 - protein, 551 aa, unknown
  TnpB Polypeptide
MMELFMTGFTHKSIGTDDRREVEKLRRVFVSDEQSVEEGFPLPDVPTTDPSHEMVMLHLECCRLAEGTDGQFSPFPNAALGRSYHRLCSRLAELILKVKSFDVTFHLGCEASKRRGKRTRTLRHNRRKSGKKRNGHFSLGTTKKTALVSSIETDGVGVSIVIAIEKPMKEFKTTEREPKTEAQKRAFAKEMKQREIDRLAPLIPRAIVKGLDPGRVNLYTTATRNEDGSHDRRFYSRKRHLERSGRNRMQAWRDERTSLPLVSEALKALSLSAGSHGNDASKWMVYMNARRLHRVVLWDEFLYNEERCKKRMVEHRLGQRALARAADHLVSEGVLQRKPVIIGYGTGRGNGGGHKGEPSVPVKAMYRALKMAFKRHRLEGGILNVWEHYTTQKCHRCEHIMATRDVPWTQEDIEREEKKRRRKYDQGVAAAEREETPDFDARVRELDEMQLHPDPPLCSRQKRDRDFRVCEHCSTDDQTKKTRNRDFNAAINILKLTMCELRGEERPQYLCPQPVKKSVKKRNKKVKIVPDSSSHQTIPSGTDAPFEDPPL

SEQ ID NO: 36713 - protein, 391 aa, unknown
  TnpB Polypeptide
MMRGTAPVSVEDVSEVLCLRLHKAYKYKLKPTPDQERQLEEIVWQCRRLYNTALEQRITLWKQRSISLSRYEQEAELKYLRAEMPDYAAIHSHVLQDVLARLEKTYRAFFRRVQAGQTPGFPRFHGPNRFNSFTYKEFGNGARFDNGFLVLSKIGRVAVRWSRPNGPWEGTPKTVTLAREADGWYVCISCADVSMQPLASTGCETGMDLGLESFATLADGTMIHNPRCYRRAERRLKTAQRKVSRRKKGSNRRKKAVKLLARAHQQVKRQRQDFHHKETLKLVRQSDTIYHEDLQTANMVKNRSLAKSISDAGWSQFLRILACKAAYAGKRVVAVPPAYTSQICSGCGVLVAKGLSVRWHACPDCGASLHRDHNAARNIERAGQALRGEVA

SEQ ID NO: 36714 - protein, 302 aa, unknown
  TnpB Polypeptide
VRVLDPNIKRLKSIIRNLKFRKNRNEFKLKRKMPSVCFGGKKNLKNGDLETFRFRRQRRMLITGRRQGKYSNNLFKLNVDNDMLTYRSTQKDIVFKVQFHKYKDELYARVNEKHNSPNKAVAYELMDYGEYFIVKAIFEKHMNLPKTDILYGAIGIDINVDHIALCETNMDGNIVLIKKYPIHKENTKNKRNEELYQLAIEIMEQCKSKKKSLVVEDLNFKQLKTRMLYRPKKQNKTLSSFAYKKILEKVERKCLMNEVDVIKIDPKNTSKIGKEKYTKIKGLSVHYCAAYVINRRGMGFVD

SEQ ID NO: 36715 - protein, 428 aa, Symploca sp.
MKLAYQFKLLPTFDQRCRMSKWLDMLRHQYNFLLADRFDWYEMNMCPVNACPLVCSIAKPREQPEYYGQKRSLVSLKVEREWYKDIHADVLQDMVKRVDLAFTRFVKGDGNGKRSGKPRFKGKNRYRTFAYQRVKPDCIQENRIELPKLGKIKFIQHRSVSNGFTIKRALVTLKADGWYVTLTLEDVSVPDNPTIDIESTEANSIGVDAGLEYFAACSDGTMVEPPKFYRQAEQKLAKLQAKTELRKKGSTARRKLNQRIAKLHQKIARQRKQWHFELAGELVNKAEVIFVEDLKVSNMAKRNKPKQDEKGAFLPNGQSAKSGLNKSFADAGIAGFLNEILPYKAARAGRLVVKVNPAGTSQHCAMCLNRVPKELSDRWHDCSCGASMPRDLNSGILIKKVGLGVRLTIKRESGKSRRRSLHLPDREV

SEQ ID NO: 36716 - protein, 379 aa, unknown
  TnpB Polypeptide
MKSVATIKLKIPYNKLLLQTMKRYSKAVSYIANKGFKADIHNRYKLHHLCYYKAKERFKLPSQFVINANRVASQTLKSVKRNKGSKPVFKEIMPLDFDKRTFTFSFDKVRLTTIKGRIDVPIEIPEYYWKYLDWSYQTALVIIRKNEMFINITFARDINISKTFNRLQVGVDVGINHIAVTSDKKFFSGTKVKSYRIKFKRLRARLQAKGTRSSQKLLKKISGRERRFKAWVNHNISKQIVDNCEAGTIVLENLKGIRNSRKGKRFNFWLSGWSFYQLQQFISYKALVRGIKVIKVSPYMTSQTCSKCGKVGTRSKGFFVCSHCCYSLNTDLNASQNLAKHHSKSDGVSVAVTQPNIQSDDVKGLLTTATELMDKSPLF

SEQ ID NO: 36717 - protein, 447 aa, unknown
  TnpB Polypeptide
MTLAQQAGGEGVRRRAHTARVYATAVQTAILDGQGHTGRALWNLLHEWYTWGDGQIAWRPSWAEMGRQLRDARTNPLPGWEWLATLPAQATQQVLKHYLRAWDRYYAGLAGRPRFKQRSHHMAVDNPQASDLHIIRLNRRWGEVTVQKVGRVRFRWTRPLPGVSPGCPGCPGRITGARLVKDSLGWQIHFRIEEPNIQEQPNRGLPIGVDRGITHTMALSDGRHLDMPPPLTKGEQRRLRKLELQAARRRGTRLRKAGTRISRREQRSYDQIAVLRARQARRREDWLHKQTTDLAKNHGLVVLEDLRIKSMTRSARGTTANPGKNVKAKAGLNRSILGMAWGKTGRMLAYKCRASGSRLLKVNPRHSSLTCARCGYTAVGNRVGQATFRCLGCGYTACCENGGWVGWGGSRCGEVKGAQWRPWTRTRWWSRTCSRPSGPRWWACSSR

SEQ ID NO: 36718 - protein, 439 aa, unknown
  TnpB Polypeptide
MAKQTSSYGIEIRHAHKIFYRTITLFNEAVSYCIDVFEQEWADLSVLPGRLRNNHAEKLIHGTKNNLPKYPDFDVLFRKMPSYMRRTAISYALGALSSYHSNYDNWLSGGCAGNAPTLQKKRNVMPTFYKDNSYNAGEEDAVYLKLFVNGDWNWVCFNLKHTDMQYIRKHCNTEHMSCPTLEKVHHKWFLRFAFEEQYQLSNKDYSDQTILAVDLGINTDAVCSVMRSDGTVLARKFINFAGDKDLINHALNKIKKVSQESGPHNTTKLWRYVSFRNEELGRKIAGAIADYAVMQHCDVIVFEHLDTSGRKRGSKKQRLHMWRKNTIQNIVTHKAHKAGIRISRICAWNTSRLAYDGSGEVMRGKDAGFSTNRLCRFANGRIYNCDLSASYNIGARYFIREIQKSISAKRWSDIQAKVPECEKRTWCTYNTLLQINAAA

SEQ ID NO: 36719 - protein, 267 aa, unknown
  TnpB Polypeptide
VQSIRLKNNNNSIRLENNKLKLPRFGLVKYKDNRKILGDILYVTIKYENNRWFAVLNCKNVPMAPLPKTGDNVGIDLGLKDLMIFSNGEKRKPITRLTKIEHQIARLNRNLSRKVKGSKNFIKNVKKLHKLYNKVFDIRNNEYQKLSTKIIENFDLIGLENLSVQNMIKNKRLSHSISQISWSKLIDMIKYKAQWYSKKCIQISKVFPSSKLCSECGYKKEDLTLTIREWTCPECRTKHDRDINASINILNEAIRMNNECTAGHVGI

SEQ ID NO: 36720 - protein, 324 aa, unknown
  TnpB Polypeptide
MLEDKIKYYKETGKMLNNTPAQYKKKYPFLKEVDSLALANAQLNLEQAYKNFFRDKAVGFPKFKKKKNKQSYTTNNQNGTIYIENGYIKLPKLKSMVKIKQHRQFNGKIKSVTISKTPTNKYYASILVEEEITPLPKIDKKIGIDLGIKDFAVTSDGEIIENPKWLRRSEQRIKFLQRSLSRKQKGSKNREKARLKLTKAYEKLTNQRKDFLHKLSSKIINDNQVIVLEDLKVKNMLKNHYLAKSISEVAWREFRQMLEYKAKWYGREIIIAPSNYASSQICSNCGYKNEEVKNLALREWICPKCGVHHDRDINASKNLLKLAI

SEQ ID NO: 36721 - protein, 324 aa, unknown; identical to SEQ ID NO: 36720
  TnpB Polypeptide

SEQ ID NO: 36722 - protein, 385 aa, unknown
  TnpB Polypeptide
MKTVQRAYRYRFHPTPEQAEQLARTFGCVRYVYNHFLRQRTDAWYERQERVGYNDTAKMLTGLKKETETAWLQDVSNVCLQQSLRNLDTAFKNFFQGRAKYPTFKKKQARQSARYTTSGFSYRDGKIKLAKHKEPLNIRWSRHFTGTPSSVTVSKDSADRYHVSILVEEDMAALPFSKQEAGIDLGLTHAVITSNGQKVNNHQYLKQSEKRLARAQRRLSRKKKGSANRAKAKLKVARIHARIADQRQDFAHKLTTQLIHENQVVAAESLQVKNMLKNRSLAKAISNVGWHQITTMLAYKAEWYGRDFVQIDKWYPSSKRCHACGHLTDTMPLSVRHWDCPACGARHDRDINAAKNILKAGKAILAGADKLREHEQKTTVGRTGG

SEQ ID NO: 36723 - protein, 397 aa, unknown
  TnpB Polypeptide
VENPARRSFFRLLKLKREGRLPPFMTRISAPGYRKKRKSRTLWTIVRKDQYEMSGDRIIIKCLGAVGWIEVRYKGPIYLRGAQGRLEIRYDDDRGKRYAYITFSKVSEKMVRGEWKPAPQRPKGNLTVGIDIGINNLMAIYVEDGSTRLINGRPLKPISYYWRKKIAEYQSVLNKYGLETSKRLRRMYTKWKRQVKHYINTKVREVIEWLYHAGVSTIKVGYPKGIAQENGDLNNVYVWTYRYLLKRIAEVAEEYGINVIYVDESYTSSRCPWHGDGCGIRVYRGLFKCTKLGKVFNADLIAAYNIFNDSDVEQYLDDASSPRAPERGRGNGRRPGQGLNLQKEGCSPNLPTPNGEEVVFSSEAWRLFPEQPPEDRAHLLKPFPQKQFVVLHEDPSH

SEQ ID NO: 36724 - protein, 303 aa, unknown
  TnpB Polypeptide
MDGDRIILQGLGAVGWIEVRYKGIIHLRGEHGGIEIRYDADRKKWYAHISFKVSEKMVRGEWRPVPRQPKGNLTAGIDIGINNLMAIYVENGLTKLINGRPLKSISYYWRKKVAEYQSTLNKYCLETSKRLGRMYAKWKRQIRHYINAKVRQAIEWLYDVGISTVKVGYPKGIAQEDGNFDKNNVWTYGYLLRRISEVAEEYGIKVIYVDEAGTSSRCPLHGDGCGIRVYRGLFKCTTMNKVFNADLIAAYNILMAPVTPESRRGIGGNGRRPGQGLNPQKRGDVAQTSPPQMGRGSMYASSC

SEQ ID NO: 36725 - protein, 421 aa, unknown
  TnpB Polypeptide
MTTVTRILHATSPDLSRLLAMCRTMGFIRADLWRRYGALGTVGKSASAVRKEITQGGWHTDLPLDGTVRAESTKDVINDILTYKAAAKHKVRRAVAARTTDETERKRLYTLLKQDKWLEDTYLHRMMRKHFRHGKSQCSNQFVVRSDKHSERIIDGQLVITLHLSKKVGGSITLYTTTSGKNVSLEKKNLRVIVREGKVEIHYAYEKPPGRPHGDKVMGVDKGYTEAFTDSQGQHHGESFGQVLTAYSHQVSATGKARNRLHALEKKHRAAGRIAKAERIRANNLGKKKQVARRQRTQQHLRTIAYQAAHTIMDEAALLASEDLTQPIAGKVQWRDYNRRMSHWAKGGGWPMLRGMSWQGLMTPTLRGTCRTARSSEYCWDVSPAQLSVKRPELFASTACQPGADKSFLANDGQALRSSTP

SEQ ID NO: 36726 - protein, 486 aa, Clostridiaceae sp.
MPLKTVSLKLYKPSKRKKEIIDKAIYNYSKAFEYLMEKARYAIENRKDKFFEDNGGYKAYRVTKWVSKETLRELNKFDVEPFKDSLVLDFGMAMASYLNLKGVDSAAGFPEVRSRPVYFCRYDTTRDYSILYDGIKNRYYAKLYLMNSRDEYRSELQHSGTMKLKYLDREDEYLELTGRKERYILVPLCFGKWQEEYLKQAIACKGMLKTARLIKRRNEYYLSISIDLEDGATIETINYLGISRGIKNEINYTVVSMSDGLEGKTGYINFKAIDKSTSNYLHEMSSAIAKLAVDNKAQVIVESLNMNNDRLGYSDEYKPAISAGIYNKMTGLIEYKLKSYGLPPPVLVSSVGIFYRCHVCRNFSYKNRQSESLFICTNCGTVKDIEQLGSINVARKLIEYNKTTIKMNAEVIGDKVRVSNSILEVEFILEHDMLFFERLVEELKKIVENFDKNRLPFTKEDNLKKKLSLMKKIQNAEDLRSVIEIV

SEQ ID NO: 36727 - protein, 453 aa, Rhizobiales sp.
MRTAYANAQHPEGSKRSEKDVRELVKSRFTKLGLLDSWAMHCATRAGVLKRKLRPEGDVVFGGRAGFERRRKNLISNDEWKRMRLHPFVSYGDSQKVRGNQNIQLIDETTIVVKIGRREIGGRSGRTVTQIARLDLAKMRGAAAKIMNQLAELCAQPEKAQRINVSYSIGDAHVSITFDPSDLPDHPQRRRPVLPKKGRALGIDLNPNWIGLAVASNVGDAAKIEDTDLLEHALVKLDMAVDASPELVRETLAAACDRAISMARKHRCGTIVLEKGLGKLRSSGKNRSLNRLLNYWARNVFVQMLTRRARLAGIDVLEVWAGYSSTIGNLAFDAPDACASATEIARRGIARLAGIKDVLPALEVGCVSRLWKNGKVPAELGSWQDVHRSIKAAKIGYRRPHPDVPIGSKGSDVHGTAMFCGHAVVRLGRRHRPGLVFRPTVTPVKRDAVIRTF

SEQ ID NO: 36728 - protein, 618 aa, unknown
  TnpB Polypeptide
MASHRGQIVSTAPCRIFLGIDESTGEALNARRVAERVGFMSDLLREAAQRIVDEHWTAGDLAVLASGVGPDERKLPSHGHSALRMLGWMPVLPEGVYAPERARRVAAENAARMLRSAAAFSAPLVAAICATWPADGKRTSEEWDALWAAAPAGADKTSVRNRTRQIAARLSAGEAMPESITGIEAAPRVHGQLLLAAVDGAFVAFCPAEPDDEDQRRILRVKLPTVAQPAKADWVWHELRVTIPTYVPDTASLSTPTLRLIDGVVAADVPFTVAAKPAATKGHTVALGIDWGLNTLLTASVARLGGDGVVTADPEPLSFDATGISVKVAALRRQREFLLGKVDRWEVLQSGRAVRDVHLDALIARTQTESSNVSRRQSNLNADLSRKAARWAVDQAVAAGATAIYIEDLATLETRGLSRNLHRRLGGHVRGKVFEAMRHAAAKEGIAVVSVPARGTSAKCPGCLANLKHVKASNNRTAGHKWSACDKCGLSLDRDHSASRRIVSRGLAGQADTRKARSGELTIKTPVDEPVAVSRDKHVATPRRISRRRVQRFAYQTPPRRLVPAPAPAGQRPAGKRSQGGNTQTLHDMRSARSLRGAGLAPHVRATPVLSRPSPLAA

SEQ ID NO: 36729 - protein, 417 aa, unknown
  TnpB Polypeptide
MRVTQAFRFELDPNRATRVALAKHVGAARFAYNWGLARCLQALEQGQLIPSAAELHKEWNRWKREHAPWWVEVSKCAPQGALRDLERAFRGWRARRAGRPRFKKKKVLDDNAARFTGSIRVFPRHVQLPRVGKVRSKEKTDKLLALLVTRKARILSATVSREADRWYVSLTCEVERPDPPIREGEPVGVDLGLASFLVLSDGTRVDAPKPLARALRLLRRRSRQLSRKQKESRNHARAALRLARLHRRVRHIRRDFLHKVTTWLAKTKPVIVVEDLGVQGLGRGTLSQSVADAGWGAFRRMLEYKTQWYGSQLIVTPRNFPSTRRCSRCGTVGPRLPISCRVFRCAACGLVLDRDLNAALNLRFYGLAVLNSPTGSSPGSDACGDSSGGGTVNWPVYEPRVEEAGSGRSSASPYRVK

SEQ ID NO: 36730 - protein, 483 aa, Opitutae sp.
LFSDGSIRPDLPNLSRFIPNLPRRYSVAAADAAQVRNDANAPLLSAHHSRTKLPAKIDLKKKLKHSPSAIALGRAKQVQYAIDDAAAMFASYRSNFFDWVKNHFSRPGRPKPPRFYRRGQRTRLRFDYQDFDVIDQRLYLPRSVGFGVIALVDRAGEPLLAPGDRLVEVRVEPCRSRQWVHVDFVIRRAVVKRNPVKRAGTLFADLGVARLITCLDDQNLLAFLVCGGVAKAILQRGAKLHAQWRSEAKLGLRHGERRAGQLAARSARQMEDLMKKVALLVVTYAQVHHLVRVVVGRNVDWKQNVSMGKRQNQLFTFIPHGKLIEALRTKCARAGLEFIETEESYTSKTDHLALEAMGPKPEGYRWLGSGTCRGCFRSNVGLVLQADVNGCIGLGRKVGGEEWLADLRQRLGASPGTRLVPRKVQVNGVGPESSPDSGTRHPRLRSPRTWMSTQVALAKARLVPDLQPVARATHHPQVFPVAA

SEQ ID NO: 36731 - protein, 475 aa, Streptomyces sp.
MKVTRIAYSKNLNACKYDQLVKQAERLGRVRSLVWRRYGALAGVGVSDRTIRDQWMKDGTSDTFGVLANSWKETVRDAVVSIRATREAAKVKVRQAIRRHTADQTERKRLFTALKRDQWANDPYLARQMRHHWRRGQNHTMNQIVVRSDDYRTYALVEDGDIWLSVPGLERRSAVRIPLNTRVAPTGTLRLILRNNRVEVHYTIDDCTLRSSQRPCGTAKTGLDKGYTEVLTDSEGSHYGTALGGLLRAESDFLKTKNARRAKIRFIAEKARKSGDTAKAERIEANNLGTAKRSHRRRSFEARVRSVTFTAVHQVLDKAQQIVAEDLTRSFPPRKKLGKDTNRRLAMWTKGVTAEALNSVSERRGSALTLVNAAYTSQVAPCCRILGTRKGDRLHCTQCGAVWQADHAAAINVLERDGDPDITLHTSHARVKQIIQERADRRRTRLPVQDSSLSGGERTIRSERQCSRTRKQNQP

SEQ ID NO: 36732 - protein, 384 aa, unknown
  TnpB Polypeptide
LIKSFKTEINPTTEQIIKINKTIGTCRFIYNFYIAHNKELYEEKKEFMTGRDFSVWLNNEYLPNNPDKMWIKEVSTKSTKNAMEDGYRAFVNFFRNKSKFPRFKKKNSSDVKMYFLREYNRGCLVERHRIKVPTLGWVRLKEKGYIPTSKDGFTVRSGTISCKAGRYYISVLVDIQENNIRSNNNFGIGIDLGLKNLAICSDGSIYHNINKTNNVRKVEKSLKREQRKLSRKVISIKKGESTQKNFVKQKLKVQKLYQRLTNIRTDYLNKTIHSIVKTKPAFIVIEDLNVRGMMKNRHLSKAVAQQKFFEFRTKLINKCKEHSIELRVVDRFYPSSKTCHDCGHIKKDLKLSDRTYRCSECGYVADRDINASLNLRDAKTYTVI

SEQ ID NO: 36733 - protein, 421 aa, unknown
  TnpB Polypeptide
MQVAKSVTLKVSPKINMNKFLQLRQFYDQYQSIARFYSSYILEHNLHKSLVNDLTARDLKQILHQQLYRQIKETFDVGSQTIQEIRDVVVEAFNSWAKLYKQWFDGETEQPPSVPKVDEFTVRMNMPRVCSIFKHGKEFPFFFKVKVNGSDKRITIPVECGEYQHRLLEDALNDKYKLGTVQLVRRKGWFYFVVCIKKSVDIVKSDTVVGVDVGLKYQAVITVLHEDGYISDVEFVKYSKLLDKIRYLWKRIDYLKSILPKEQRTSRQIRRLWRKIHRINNWIAHNVSKRIVERAKQHNAMIAIENLSNFKPVKGEKSKKLNRQLSNWIHGKIKDFVLYKARWEGIYVKVVPPRYTSKRCHICGSEGFRHGVIFKCSHGYTSNADFNASVNIALRAKFPKSWGIVNMPSPSRCKAPSVREW

SEQ ID NO: 36734 - protein, 366 aa, Proteobacteria sp.
MLTAIVYRLYPSPSQQRGLNTTLETCRHWYNRCLAERKDTYEQEAHTVGKYAQLRQVKTYKATNPSAGPVHSHVLQTVVSDLDKAFQAFFRRVNAGEAPGYPCFKGRHRFKSFGFKEYGNGFKVDGRRLKVSGIGRLAVRWHRHVPGQMKTLRLTRKAGKWYAVCTCEVAPEPMPPTGLGVGIDVGLSSLLTTSDGEHVAHPAWYRTAQHRVRVAQRGVARRKKGGANRRKAVVVLQRKHARIANQRRDFLYKLSHRLLTRYDHIAVEDLHIRNMVQNHHLSKSILDAGWGLFAAHLARKAANAGREVVFINPAYTSKTCHRCGQIVGHLPLSQRVFRCACGHVADRDENAACNILRLGQSRWERT

SEQ ID NO: 36735 - protein, 321 aa, Methylococcaceae sp.
VNPFFARLNFSSAQATMRRLDKAFQAFFRRVKAGEEPGYPRFKGRDRFDGFTYPSVGDGARIIGNKLRLQHIGLVRINLHREIEGEIKTLSVKRQGGKWYGVAACELPDVEIRPSDRPIAGLDVGLESFVTHDEGDAEPPLQPLKRVLKHLRVAQRSLSRKKLGGSNRRKQKLKVAALHAKVANTRRDEHHKLAAKLTHRYGGIVVESLNIRGMVKNPKLARAVSDAGWGQFLTILKHKAAGAGVQFREVNARGTSQTCPACGAVAKKTLAQRRHVCACGYTAHRDQAAAQVILARGLLAGMRPVGLNADVGRHDPRSRLL

SEQ ID NO: 36736 - protein, 395 aa, Neosynechococcus sp.
MEKAYRYRFYPTAEQESLLRRTMGCVRLVYNRALAARTEAWYERQERIDYIQTSAMLTECKKQDDLQFLNEVSCVPLQQGLRHLQTAYKNFFDGRAKYPNFKKKRHGGSAEFTKSAFKWKDGQVYLAKCNQPLLIRWSRQLPEGVEPSTITLKLDPSGRWFASLRIDDPTNQVLEPVDQAVGLDVGISSLVTLSTGEQVANPKAFGKHYQRLRKAQKSLSRKQKGSRNRDKACLKAARIQAKISDSRKDHLHKLTTRLVRENQTIAVEDLAVKNMVQNHCLARAISDAAWGELVRQLEYKAKWYGRDLVKINRWFPSSKRCGNCGHIVERLPLSIRVWDCPQCGTHHDRDVNAAQNILAVGLTVAVCGANVRPDRHKSKGQLRKSSNGKKQKPKS

SEQ ID NO: 36737 - protein, 416 aa, unknown
  TnpB Polypeptide
MKVHRTVRYRLHPGSSRKHQQLHGTAGACRFVWNHMVEKLKDEYEFGIKPDFRHYSLCHVFTIMRRDDGTTKWLQGYSSKVLRISLKPIETSYKAFFADVKAGGKLNRKPPRFHGKWATAPSFPINYESAKVAGDSLYIQKVGWMKLVGNNPHPDGEFKSGRIRYECGHWYAYLSYEVEAQASLPHTIREVGIDRNVSEGNWAVLSDGTRHGGPDLEKKVARRRRYQRKLARQVKRSNRRKVTKVRLQRAFRAERFARLNWAHHTSKSIASEYDIAYLEALNIRGMAKSAKGTKQKPGKHVKAKSGLNRQILASAWGTLELCLNYKTEVRKVNPAYTSQTCRQCGHVDKKNRNGTEFKCTECGHADDADVNAALIILAFGNGAAGRGGGDTGGASCHSRPGKRQEMSNESLADFAT

SEQ ID NO: 36738 - protein, 524 aa, unknown
  TnpB Polypeptide
MFVSLQFKLELKREDKEKLIKLMRKQSSAIRVAYNRLKELEKEKTKNPHAQIYHKLRQLFPDLPTKYIDSAIYKAEQYPKDKIVVFGSKRLSEKLCKNHLTGKAREKLKKQWKEQRQGTLIAIGSKHKTVQGNLLLRFMELDGKLHLRITTGNRESIYAKVLREPSNSKDKWLTFMAMLLESWQTKNYFAYTVELKLRDGEVYGSVSFEIPTPEVMKYNKEKGVIAIDTNASPIHLAIAEVSKTGELLSYQTINLHHLLGLSQNSKDHQEWILAHQLLDLAIQKGKAIAIENLKKLKKGMRGDGKATLRKILHNWNAKKFLQKLKRIAILKGVELVEVNPAYTSIIGMLKYAPQLSIDKNVAGAYVIGRRALGFKEEMPENYEKLLKDKAYLEFALKRYEEREKELRELIEKESNEYRRNALESELGNVEKAKELLTNLIQSLQSEPSSCEGAYGRNPEQGETKMVSQSAWQVLKVALLFPILGKVLPRDLSPLKPVLVEGVWDRVRSRLVPLEAGGTVPMRDF

SEQ ID NO: 36739 - protein, 534 aa, unknown
  TnpB Polypeptide
MSNKQNNNDKKPRKNKKDSFQLTIKTTQIVNDNHKDILYESILLFNLHKRYYLNFNQGTFTNEKQKRTQFMHYQKRAFGYLPYQYRFLQGMKQEIGGMKKSIESNNKNYILDKETKLNQVNTTIKSVSKSYKKEKNRKKDFDTDKLAELKEILKNLYTKKQNIENDINELKKKKISICFGGKKLAKKRHRVKETELKAYREAWFHKRHNQMLLVGDHKEAKGNSLCQLSYSEETDTFSLNYKIPYCLQTKFNQESITIENVNIPAYQREEVKQQVLAHKYKDKKREALSFRFIYDKTNTFRLNISVNIKKPKIITSHYNGLIGIDINNDHLAVVEIDRHGNFLECIKLPLDLENKTTGQRNDIIGKTLIKLKDYALLKNKDIVVEKLDFKNKKRELKDRNQDRKYNKMLSQFSYQKILNGIDMIGNKYGIRVRKVNPAYTSLIGEVKYSNELGLSIHMSAAYVIARRGYEYKEKIRKIIHIKRQKAVLALPVPEEIRKDVGWYKVKNLKKKVDQINVGKYVPHNKRFEEIRIFC

SEQ ID NO: 36740 - protein, 376 aa, unknown
  TnpB Polypeptide
MFRTVKVKLPFEQSLLQTAVAFNKACQMVLDYGSEHKTYNKDKLNKATYRLVREAIPNLPSALVQTARDEASEMLLRTDFAKVVKKRLSVRYDNRCFKFFADSNYVSLTTVMGRLTFPFKHYDYMDTWKGEYTNAQLVIRRNKILLNVQVKLPDVAIKAVGKVLGIDRGILNIATCSDNTFFNSKCLRAVKGRYQFLKRRLQHVGTRSAHRKLQELSGRERRFVLNTNHCISKAIVNKPFDVFALEKLGISKKKKNGKRFNRKLGGWSFAELQLFIQYKAEAKSKCVVLVNPKYTSQRCSKCGFVDKRNRCGLGFRCGNCGFCLNADLNASRNIEVLGKSEYLRLFVNEPNVASGEASPTGVVDDSYKPPNLLSGT

SEQ ID NO: 36741 - protein, 375 aa, Tissierella sp.
MIKSVKIRLKPTSEQELLMYKSIGVARFTYNWGLSKWEEMYKEGLKPNGRKIKKIFNNTIKNQEENYWIKEVSSQGISESFNDLQKAFDNFFDKNGKYPRFKSKKRSRQSFYVRYDRMNIINNTVNIEKIGRVKFTTNYDIPILKTYVNPRCHFDGKYWYLTFGFEHNENQVELNKDLSIGIDLGITSLAVISSMDHPVKNINKSSKVKKLEKKLKRLQRKCSRKYEINKNGKQFIKTKNIIKLEEEIKLIHRRLANIRTNHIHQATNSIIKQYPYRIVMEDLNINGMMKNRHLSRSIVVQKLSEFTRQIEYKCEFNGIEFIKADRFFPSSKMCSSCGSIKKHLKLSDRVYKCECGLIIDRDKNASINLSNYKLA

SEQ ID NO: 36742 - protein, 429 aa, Campylobacter sp.
MLTSNNLISISHKIELIPNNKAKTHFKKAFGCSRLAYNWGLAKWQEYYKQGIKKSHLELKKEFNAIKKERFPFVYEVSKYATQQPFVNLNLAFNKFFKDLKQGKISYPKFKKKRESFGSYYIGGDQVIIKDNKYLKVPNLGNVKLREKLRFIGKINSVTISQKADKFYASFSMQISQDEYNKTHKITIKNNQSVGIDLGIKEFISLSNGLQIKAPKPLNKLNRLLVKRARQLSKKQHAKTKQEVLQGIKKSNNYKKASIKLNKLHSKISNIRADFLHKLSSLIIRNFNYIGLEDLNIKGMLKNHHLAKAISDVSFYEFKRMLSYKSQYHKRKIIEAPRFYPSSKTCSSCKSIKEDLKLKDRIYHCKECGLSIDRDYNASLNLKYFAQEKIGLVQAEFMPEDLTALLKDLAINNLITSKVETGIQQKSHL

SEQ ID NO: 36743 - protein, 459 aa, unknown
  TnpB Polypeptide
VKQTISTKLKLNTTREQFQLLRKTQLAYRDALNCVSQYAFANGKTSSNLHLHKGCYRQIRERYALPSQMACSVEREVSATYKGLWTKLRQNTEHRKMGFTKKRFKGLDKAPHYSSPTLTYHLGHDYSLRKGQEVSILTLAGRLHIGYSGYQNHLDLIEKGAEVGAAKLWYDQPRKQFYLIVSLEVEVPDPQPQDHQQVIGVDVGIRYLAVTSDYQGKATFHPGKRVRHRANHFARLRKRLQRKGTRSATRRLKTISRRERRLKQQANHQISTTIIKQHPHALIGIEDLSGIRERTRRRTRRRKKNPHRGHGGKGTERVSRKARRANATYSKWSFAELHAQLSYKAVLAGSMTIKVDADYTSKGCPKCGHGSAQNRPGKGLLFCCVNCHYTLHADLVGARNLTMRTLVLRQDWIATGHLSVAPGSCDPDVSASEAKAARLSRYAELRWMPDASPPCLSRG

SEQ ID NO: 36744 - protein, 320 aa, unknown
  TnpB Polypeptide
MIKVKKPYSGNRKMHPEVYSKYASHASIAEPNDPVYLDTQRMFKVIKTDNKMPYFVAITVKPRLRIWCPIKTKQYIEGNIHDSKLLKRDGHYELYLTISKEVSFDNAHPSSILAVDMGERNIATAVLFANSFTSNQSKPIFMGRNVRGLRRKYAYLRKKLGKKKLLRMVRKVSNREQRKVNDILHKISRQIDDVAKENNAVILLGDLSGIRNRTRSRRFNRIIASMPFYRLTKYIAYKANWEGTPVLTTREWYSSKLCHRCGSDNTLRPHQGLFVCHACGYQCNVDYNGAFNLAKRLGKLSSLTALSGSSAKIERLFVIR

SEQ ID NO: 36745 - protein, 197 aa, unknown
  TnpB Polypeptide
MHRIPVGILKGCTIIRDVDQWYACITTTTDDSVVEKSIKTDVTKSVGIDVGLINWLALSDGRIIENPLDFDAQAKKIKQLQKNHARKQKGSRNREKARIQLAKAWRQVRRCRDDFVHKTSRTIADQGYTFVIFEKVEYQKHGQEPPSSIGNNGCHLGKAAPINCLQGRKARWTGTSRQSRWYIAEMLWVWSGSKRKA

SEQ ID NO: 36746 - protein, 396 aa, unknown
  TnpB Polypeptide
MNRHLLYLLGTSEKDNTKESRTHQLPRLTIKAKVTDDSKTKLELLNREYGAFQAYVQGNTTVQLYSATKQQADRLRNRILRKQKGKINPKKQYPLILRRDLIDVQKDTKFPCVYWMKVPVYPKSIHLRIQTDCRYDLIEYNLREAKVIQQAGSWYIFLCIEKEAEQPSRPPPTNVLAIDLGVHNIAVTVNTANTRPNFYGQKLRAIRGKYFNLRRKLGQKKKAFYKIKALKNREFLQVNHELHKISKEIVEEARRTNAIIVVGKLKGIRKRIKEGGSSRRIRRLVNNFPYYRLVQYIKYKAAWLGIRVMEISEAWTSQTCHHCHEKGERKTQGFFRCKHCGLETNADYNGSMNIMQRALGILSRAGGILTIPIEPLVIADRSKVITGESHMLQRWE

SEQ ID NO: 36747 - protein, 218 aa, unknown
  TnpB Polypeptide
LTRHIRRFSKNIWVSKIQAKREVHSSTYPQYRGFRIRDNKLALSHIGAIKFKMHRIPIGKLKTCTIIIDIDQWYCYIATDDGIEEIDVKADTNKPVRIDVGLLNSLTLSNGKVIQNSLDFEAQVTKIKHLQKSLSRKQKDSKNREKVKISLAKACRKIRRQRDDFVHKASKLLADEYTLIVFEKLNINNMVKNHSLASAIMDICHLGKKLREYTLPTT

SEQ ID NO: 36748 - protein, 359 aa, unknown
  TnpB Polypeptide
MVCVYRSNNNVYIDKNMSEYDMNYALTELKEQHPWLRKYYHSKMLQMVAKQVAAAARKVVVAAATGKLKYRKGDDYNAFTYNQSGFKIEEDGKLYLSKIGRIRIVLHRQPVNVKQVTVCRKNGKWYADVACETLRRSFSTIIRYRKPVGIDVGITKFCHDSDNHVVEDNPQFLTKMLKPLRKAHRRVSRRQIGSNNRKKAKRMLARLYERIHNKRRDFLHKLSAYYASHYDLIFLERLKVLNLTKNHRLARKILDASWSTFKNMLQYKANRVVEVEPAYTSVDCSRCCYPVPKSLAVRTHVCTECGAVLDRDYNASLNILKRGLESLMMLLPVERREVTPVEIAMQSRKQEEAHVLRRG

SEQ ID NO: 36749 - protein, 373 aa, unknown
  TnpB Polypeptide
MLQALPVKLETSDDEKALLLATMRKYNEAANFLAEQAFRLKIANKVELQKRFYYQLREQFNLSAQFAVRVISKVVEAYKRDKSIKPVFRELGAIQYDQRNISWKGLDKVSLITLKGRIKLRTRIGEYQKARSDRIRGQADLIYRKGEFYLIAVVDAPEESEFDPIGAIGIDLGIENLATDSDGQVFSGEKVEKVRKRYNGLRARLQKKGTRSAKRHLKKMSGREKRFKRDINHVISKAIVSKAKGTLRAIALEDLSGIRSRATVIGRKQQRDRHSKWSFRQLRAFVEYKAKRDGVPVKFVDPKNTSRECPKCHNIDARNRHTRNHFKCTECGYEAMADHVAACNIAARAAVNQPIVAPLFSAVTSPPALAVGS

SEQ ID NO: 36750 - protein, 382 aa, unknown
  TnpB Polypeptide
MTLNYKFRLYPTKEQELLLEQTLDCCRWVYNYFLSLPSPMSEYDMNYILTELKEQHPWLHKYYHSKMLQMVAKQVAAARKVAVGRLSYRKDEDFNAFTYNQSGFRIEKDKLVLSKIGSIKIVLHRQPVNVKQVTVCRSKTGKKWYAVVACDVLRRPFSTIIKYTKPAVGIDVGITKFCHDSDNHAVENPQFLTKMLKPLKRAHRRLSRRQIGSSNREKAKRMLVRLYERIHNKRKDFLHKLSTYYSSRYDLIFLERLKVANLTRNHRLARRILDASWSTFKNMLQYKANRVVEVEPAYTSVDCSRCGHPVPKSLAVRTHVCTECGAVLDRDYNASLNILKRGLESLMMTMLLLPVERREVTPVEIAMQSRKQEEEAHVLRRG

SEQ ID NO: 36751 - protein, 370 aa, unknown
  TnpB Polypeptide
LRADTVYSSLRKSRYESWNVLPSILPYSGNEANYQRRQAFLKKQKKLPNYSQQCRHFKHSDNFKAIGTGKGQAVLKKLDEAWSSFWTLKRLQSEEGRLPPNIRRVRMPSYLKDRDSKQTVVRGFYVRNDCYRLDRKRSTITIIGKNLRLRYAADRVREGKKGRLDVMYDRLKDAWYAFIPVDTAPAKQAVVSGQPEKVGSIDLGICNLVAFYAENEQPVIYSGRAVLSDYVYRTKKIAELQSRLPQKQQHTSRKIGLSYRKRTRRFKHATRAMLKDLFERMKQIGITKVAVGDLNGIRDGNNLGAHTNQKLHNFWSHLQTIEWIRHMCEDYSMEFVQVSEKGTSKTCCVCAVKDIMAGYIEACTSAKKTG

SEQ ID NO: 36752 - protein, 400 aa, unknown
  TnpB Polypeptide
MIRTYKFRLYPTEEQVKKLEDTIGTCRHLYNDSLGERRVDWDVGFYEQKQLLTLRKQDNKYLKQVHSQVLQDVLLRLDKAYQAFFKKLAKYPKFKRKGKYNSFTYPQYNNGWKIIGDDDNNNKLVLSCIGAIKIKMHREIPVGTLKTCTIVRDVDQWYACITADDDDITTRTVSTSTEYDMSKPLGIDVGLINWLTLSDGNKIQNPLNFEAQAKKIRQLQRNLARKQKGSKNREKARIALAKAWRQVRRCRDDFVHKTSRTIADQGYTLVAFEKLNIANMVKNHHLAQAIMDATWGKLRQYTAYKVEKRGGRVLVVNPGGTSQKCSRCGVEAKEKLDLSVRTFECRSCGLVIDRDLNAAKNIEKLGLEQAHAETEPLLVQRQRISKFQSRKQEAHVLRRG

SEQ ID NO: 36753 - protein, 308 aa, unknown
  TnpB Polypeptide
MVTTTTTRKRTYKFRLYPTKQQEILLDNTIETCRHLYNDSLGERSTDWDVGFYEQKQILTLRKQDSKYLKQVHSQVLQDVLLRLDKAYQAFFKKLARYPKFKRKGKYNSFTYPQYNNGWKIIRDNNKLVLSCIGAIKIKMHRSPVGTLKSCTIVRDVDQWYACITAAVVDVVDDDCDGIGIVTSTSKYDLSKPVGVDVGLINWLTLSDGNKIQNPLNFEAQARKIRQLQRNLARKQKGSKNREKARIALAKAWRQVRRCRDDFVHKTSRTIADQGYTFVVFEKLNIKNMVKNHRLAQAIMDAAWVKLR

SEQ ID NO: 36754 - protein, 376 aa, unknown
  TnpB Polypeptide
MTLNYKFRLYPTKEQELVLEQTLDGCRWVYNYFLDKNMSSEYDMNYALTELKEQHPWLRNYHSKMLQMIAKQVAAARKTAAKGILSYRKHNDFNAFTYNQSGFRLENNKLSLSKIGSIRIVLHRKLPVNVKQVTVCRSKTGKWYAVVACDVLRRLYSTIIYRKPVGIDVGIAKFCHDSDDHTEDNPQFLTKMLRPLRRAHRRVSRRQTGSSNYKKAKHMLARLYERINNKRRDFLHKTSTYYSNRYDLIFLERLRVMNMAKNHRLARKILDASWSTFKNMLQYKANRVVEVEPAYTSIDCSRCGHPVPKSLAVRTHACQKCGAVLDRDYNASINILQRGLESLMLLLLPVERREVTPVEIAMQSRKQEEAYEFIRR

SEQ ID NO: 36755 - protein, 392 aa, unknown
  TnpB Polypeptide
MLNYKFRLYPTKEQELVLDQTLDGCRWIYNYFLSIPPMSEYDMNYALTELKEQHPWLRKYYHSKMLQMVAKQVAAARKAAKGRRSYRKHDDFNSFTYSQSGFRLENNNRLSLSKIGSIRIVLHRKPVNVKQVTICRKNSKWYAVAACQLLRRMYSTLIKYRKPVGIDVGITKFCHDSDNHVEDNPQLLTKMLRPLRKAHRRVSRRQTGSSNREKARHMLARLYERIHNKRHDFLHKTSTMYYSSRYDLIFLEKLRVMNMTKNHRLARKILDASWSTFKNMLQYKANRVVEVEPAYSSVDCSRCGHTVPKSLAVRTHSCPKCRAVLDRDYNAAINILKRGRESLMMLSLLLLLLLLRYYRWNAGKLHACRDRTTAVAEAGTRRGYRTSPIVVH

SEQ ID NO: 36756 - protein, 208 aa, unknown
  TnpB Polypeptide
MSEYDMNYALTELKEQHPWLRKYYYHSKMLQMVAKQVAAAAIKVVAKGRKLSYRKDEDFNSFTYNQSGFKIENDRLVLSKIAGGSIRIVLHRQPVNVKQVTICRSKAGNKWYAVVACDVLRRLYSTIIRYVKPAVGIDVGITKFCHDSDNHVVENPQFLTKMLKPLRRAHRRVSRKQSACLPDCTNASITSAVTFYTSYPTITAAATT

SEQ ID NO: 36757 - protein, 410 aa, unknown
  TnpB Polypeptide
MNLVPVNESPPLPHPPAKVPETLNNSSNSDVYKKMLNYKFRLYPTTKEQELLLEQTLDCCRWVYNYFLDKNMSEYDMNYILTELKEQHPWLHKYYHSKMLQMVAKQVAAARKVAVGRLSYRKDEDFNAFTYNQSGFRIEKDKLVLSKIGSIKIVLHRQPVNVKQVTVCRSKTGKKWYAVVACDVLRRLYSTIIKYTKPAVGIDVGITKFCHDSDNHAVENPQFLTKMLKPLRKAHRRVSRRQIGSNNREKAKHMLARLYERIHNKRHDFLHKKSAYYASHYDLIFLERLKVLNLTKNHRLARKILDASWSAFKNMLQYKANRVIEVEPAYSSVDCSRCGHPVPKSLAVRTHACQKCGAVLDRDYNASLNILQRGLESLMMLLPVERREVTPVEIAQQRSLKQEAHEFIRG

SEQ ID NO: 36758 - protein, 233 aa, unknown
  TnpB Polypeptide
MTTDDNVEKSIKIDVTKSVGIDVGLINWLALSDGRMIENPLDFDAQAKKIKKLQRNLSRKEKGSHNREKARVALAKAWRQVRRCRDDFVHKTSKMLVDEGYTLVVFEKLNIVNMVKNHNLASAIMDATWGKLRQLTAYKVERRGGRCITVNPSGTSQKCSGCGVETKEKLDLSIRTFECHSCGLVLDRDMNAAKNILKSGLEQARAETEPLLIRQRISKFQSRKQEAHVLRRG

SEQ ID NO: 36759 - protein, 375 aa, unknown
  TnpB Polypeptide
MLNYKFRLYPTKEQELVLEQTLDGCRWLYNYLLDKNNMSEYDMNYALTELKEQHLWLRNYHSKMLQMVAKQVAAARKVVAKGGKLSYRKKEDFNSFTYNQSGFRLESDKQLSLSKIGSIRIVLHRKPVNVKQVTICRSKAGRWYALVACQLPRRSFTVIRYRNPVGIDVGIAKFCHDSDDHVEDNPQFLTRMLRPLRRAHRRVSRRQIGSSNHEKAKHMLARLYERISNNRRDFLHKLSTYYSSRYDLIFLERLRVSNLTRNHRLARKILDASWSTFKQMLQYKANRVIEVEPAYTSVDCSRCGHPVPKSLAVRTHVCTKCRAVLDRDYNASLNIRKRGLESLLLLLPVERREVTPAEIVQRSLKQEEAHEFIRG

SEQ ID NO: 36760 - protein, 314 aa, unknown
  TnpB Polypeptide
MPGYLKDRDTKQTVVRGFYVRNDCYRLDRKHSTITIIGKNMKLRYATDRVREGKTGRLDVIYDRLKDAWYAFIPVDVVVAPAKQAVVSGKPEKVGSVDLRICNLVAFYAEGERPVVYSGRAVLSDYVYRTKKIAEMQSRLSEKQHTSRKMGLFYRTRTRRFKHATRAMLKDLFERMKQIGITKVAVGDLSGIRDGNNLGAHTNQKLHNFWSHAQTIQWIQHLCEDYGMDFAQVSERGTSKTCCVCGQGHNGRVHRGLHVCEENRVMMNADVCGAANIWNVAVKGELLPSTTRLPSSSRVMANPLVLRWDYAHWK

SEQ ID NO: 36761 - protein, 391 aa, unknown
  TnpB Polypeptide
MRNFRFRLYPTKEQESKLRNSLGASRWLYNYFVSKGNLPIQDTQFMLTELKEEEAWLRNYHSKMLQMVVHKIDSNRKVLNALRMNGYKIGKMNFIGEEDYNSFTYSQSGFRIERHGNTDLLWLSKIGYIEIRLHRHPTNIKQITIVRRINKWYALICCEIAKPIFRFINPKKSVGMDVGITKFLHDSNNSTIDNPLFVKKMLKSLRRAQRRLSRRHKYSKNRLKAKTRLQILHERIRNKRLDFLHKVSTRYSKNYDVIFLERLRVSSMVKNYHLARNIIDSGWSTFKNILAYKTKLVIEVPSNNTSVNCSKCGNKVPKSLAVRIHKCNVCNLMIDRDYNASLNIKKKGLLLLLPQGLWEATPVEILSESVKQEQNIVQRIVVHYRSIEETV

SEQ ID NO: 36762 - protein, 411 aa, unknown
  TnpB Polypeptide
MNLFLYPPPHPPAKVPETLNSSSNSDVYKKMLNYKFRLYPTKEQELLLEQTLDGCRWVYNYFLSLPSPMSEYDMNYALTELKEQHPWLRKYYHSKMLQMVAKQVAAARKVAKGRKLSYRKDSDFNSFTYNQSGFRLENNNRLSLSKIGRIRIVLHRQPVNVKQVTISRTKTGNKWYAIVACDVLRRSFSTIIRYAKPVGIDVGIAKFCHHSDNHVEDNPQFLTKMLRPLRRAHRRVSRRQIGSNNRKKAKRMLARLYERINNKRKDFLHKKSAYYASRYDLIFLERLRVMNMTKNHRLARKILDASWSAFKNMLQYKANRVVEVEPSYTSINCSRCGHPVPKSLAVRIHVCTKCGAILDRDYNSAINILKRGLESLVLLLLPVERREVTPVEIVLQQRSLKQEEAHVLRRG

SEQ ID NO: 36763 - protein, 378 aa, unknown
  TnpB Polypeptide
MLNYKFRLYPTKEQELVLEQTLDGCRWVYNYFFDKNMSKEDMQFTLVELKEQHPWLRKYYHSKMLQMVTHQVAAARKASKDKLLSYRKNEDFNAFTYNQSGFKIEEDGKLYLSKIGSIRIVLHRKPVNVKQVTICRKNSKWYAVAACQLLRRMYSTLIKYRKPVGIDVGITKFCHDSDNHVEDNPQLLTKMLRPLRKAHRRVSRRQTGSSNREKARHMLARLYERIHNKRRDFLHKLSAYYASRYDLIFLEGLKVANLTRNHRLARKILDASWSAFKNMLQYKANRVVEVEPAYSSVDCSRCGHPVPKSLVVRTHVCTKCRAVLDREYNATINILQRGLESLIMLLLLLPVERREVTPVEIQHESVKQEEEEAIGQVR

SEQ ID NO: 36764 - protein, 350 aa, unknown
  TnpB Polypeptide
MNSEFSLPEIITAIKSVKQQFQPTPELLQMMETFRQIVNDCIRIGLDNDISTMKKLCNLAYKQLASYEIMSYYKLCAISHAAGILANRKKSIKRNLRPRRPYATKPLLVSCYGFKIIDGILKVPLGDRQYYDILLNDYIRRVLSDPLLKIRSFTLTIDSVSICCSKEVAQVECTDIEGVDRNLRNLTIGNLENIVQYDLSKTIDIADNTRSIIRSFKRNDIRVRRKLYGKYGKRRKNRINQLLHHVSKVVVQSAKYNKSAITFEDIRHIRWLYQRGNYQGHTYRGRMNSWSFAEIKRLITYKAAWEGVPVIQLSKNETRGTSQLCPRCGKKIAQVDRRKTRQLWCDHCKR

SEQ ID NO: 36765 - protein, 429 aa, Thermaerobacter sp.
MILGGFPMRVLQAYRFALDPTPRQERALASHVGARRFAFNWGLALVKERLDACARGDDVEVPWTLSALRREWNRQKHVVAPWWRENSKEAYSSGLDGLVRALQNWSKSRKGERKGRRVGFPRFRKKGRGRESVRFTTGAIRVDDKSHVVLPRIGRVKIHEPTTALLRRIEAGTARILSATVSREGGRWFVSFTCEVERPPGRPRFPWRVVGVDAGVKHLAVLSTGEVCPNPRALEKNLKQLARWNRALARRQKGSRGWRKARRRLARLHGRVRNIRQDALHKLTHHLASTYGVVVVEQLNVAGMLKNRRLARALADAALAEIRRQLRYKCAWHGAVLVESPPFYPSSKRCSRCGAIKPSLPLSQRVFRCEECGLVLDRDENAARNLATLVAAVAGSGPETLNARGRDGRPALRQAVPEETGSRRRLIAG

SEQ ID NO: 36766 - protein, 304 aa, Thermaerobacter sp.
VVRELESVRFTTGAIRVDDQSHVVLPRIGRVKTHEPTTALLRRIQAGTARILSATVSREGGRWFISFTCEVERQPGCPRFPWRVVGVDAGVRHLAVLSTGEVWPNPRPLEKALQKVARSSRALARRQKGSRGWQKARRRLARLHARVRNIRQDALHKLTHHLATTYGVVVVEQLHVAGMVQNRRLARALADAAMAEIRRQLQYKCAWHGAVLVEAPRFYPSSKRCSRCGAIKPSLPLSQRVFRCEECGLVLDRDENAARNLAALAAAVAGSGPETENARGRDGRPAARQAIPEEAGNRHRRIAG

SEQ ID NO: 36767 - protein, 183 aa, unknown
  TnpB Polypeptide
LRGKRKEAETAERQKRKIARLHRYIADSRRDFLHKTSTKIAKNHSIVYVEDLKVLNMSASASGTKESPGKNVKQKSGLNRSILDQGWYGFFRMLSYKLERRGGRLIKVDPRNTSRTCPRCGLVSVENRKSQATFACIGCGFRSNADEVGAINVLRAGRARLACGMSGAVRPLSAGTQRDRLQH

SEQ ID NO: 36768 - protein, 363 aa, unknown
  TnpB Polypeptide
MERTIKFEIPYDKDIIQTIEEFNEAVNFCMRVAFENRTFNKNDVHKLTYYEIRGESDLQSSLVCSARDQASEMLKRERLKVLPFKKTYSAIRYNQRTFSFKDGIISMTTINGRKKIVPKVPEYFSKYLVGEIKAIVIFFKDNKIQGRMIAKIETPEKLEVKNVLGIDRGILNPVVTSNNQFFNSSEIRRVKGKYSWVKSKLQSTGTRSAKRHLKRISGREKRFMTDTNHILSKKIVEMPFECFALEKLQIKRTKKQGRKFNKKLGTWAFRQFQTFLEYKSENLGKTVVLVNCRYTSQVCSNCGHLSKSNRKGVSFKCLKCGFSLHSDLNASRNITELGKALFSRLSVNEPIVASLHKAQLQAT

SEQ ID NO: 36769 - protein, 402 aa, Shigella sp.
VKRLQAFKFQLRPGGQQEREMRRFAGACRFVFNRALARQNENHEVGNKYIPYGKMASWLVEWKNATETQWLKDAPSQPLQQSLKDLERAYKNFFRKRAAFPRFKKRGQNDVFRYPQGVKLDQENSRIFLPKLGWMRYRNSPQVTGVVKNVTVSQSCGKWYISIQTESEVSTPVHPSASMVGLDAGVAKLATLSDGTVFEPVNSFQKNQKKLARLQRQLSRKVKFSNNWQKQKRKIQRLHSCIANIRRDYLHKVTTTVSKNHAMIVIEDLKVSNMSKSAAGTVSQPGRNVRAKSGLNRSILDQGWYEMRRQLEYKQLWRGGQVLAVPPAYTSQRCACCGHTAKENRLSQSKFRCQVCGYTANADVNGARNILAAGHAVLACGEMVQSGRPLKQEPTEMIQATA

SEQ ID NO: 36770 - protein, 400 aa, unknown
  TnpB Polypeptide
MKTIFKSFKFRIYPNKKQEILLAKHFGANRFVFNYYLNKRKESYIGDDKKSLNYYDNANDLTQLKKDENYIWLKEINSQSLQSGLRNLDTAYNKFFRKQTKFPRFKSKYDRQSFKIPQNVLIVNNKLTIPKFKEGIKINLHREIEGKIIFATISKSTTGNYYVSLTCEVKHQPYEKTNSKVGIDTGIKDLAILSDGTTYENIKTLKNNLKKLKFEQRQLSKKIKGSSSRNKQRKNLAKIHEKITNIRKDYLHKVSTKIIKNHDVICVEDLAVKNIMKNHKLAQAMSDVSLGSFYSMLEYKANWNDKIIIKIDRFFPSSKTCSNCGWINQDLTLKDREWECPSCGKNHDRDFNASKNILKQGLKIILSGSGIESDIKQKQVETLPLGESMKPETHQSLFDV

SEQ ID NO: 36771 - protein, 481 aa, unknown
  TnpB Polypeptide
VSQKPGKATEEDKKKRKHKKKTKQILTRAVTHIRLIEANPGKLDALDQLVVVFQALCQRYVTLLCLADSGPDKYAAPVFETELSDRWHRVAMQQAAGIAGSWRTNRQVAYDAYLEDVADYAETKAKAQACGVPLDLKRKEPAWREWNLPVLRVPAIQANANVVVVEPSEDSTFDYWLRISTLDKGNPLRVPVKLASYHKKALQGRTLNTSTTLHKRNGVWWLTLSFDEDVPLQTEPSAPLVGVDVGIANFVTTSTGKQYGSFQGKLARRHKRDREKRRRKARLRACLEKKGVPKRKLPSTSSATGQRLGRHVKQEINRAVNLMIKEHPGARFIYEDLSVASMRFKARSMNAYLYASNLAHIPEQIAWATAKRGMAAHTVKAAYSSQECHRCHYVDRANRPDQSTFFCVVCHHRDHADHNAALNVASRWGDQELAACQKKDQIKAVLLRRHEACKQLFGLAVVQPAVQLGLWDDPPASTDVA

SEQ ID NO: 36772 - protein, 362 aa, Clostridia sp.
MKLIPDHEQIFLIENILNNYIATVNDIVSDFVSMNQIDKRTSANISTSMPSALKNQAIQDARSVFKKYTKDLKSTISFNEKNPTKKQKTVKVPVLKRPVAIWNNQNYSIGEDSISFPVWKDGKSKKLTFRVITTEYQKALLQNKLGTLRISKKQGKYIAQIAVDAPIENNHGTSVMGIDLGLKIPAVAVTDTQKVKFFGNGRENRYKKRMARLKRKSLGKAKKLKALRKLDDKEQRWMKDKDHKVSREIVNFAKENNVKVIQMEELSGIQTARTSRKNAKNLHTWSFYRLTQFIEYKANLAGIEVVYVNPMYTSQTCPACGKKNHANDRKYKCPCGFKTHRDILGARNIITAPVTGGNSLSA

SEQ ID NO: 36773 - protein, 375 aa, unknown
  TnpB Polypeptide
MNRLITKSYKFRLYPNQCQKSMIEKTFGCRRFVYNHFLAKSIEDYTQIKRSNSYNQNSKELTALKKELGWLSEVDSWATQNALRDLDAAYQNFFRRVKQGQKPGFPKFKKKANKQSYKTTNPNKFPLPIKDNKVRLPRIGWVKFKPDREILGRWLSMTISRNPSGKYFISINCCEVPYQEYETTGSLIGVDLGIKDLAITSNGEKFDDPKFLRKSEERIKLLQRRFSKKKKGSKNREKARVKLAKQHEKIANQRNDFLQKLSTHLVKNHDLIALESLRVKAMVRNHKLAKSISDASWAEFVRMLSYKCDWNRKVLVQIDTFFPSSQLCSGCGYRNSEVNDLGVREWTCPQCGAHHDRDINAANNILKEGLRIICA

SEQ ID NO: 36774 - protein, 352 aa, unknown
  TnpB Polypeptide
MKKTKTLRVRVKDNHAAQLRRMARSVNTVWNYVNELSERAIRERGLFLSAFDLQKYVQGSNKELGLHSHTPLMVCKEYATRRKQYKRRRLAWRKSHGARRSLGWVPINTGMAKWKNGAVYHAGTYFKVWDSWGLKNYNFRSASFSEDARGRWYFNVVVEFEAEASTGASTVGIDLGCKDAATVSDGTKETGRWYRGIEADLAVAQQARKKKRVAAIHAKAANRRKDAMHKLSRTLVDANAAIFVGNVSSKAMSQTRNAKSALDAGWGMLKAMLSYKCDHAGVVFEEVNEAFTTQRCSCCGSIPASSPKGMGALGMREWVCDQCGSVHDRDVNAARNILALGHERLAGGMPAL

SEQ ID NO: 36775 - protein, 421 aa, Aureimonas sp.
VALARHAGSCRWLWNHLLDLQRKTYELTGKFVFFNDMSKLLPDLKRQVEWLADAPSNALVRVAKNLDRALGDSFRRDGPQRGFPKFKVRGKCREAWYAIGQAVRVEGDRVFLPKVGAVGFRAGRLPEGRVVVGNVHRVADEWFVTLQCEVEEQIPEVVPEAATVVAVDLGLTRLMVASDGVRVKAPRHLRAAHKRLARAQRVLMLRKRGSANRGKRRCAWPASARGSRTAARTRRTRRPAAWSTARRPSSPRRSPWRAGAAACDWGCRLPTRTSARRCGRSATSALGRADAPQGGPPLRLDPDLLAVRRAQGERREADALGAHLPLRDLRPCRGPRRQRLAEPEALHGGGVLSAVPAPANMDDVGRVTPERDVPNGMSDACGDPSAGPSAPAVGRRASLKREVAADVRGANPRATPYATLP

SEQ ID NO: 36776 - protein, 365 aa, unknown
  TnpB Polypeptide
LKYNLAYKYRIYPNEIQANLILQTFGCARFVYNKILAKAGEIYKLEGKNKIVTPASLKTEFQFLKEVDSLALANAQMNVKTAFANFFQKRTDFPKFKSKKTARKSYSTNSVNNSIRIENNCIKLPKLGLVKAKLHRTIPQNYKIKSATISQEPNGAFYISVLTEFQKDIKEIPSDNNIVGLDFAMSELFVSSDNQRADYPRFFRKLEAKLVKAQRELSRKVKFSSNWNKAKLKVAKIHNLIKNSRKDFLHKLSRELVTKYNAICIEDLNMKDMSTALKFGKSVADNGWGLFTTMLQYKAMLLGKQVVKIDKWFPSSKTCSSCGAIKTELALSERVYKCDECSSKIDRDLNASINIREVGRKLLAY

SEQ ID NO: 36777 - protein, 371 aa, unknown
  TnpB Polypeptide
MILSKKIRLKPTKQQEKILYQSCGTARFIYNWTLGRQKENYESGGKFISDNDLRKEVTQLKKTELSWLSEVSNNVAKQAVKDACIAYKNFFTKKASFPKFKSRKKSKPSFYNDTNKLKVKENLVLIEKVGWIKTAEQLPMNTKYTNPRISFDGKYWYISVGTERKNNDLELSEVSLGIDLGVKDLATCSTGEVYENINKKKTIKKLKKKLKRLQKQVSRKYENSREVNNRYEKSQNIMKLEKKIRLIHRRISNIRNNNLHQITNEIVKTKPSKIVMEDLNIKGMMKNRHLSKAIAEQNFYKFITYMKYKAEFNGIEFIQVPRFYPSSKTCSKCGTIKKNLKLSDRVFKCECGYILDRDLNASINLSNYRVS

SEQ ID NO: 36778 - protein, 398 aa, unknown
  TnpB Polypeptide
MKTIHRSYKFQLLPNKEQETLMNKHFGCVRFVYNYFLNERKEQYQADKKTDNYYGQAKTLTGLKKEEETEWLKEVNSQTLQFALRTLDTAYVNFFRGNTQFPRFKSKNRKNTFTVPQHTKVIDGRIYAPKFKEGIKVNIHREIKGEIGKFTISKTPTGKYFVSILTEQEYVPSGKTGKSVGIDLGLKHFAITSDGVKHKNNRYTKRYARKLAKAQKHLSRKKKGSNSYEKQRRKTALIYEKIAHTRHDVLHKVSQSIVSDYDVICLEDLNVKGMIKNRKLSKHIADASWSMFVQLVEYKANWNDKTVVKINRWYPSSKTCSVCGYINQDLNLSDREWTCGNGHVLDRDLNASANILSEGLKIYGQGLPITKVEEKSDFGNEAHPMKPEIHSSDSVVCG

SEQ ID NO: 36779 - protein, 396 aa, Tolypothrix sp.
  misc_feature (93)..(93): Xaa can be any naturally occurring amino acid
  misc_feature (135)..(135): Xaa can be any naturally occurring amino acid
MRTAYQYKLRPTKQQAASIDRWLSMLCGQYNYLLADRFNWYEQNRCPVNACPLVCQLPELRDNPDYYSQKKTLPLLKKTHPHYGDIHSQVLQXVVKRVKVTFDRFLSGDSNGKRSGRPRFKPSDRYRTFTYPQMXDDCIQGSLINLPKLGNIKVILHRPIPNGFNVKTVSVTKKADGYYVTLSLEDRTVPSVKLDIAPDSITGIDLGLKEFLTTSDGEPVAIPQHYRKSQKRLRVIQKRVSRRKKGSNRRRKSVNQLGKQHKKVADKRKDFHFKTAKQLLSKYDVVVHEDLNVKGLSKSRLAVGLHDAGWSSFLSILTTKAENAGLLVIAVNASGTSQDCSNCGLKVPKKLHERWHFCQCGCSLDRDHNAAINIKNRAVGHSVLKAQRLLSNSRIG

SEQ ID NO: 36780 - protein, 175 aa, Tolypothrix sp.
VIFVNPKALQKASQTLTRLQRQLSRKVKGSNRYKKQKLRIAKLHRRITNIRKDASHKATTFICKNHAVVAMEDLNTSGMLKNHRLAGAVSDANFYEFRRQVEYKVIRYGGTVIFVDRFYPSSKTCSNCGAIQEISLSQRVYVCQKCQHTADRDLNASQNLEKYARLAKPCLDVEG

SEQ ID NO: 36781 - protein, 418 aa, Tolypothrix sp.
MIIYQAKLEGIDSQYRKLDEALRTGLFVRNACLRYWIDGHAKTRNDLSAYCKVLSDNPDFPWVRKLNSMARQAMSERTWAAISRFFDNCTAKKPGKKGYPKFKRVQTNVSVEYKTTGWKLSEDRRFITFTDGFDAGQFKLWGTRDLHFYQISQIKRVRVVRRADGYYAQFCIDHDRREKREPTFKTVGVDVGLNHFYTDSNGEIVANPRHLRKSEKSLKRLQRRLSKTKKGSKNRAKFRNKLARKHLKVSRQRKDFAVKMARCVVQSNDLVAYEDLKVRNMVRNRHLAKSISDAAWTQFRTWVEYFGKVFGVVTVAVPPHYTSQNCSNCGKVVKKSLSTRTHTCHHCCLVQDRDANAARNILERGLRQIAQRGEPPQATGSRTVGHTGTSTSVDETDQYLSEETPSSKSTRRNRKPKK

SEQ ID NO: 36782 - protein, 421 aa, Moorea sp.
MILTFEYRIKPSPQQAQCLDHWLELLRRHWNYALGQRLDCLRRTRCTIDRCSLISEPIGEIPQKVNYYTQQSDLKQTKILFPDYKNIYCEVQQMNLQRLDKAWKRWLVPDKKGKRGGRPRFKKSGQLRSFSFSRVNHPKSVIKFQDNLIWTRKWGVIPVMVHRPIPDGFTLKTATIVKGADGYYVCLTAESETVPTLLPQDNLQSAVGIDVGLKEFLTTSQGETVQVKKIYRNRQNHLARQQRKLARKIKGSKNSKKQQQKIALIHQKIQRHRKDWHYKTAHWLVNNYDFIACEDLNIKGLARTKLAKSILDVAWGSFLTKLEAVAVKRGVWLVKVSPHGTSQNCSNCGHKVPKTLSVRLHECPRCNLKMDRDENAAVNILKKALEKHGVGHILSACGGFVDGQPVKQETSRTECIQLSLF

SEQ ID NO: 36783 - protein, 571 aa, Bacillus sp.
MNAAKEKKKTRKKNPPSEFKKVLNVIRSMHTPLHIIEVELDVLLLQHYRMKRIGEHLRVIRNTVLGELYKNYLQMARTKKYYTLLKRYGWISCELTKTPDDARLLEKELTQLKEQLSELRDSHNVTFDFARKYGARLREKKFQLLDAVTVWSVCEMAWKTMEKIMFSDGEKPYFYKKSDLITFQGKQAERCIILKHNKKTNEFYVSYHGMNFPLKIKQNDLFITETLSHIRNYYMVNGTEIDRINVDRHLAGKPILPTYRIHNNRIVRKEIRGKIRYFVQITLEGNPVSKRKKDGSFRHTLGTGRIGGDIGTQSIGIVSKDQVFLKNLAERSSNTFETERKIVNIQRYLDRSRRTTNPKNYNVDGTIKKGKKEWIFSKKYKKAQKKLRNLHRKATESRKYAHNEDINRLRSVGDVLIIETMNIKGLQKKAKNDGKIEKTGKWKRRKRFGKSILRRSPGYFIQQAKYRFALTGGKVSEINTWTFKASQYDHMSNTTTKKQLSRRWHVLPDGTKIQRDLYSAFLLYCSDNEGQKPDPERCQIEFENFLLLYNECIQLIINNRKVVLNSGIKIS

SEQ ID NO: 36784 - protein, 170 aa, unknown
  TnpB Polypeptide
MVPKLNHRNSSNNHSMSSRKLVVSTPRNGKVQRTLERARLNLVRKHEDVVNRRSDWFWKLAHDLTNQFDVLCFETLNLKGMQCLWGRKISDLAFGEFLQILEWVAKKKRKQVVFIDRWYPSSKTCSECGHVLDKLDLSVREWRCPSCQSINGRDENAAKNNLLVFLGINR

SEQ ID NO: 36785 - protein, 365 aa, unknown
  TnpB Polypeptide
LGLGGFAYNQQVEAFNSYDKDTNPLPTYPCTTDMKGANEWLRDSPIPSSALSNAIMDFRKARSSYFRKAEYGKNRPRFASKNDSVRSFRNTAPMRRMEGDRYPLSKKLGSVRIRRRDRIRYPLESLSSWTVKRENKTYYLVLLFNVDVQPKPPVDGQVGIDVGVKDFLTLSTGEKINYPDRLHQLEDTVRWEQRKLSRRVKGSSNYRKQKATVAKANAKLRHYRENFQHQLSHKLIEDNQFIGMETLAVQNMTRKAKKKLGDNGKPVRNGQASKRAMNRSILRNGWSGFAEKVAYKAQWYGRTFVQVDRFYPSSRLCHNCGHKYDGLLLSEREWMCESCGVLHDRDVNAAMNILGEALRLNQAGE

SEQ ID NO: 36786 - protein, 297 aa, unknown
  TnpB Polypeptide
MGRIAPVSHLRTKNDSVQSFRNGQPMRRMEGNRYPLSRKLGSVRIRRRDRIRYPLESLSSWTVKRENGVYYLVLLFDVDVQPKPTANGKVGIDVGVKDFLALSTGEKINYPDRLRQLEEKVRWEQRKLSRRVKGSSNYRKQRAILTKAYAKVRHYRENFQHQVSHRLIEDNQFIGMETLAVRNMTRRAKKRVDANGKYACNGRSSKRVMNRGILRNGWSGFVEKLAYKAQWYGRTFVQVDRLYPSSRLCHDCGHKYAGLLLSEREWVCESCGASHDRDVNAALNILAEALRLSQVTQ

SEQ ID NO: 36787 - protein, 425 aa, unknown
  TnpB Polypeptide
MEKYIACVNSLVALHLSGTSIQKFSSKDVVAELPAAVKNQAIRDAKSVLQRYAKKQWKVERKRAWFAEQGKTPKRPIRDAKVPILRRPVLFVNNQNFKIDLNAKTVSFPLFRDGETAPRKTTRNSVQKVIRVATVTPHQREILTMTPHLSTLRIVIKGDKLLAQVGYAVEEPEAAELDVLLADPNTLVMGVDLGIKCPAVSYSTDGKVRFFGNGRENRYKRRKFYARRKKLQKAKKLRAIKRISDKEARFMRDRDHQVSRAIVNEAIRQGAKVISLEDLDGIREGCTKSTPTRKSRKNADKPKVDLVAKNAGESVQLELFSESETMTKKQRRKARKLSKKQIVARRKNNRSLNSWSFYRLTKFIEYKAALAGIRVIRVDPYKTSQRCPSCGEAHKAKDRKYVCECGFYAHRDVVGAINIARNAFN

SEQ ID NO: 36788 - protein, 359 aa, unknown
  TnpB Polypeptide
MEKTKTLKVRVKDKHANQLNLMARSVSFVWNYINDLSSRSIKEKQKFLSAYDLQNYTKGASKPLGLNSATVQMIGAEYATRRKQFKKAKLNWRKSKGSRRSLGWIPVRHDCISYKNGQVYHNKLFFSLWDSYGLSKYKFRSGSFNEDSRGRWYFNVVVSYTPEQSVGSKAVGIDLGCKETATDSNGYKLAGREYRKLEEKLGKSQRANKKKEVKNIHAKIKNRRKDALHKYTNTLVRNNAAIFVGNVSSQKLVKTKMAKSVLDAGWGQLKNMLDYKCDHAGVYFEEVNESYTTQTCSSCGALPLERPKGIAGLGIREWTCSECGVAHDRDINAALNILALGHGRLAGGITHHNLSGLVA

SEQ ID NO: 36789 - protein, 384 aa, unknown
  TnpB Polypeptide
MFAVKRRLKLNTQEQAKLTAHAGFSRFVYNFGLSLYWQSVQAGLKVSDSKRLAAIKKCFTNVTKNREGFEWTKELSSKVYQSAFQSLNDALSRWRKGLGKKPVYKRRKDKQSFTVYDGNGVRIVRQGRKINIPTLGTFRLQEELTASYISQTFTISCEAGEWYVSFCVDAERIPPIMHQVTEPIGIDLGVKTFATISDGTELEAPLPLKKAITKLRKFQYHNRNKQFGDRRTGQKPSNNARKYFQKLARLHQRVANQRQDFLHQTTTDICQKYAHIRIEDLNVSGMMANRKLSSSISDLGFYEFRRQLSYKAQSFGCSIDIVDRWFPSSKLCRQCREIHQKLNLSDRIFICPKCGHTEDRDLQAAKNLASCPDDKCSRVGSIRT

SEQ ID NO: 36790 - protein, 569 aa, unknown
  TnpB Polypeptide
MKFRCIKESKGTYGLSRMALVNYEKKGTIKPLTEKKSESDFITVECLLAFDKDEDKGRVLTLMRKFSSMVRFAYKRLLDGAERKELKKLLSRKYGINTRYSDDAILLAKQTLESCIEREQNPQKIVFGSRELFEQLKKKHLTGKRRDELRQKWEERRYGILHSRGDKSKEGNLNLRLVNLSNQWHLRINLGNGEYVWAKVIRSAKRKTDKWISFISSIEHAEKTDDWFPYTVRLKLRNGKIYAQFSREEKFPEVTIAKNNGVIGIDINAYPFHLALVRTAKDGNLEKYEKISLDKLLEGNSDKREYLSWQTAHQVVEIAKRERKAIVIENLTRLPKGKGGDGLPKLRQRLQKWVYKGLLQKIEIVAKRSGIQVIKVNPAYSSIIGKLKYAPPYNIDKDTAGAYVIARRGLGFKERLPKNYRGLLKDVDFLSYTIARIEDKIAKLKQEIREEKNEYKRNRLKSVLWKTRKELDTLHRYLRESGASKPATQQPVNRKMERVRGSTQVEQKSWQVLSVALAFSCLESFRDFSPLKRVLLTRDWVGAAKRNGLVPLPGQGTTALNMYSFVKFG

SEQ ID NO: 36791 - protein, 293 aa, Enterococcus sp.
NFFRDKSVGFPRFKSKKNPVQSYTTNNQNGTVALIDSKFIKVPKLKSLVRIKLHRQPKGIIKSATISRHSSGKYYISLLCKEEVRELPKSNSAVGIDLGIIDFAILSTGQKFDNNKFTSKMEKKLKREQRKLSRRALLAKQKGINLFEARNYQTQKRKVARLHEKVMNQRTDFLNKLSTEMIKNHDIICIEDLNTKGMLRNHKLAKSISDVSWSSFVSKLQYKADWYGRKIIKVDKWFPSSQICSNCGHKDGKKSLEIREWTCPICHTHHDRDINASINILTEGLRLHSMGLA

SEQ ID NO: 36792 - protein, 402 aa, Streptomyces sp.
VIRAYKFLLRPTARQVAALGEMLRDHCSLYNGALQERRDAWRHASKTTVRYGDQSAQLKEIRGFDPQRQGRWSFSSQQATLRRLDKAFQAFFRRVKAGEKPGYPRFKGVGHFDTVVFPKDGDGCRWDSAPHDPQTRVRLQGIGHIRVHQHRPVKGRVKTIAVKREGNRWYVLLSCDEVPAEPLPATGAVVGIDMGTTHFLTTSDGEHITSPRFLQTAAENLAAAQQHLATFPKRAKQRTKAHRAAARKVAQIHAKVRRQRLDHAHKTALTLVRDHDTIVHERLNTAGMTRTPKPKPDPERPGAFLPNQRAAKAGLNRSILDAGWGVFLAILANKAESAGRTVIAVDPHNTSRTCLSCGHVAKENRVTQAKFQCATCGFTANADHVGALNVLNRAGLALCDVA

SEQ ID NO: 36793 - protein, 402 aa, Bifidobacterium sp.
MGADGMVRRAYKYRFYPTPGQENLLRRTIGCCRLVYNKALAARTEAWTARRESVSYNQTSTMLTGWKKTEELAFLREVSSVALQQSLRHLQAAFSNFFDGTADYPRFKKKSRGGAATFVRSAFTWDGRTLRLAKMDKPLDIHWSRPLPDGAYPVNVTISLDSAGRWHVSILVEEHVTALPKAEGKVGVDMGVESFATLSTGEKIDNPGLRKRNAKRLGKAQRDLARKRKGSNNHRRAMLKAARIQARIADRRKDFLHKLSTRIVRENQTVVIEDLAVKNMSRRCKPETDPANPGHYLSNGQTAKRALNRGITDAGWRMLRTMLAYKCEWYGRRLVVIDRWYPSSQICSTCGKNTGRKPLNVRAWTCPACHTTHDRDVNAAKNILAAGLAVNVCGDQRKHHNN

SEQ ID NO: 36794 - protein, 481 aa, Bifidobacterium sp.
MSSKPGTIYSAYHTSQWATKTKVNAIVAMLPVWQDGLKTVAAMWQREWHTTGKLPRWIDTKPLDGGLSQRQWDSVSRQYRGMLVSWMELAENRFRSIVRDSTLDEPVKIELFRINLKHAWYEPGDDGAHWLARRIMKRVRHVMRLPDPAHCRTMSLDGKIAVIEQPHTATRFRYWARISTLEKGHPVRIPLNTDPRMEERLANGMETLANHLQLQVTGNGKLVPHLLTTRPETNPRDDGDVLGLDWGMCSLFATSEGRLHGLKLYAWLKKRDEELVNLTKALQASGIKPSRSKRYRNLNRRIRNYVTNETNRVLNLIADEQVRELVVEDLDFRSPKLGKDMNRLVSRAGRNAVNQKLKALKEREGITITKVNPAYTSQTCPSCGCVDKRNRTKQSVFHCVCCGRTGQADIIASRNILARRSRKDGWRRISKTQVREQLAQEHSQRRHRHGNKCQAGTPTTSTATAHTHPAPAGRIGGQENR

SEQ ID NO: 36795 - protein, 540 aa, Streptomyces sp.
LRELAASFVAPCPSGVAVRTRLKQLTPADETVLALVGAHLGALASRDLRVRCAEGLEHSAETWAARKRGLTPVSSSRWAGSLTKATPDQWALARRGQLAHVQSLEAGIRTIAHRLSLPVGAKGSKHAPGGYRSRREWHAKARCLHVLEDRLERERADHEAGVVHVVRGGKRLARTRHHLADAGLTASDWRRRWEAERWFLQADGESGKRFGNETIRASPDGEVSIKLPAPLTDLANAPHGRYVLACRVGFAHRGQEWADRVAANRAVAYRIHYDVDRGRWYLTASWQIPVVQAVSIAATLAHGVIGVDMNADHLAAWRLDVHGNPTGPPRRFFYDLTGSADHRDAQVRHALTRLLNWARTCGVQAIAVEDLDFGAEKTREKHGLRKRFRQLISGMPTGRLRARLTSMADQTGITIIAVDPAYTSRWGAQHWQKALTHKNRKTTRHDAAAVAIGRRALGHPIRRRTAPPRAHQRDVHGHRTVQADRRAPGREGPRPPVPGPRTRSVPPDRGANAGNQNAQHRSGRSAEHESWQQDSLPLSL

SEQ ID NO: 36796 - protein, 232 aa, Blautia sp.
  misc_feature (232)..(232): Xaa can be any naturally occurring amino acid
MQIISSYGVELRKQNIPIRQTLEIYRSAVSYLIGIYVQVWEELAEIPDAKRRFNAAEHLVHTTKKNHACFDFDIRFPKMPSYLRRSAIQHALGTVSSYKTRLDLWEKTDGKSGKPKLVYENHAMPVFYRDVMYREGAEGKDEAYLKLYDGHDWKWSCVRLDHTDMEYLRKCWSGKKASAPTLEKRHRKYFLRFSYKEEVTLAKTPVKEQIICSVDLGINTDAVCTIMRADGX

SEQ ID NO: 36797 - protein, 284 aa, unknown
  TnpB Polypeptide
MKTYKYKIYNQSNLIRLGNLLDDMWQVHVYFHKWQRQRYKDGLPYANYNAMSAHLTALKRTTHPHWKALPSQAMQEELRRIDAAYVRFFKKLGGRPHIKPRHKFKSFTLKQAGWSLKDNRLTLNFRKWDKEKWRHNKVPYTFHKHREFHGNIRHITIKRDACGDYWLCITTDFQDTEPLPTTGENVGVDFGMKDAYLTLSTGEKIQHPQPLKQSLNKLRTLNKSLSRKKKGSGGWWRCVRQLARLYRKVANQRLDFQWKLADTLCKRFDTIVVETLNLDGMKRL

SEQ ID NO: 36798 - protein, 425 aa, Cyanobacteria sp.
VQLAERHIIKSTEDSFAEIDELAFKSKNLYNAANYVLRQNFLYGWGYLTYKKMASLMKSHPAYQALPAKVSQQILMVLDKNWQGFFESLKAYKNEPTKFTGCPKLPKYKDKVKGRNLLVYTVQAISSKQLKKGIIKLSGTDISIKTTVKSEKICQVRVVPKCDCYIIEVIYNEQESTINQDNSSAVASIDLGLNNLVALTSNQPGFIPVLINGRPLKSINQFYNKRKSQLQSQLKGNLKTSSRIQRLTRCRHQKVDNYLHASSRLIIDILSQNQIGTLVIGKNRQWKNGINLGKQNNQNFVSIPHTRLIQMLEYKAKLAGIKVIIQEESYTSVSNFLNLDPIPVYGDSDAESVEFTGKRIQRGLYKTADGLLINADVNGSYNIMRKALPKALGNGIESCVVQPRRVNPLKVKAKGEGLHASHVMS

SEQ ID NO: 36799 - protein, 404 aa, unknown
  TnpB Polypeptide
MQLVEKHQIKTSHSLYSLCDTLCFLGKNLYNAALYEYRQSFIAKDKKTLGWADINKIFNANNQHDYRQLPAKVSNAVLKHLGNNITSFWGLVKACKTGNITQSVRLPKYLHKTKGRFVVEFNSQTISKKRTKEGYLVLCPKDLNLVIPTLKENVKQIRIVPKRGYFVLEVVYDIQEQERKPDKAVAAIDLGLNNLATVVTNDGSRPLIVSGGRIKAINRYFNKTIAQANSLLPKKIYTSKALDRLWLKRNNKLDHEIHKISKWLADYFDEKAISAVIIGNNNSWKTGITLGKRVNQNFAYVPYAKLIAQLTYKCKLKGITVIAREESYTSKASFLDYDSVPTVNDNQPKIFSGKRIKRGLYVSKDGKKINADVNGAYNIMAKERPDSVRSNRISLSYSPKRIKL

SEQ ID NO: 36800 - protein, 408 aa, unknown
  TnpB Polypeptide
MSNLTKTIKLRIYVTPEQEILFRQMTEQYRLACNFVSQYIFDHQFDLAYQNLNKELYSNLRHLFGLKSQLAQSSIKTTIAKYKTVKQQLFQNPYRYKDENNDWQRIPKTLEWLWKPIFFSRPQADLVRNRDYSFVNDGQTLSINTLDWRTKCPFESKHFAEYLNGSYKLGTAKLVKLKGWWYLHIPVTKTVEDFQKVNVRHVVGIDRGLRFLTVSYDEQGKTEFVSGKKIATKRHKFQELRKQLQSKGTKSAKRKLKAISGRENRWMSDVNHQISKTLVQKYGKDTLFVLEDLAGVSFEERNLSKTTKQNYDLRSWAFYQLEQFLTYKAHENRSEVLKVSARYTSQRCPKCGTIHKENRDHKKHLYSCQCGYKSNDDRIGAMNIQLLGTMWISGDNNPHYERITTASE

SEQ ID NO: 36801 - protein, 558 aa, unknown
  TnpB Polypeptide
MRTIGLPFVVAPPCGARVRTRLVVSVADADVLVAVGKHLGSLAGADLARRCGQGRLDHAGRAASRRDRKRDLTSASSSRWAGTITRTSEDTFQLALRNLVAEERSLRARSRRIRRRLAVPVGGRRGQLAGFATPAEHFEKRRRLQVLERRLVRVEERLEVGRVSVCRGGRRLARVRQHLNDAGLDDDTWRQLWDARRLFLTADGEADKAWGNETIRFHPEESWLELRLPTALAHLANRPHHRYRLSCPVTFSYRGEEVAAQAASGAIRYDICFDPKRRRWYLDASWKRAGSPGAILDLAELRRRPVLAVDLNAGHLAALVLDPCGNPLGRPSSIALELDGLPASQRDGLLRAAISDVLKVALDQGCSAIVIEDLDFADAREAGRENTGRRPSRGRPGRRFRRCVAGIPTARFRARLVQMATNRALSVVAVDPAYTSQWGAEHWLAALKQISPTATGHHAAALVIGRRGLGQRARRRGGCASNPPEDGSERATDSAVWAAPASTGLSATRTREPGSRGTRGQPHPRRKTRPASRASPDDQDGEDRSRHPELAMSSSLLR

SEQ ID NO: 36802 - protein, 431 aa, Micromonospora sp.
VLLRLQLPTRPDPRAYADWAWVACPISLPPTVPAGAVLHLPTLRVTGRQVRADVAYTHAVPKARRTGHSVALGVDWGLNTLLSAGALRLHEDGRITALGAGGQFRAAGVLAKQHRLRRLSERLHAKADHYQRLTGRDERHHLVGKLAVLRAEIRHVSARRSNLNAALAWAAARWAVDQAIAAAASVIYVEDLRSLEAKGMGATLNTRLSQQVRGQIVDRMRHLAAEAGIAVVTTPARNTSKHCPRCLTPLRHRKAPDKPTVAGWKWAICPRQSCRWQGDRDQGAWRRIAARGLTHQAKTVIDKTSGHMVIRGVVDKLEASAVITKSHRVDRSKIGPTLHKPSRPAPRRRRAPSPTRPHGSAGKRPEGHAPTDRRLPRAAHRHQGVNTTSTPTTGHQPRGAALGAGFHFHAHATPPRWETIPETQSDSGSLS

SEQ ID NO: 36803 - protein, 333 aa, unknown
  TnpB Polypeptide
MGSYEAVKVRLDPTPRQERLMVSHAGAARFAYNAGLAHVKEALENGEPADWSHYGLRRWWNANKDELAVNRDTGIVWWDQNSKESYSGGLRSLAQGLSNWSQSRKGKRKGKRVGFPKFKSKNTTMRFAYSTAFTAPAACDPYGLKLPRIGRVHCTENVYKRVDGAHLIRITVSRRVGRWYASLTVEREPTANPAPRGGVVGVDLGVKNLATLSDGAVIENPRYLRKAERKLKQAQQALSRKTKGSNRRAKAKATVARIHARVANQRQDGLHKLTTRLTRKYSEISIEDLHVAGMVKNRHLAKSISDAAFGEFRRQLEYKTARSGAARGGPLVP

SEQ ID NO: 36804 - protein, 473 aa, Waddliaceae sp.
MVVRLPIYFLELDGQRLDQQSRICNWLYNHLLEKSLELKNKYIEMQDPEIARVLYTERGLRNLVPGLKKDHLFLKTVHSSPLKNSALRLSAAIKAHQQSRKKLRKGKKAGWPRFRSWKRSWFSLLFDEPGKGFRLEGQNLTISLGSGLDRKERKVTGVLQSSSPLKGKEIRNFRLVKQLEQFFAVFTVHVILPEQKEIKRLIALDPNHKNLAYGVDTENESVEIAAPSWLKKLDQRIDEIASKRDRCKRQSQKVHLESNKGDTVDKYYWKPSRRWAKLDELLEKLRRKRREQTKTFLYTVSQKLFKRYDLVAIGDYTPDGSGLSTKMRRAMNNQSLIARFKHTLSWVAQKSGKTFCEFDEKGTTRTCHQCAFTWPDGLCPSIRTWTCPSCQTEHIRDENSAQNGLQRVLRDLKLENLVPGSGPVSVMKRWAWCALPRGVQVLPQGQSSDSFTAPRNLNEDMIVFDQNRLSNFA

SEQ ID NO: 36805 - protein, 264 aa, Escherichia sp.
MRYRNSRQVTGVVKNVTVSQSCGKWYISIQTESEVSTPVHPSASMVGLDAGVAKLATLSDGTVFEPVNSFQKNQKKLARLQRQLSRKVKFSNNWQKQKRKIQRLHSRIANIRRDYLHKVTTTVSKNHAMIVIEDLKVSNMSKSAAGTLSQPGRNVRAKSGLNRSILDQGWYEMRRQLEYKQLWSGGQLLAVPPAYTSQRCACCGHTAKENRLSQSQFRCQVCGYTANADVNGARNILAAGHAVLACGEMVQSGRSLKQEPPEMI

SEQ ID NO: 36806 - protein, 368 aa, unknown
  TnpB Polypeptide
MYPTISQIELIHKTFGCTRLVYNYYLEKKKEGNLSCFDMIKDLKNLQAEYPYLKEVDSCSLRCCLFNLDDAFKRYYKKQGSYPKFKSKYNSRRCYRTNCISSSYKDKTYQSIEVNLKKDIIKLPKLKEVKIRGYRDLEYLPGRIINATVEQASTGKYYVSVVVEENDIYTKLTPRKIIGIDLGIKDIIITSDNEKIGNPRLIEKYEKRIKRCQRELSRRIKRSNNYYKTKRRLAVLYQKLKNARKYLIHQITKKLVIENDIIVTENLNIKGMIEEKKISKHLTNVSLGEICRVLEYKAKIYGKKYIQIDSYYPSSQICSKCGYKNEEVKKLSVRSWVCPKCESNHDRDYNASYNILFEGLKKYIKQYI

SEQ ID NO: 36807 - protein, 404 aa, unknown
  TnpB Polypeptide
MKANRVERHIIYPKNPYYKMLDEFCFKSKNLYNFANYQIRQKFCTEGKYISYNQIDKLLKQENMDFDYRNMPTAQSAQQVLRLLDKNWKSFFKAIKDWSKHKEKYTGRPKLPNYLSKNGRYSLILTNMNCKLKYKQIHFPKCFNGFVLNTKVTNLQQVRILPRNNHIIIEVVYQAETPKTKQDNGRYISIDIGLDNFATIGNNVGAIPIMLNGKGLKSINQYYNKQISYYREIAKRMNNLDYTKRMNKLTIKRNNKIEDFIHKASKWIIDYTLALGVNTIIIGNNKDWKRKSKMSKKVNQSFVGIPHQEFINKIIYKTENVGIKVILTEESYTSGTSFLDGELPIKENYNKSRRIFRGLFRSNKGKLINADLNGAYQIMKKVFPNAFAEGIEGVGLHPVRVNVA

SEQ ID NO: 36808 - protein, 385 aa, unknown
  TnpB Polypeptide
VLEGWTNSYGRQVLREITEAYKTMLQEMVNYAVEHKASQATLHKVFYHRFRDRYPWLPTRIIKGCYRDAVRRAKSFRELKKKGIAKTDKPVVRKTTITYSDSQDWRLRDGVVEVRTHKGWIKIHYRNHKQLHRYLYNEWRLSSELRLKLNGKKIIVYLTFTRNFEVVYSSSNVVAVDVNENNVTLAIFRDKKLCEVYRIETGLGRIVISYAERRKRITKGKSTKTRSVKKALKKLREKERKQDIIYKTVKIIEELAIKNNAVVVIGNVRRGKRKLAEKTRKTTLRHRINQWSVSSLVEALDNKPLHVIEISEAHTSTRNPFTGKPIRSFTPSMTRIAVRGRKRVRVIKVQLRLAKLDNGLILDRDIVGAINIGLKYLSSDGGITL

SEQ ID NO: 36809 - protein, 225 aa, Burkholderia sp.
PLPDGKIKDGTNFAQDARGNWFLNIVIEMPEVPARPIRSGVGIDLGLKDFATLSTGEKLPNDRFGRRAAEKLAKAQRARKHKRHIAKLHAKVANARADFQHKLALELVRRFDYIAVGNVSAAKLARTRMAKSVYDAAWSSFRDKLRYKAIAHGATFEEVDESGSTQSCSSCGSKDSTTRPKGIAGLRIREWTCSGCGVVHDRDTNAALNILRCGRASPVVGIASR

SEQ ID NO: 36810 - protein, 406 aa, Gemmatimonadetes sp.
MIIKRAYRFRLQPTVQQVDLVNRFAGCRRWLWNEVLRLQRVRLDADLPVMGYAAMCKLAGWLRHNAETSWLAEAPSQTSQQALKDLRRAFDDFFDKSQPDKGFPRFKKRGDRDGFRYPQPSQITLDQANGRIRLPKLGWVRYRKSRAVEGQIRNVTVSRDGKHWFVSIQVEFEEEDPQHESSSEVGIDVGIARFATLSDGTVYEPISPFARRQRQLARLQRQLARKTKFSGNWKKQRARTQALHRKIRNARSDFLHYVSSQISENQAVVVMEDLRVRNMSRSAKGDVENPGKNVKAKSSLNRAILDQGWREFRRQIGYKIEWKGGLLILVDPRDTSRMCSCCKRVHEDNRVSQSLFRCVECGHTENADLNAAKNILAAGRAATACGGYPDVRGPMKQESPMAAEAA

SEQ ID NO: 36811 - protein, 411 aa, unknown
  TnpB Polypeptide
MIQLNRDYANIIGHMCYAAYKLWNVCNYERLHYRELELSRYPDWYYQKSAHKADLWYKSLPSQTAQEVLKLLDKAWKSFYALKKSGGIENPHPPYFKQEGMVITYMQMGIVHESGSDLVRLSIPKQLKEHMRSAYGIHDNFLFLKNKVFQDMDRIKQIKLYPPDRKGGCRMILIYEIPDVERKPDNGRYLSIDPGLHNLLTCYDNEGSSFIIGRNYLSICRACDKEISRVQSQWGKQQAKNGVKYPKPSKHVLRLYEKKRNRIHDYLHKVTRQIADHCKEHGINTVVIGDLQGIREGNDKGSRVNQQLHGLPYEKIYGMLEYKLTLEGISLIRQEESYSSQCSPNTPKVSKEYAKKGNRKHRGLYQENGKIWNADAVGAYNILRKYHAVSGGGFLMPVSGLDQTRVVKVAV

SEQ ID NO: 36812 - protein, 404 aa, Beggiatoa sp.
MIVTRVLKSKNLNRGKYEQLEEQAKRLGHVRSEVWHRYGSINGVSVKSDRTIRNQWLKEKRPFEVSANAWKETLRDAFGDIKANRESAKEKVRKVVYKQVSDEKKRLELYKKLKSDNWTSDEYLRRLMRKHWKHGRNHTVNQIVVRSDNYTTFQLGGCAWIKIPGLQRGKRIAIPLNTTVEPTGTLRLVLKDGEVEVHYTIEVAETQNCGKATIGIDKGYTEVFVDSDGGHYGKGLGKLLTKHSDKLKRKYQARNKIRAIANKKTHKKQNIIENNLGRKKLNRQNEKAQSQIKDTRTKGVIATALDTISRRRGSSVILVNSAGTMQMDSRHGILLGKRRGDSFHGFDGVVLQADENAAQNVLARLHDQEIDRWTPWQKVKSILLERTERLRLGLLNQDSSCNSE

SEQ ID NO: 36813 - protein, 294 aa, Sulfuracidifex sp.
MARRGSKAIRATVSMKIAVSDSLLALVNNYVKALRFSLFWLKENVKNPNEKGVLSKVHEALYTKLREEYNLPSKVAEDCYRDSLSTYKGWYNNPRRGRFPRVYKPTVWLTPKASYNLNFERMTVRIASVGELPILGYPRNLKEYTNWRIKEARLVVKDGKAFLKVVFEKPFEKVEPKESIAVDINMAEVVVGKDDKHYVRIPTRLEEVHHWKSLAENLQRKYPRRWRENKRILHRIRSSHQKARRVMEDFARKVGKWVVEVVRMMGSNVIKLESLRNLLKNVNKLPRSFTINCI

SEQ ID NO: 36814 - protein, 404 aa, Salmonella sp.
MQRLQAFKYELISDGQQERQMRCFAGSCRFVFNKALALQKERYEQGEKKLGYAGLCKLLTGWRNNKETAWLADAPVHPLQQTLRDLERAYANFFARRTDFPRFRKKGQNNSFRYPDPNQIKLDQLNSRIFLPKLGWIRYRNSRQVTGIVKNVTVSQSCGKWYVSIQTECEVSAPVHPSTSMVGLDAGVVKLATLSDGTIFEPVNSFQKNQKKLARLQRQLSRKIKFSNNWQKQKRKIRRLHTRCANIRRDYLHKVTTTISKNHAMIVIEDLKVKNMSKSASGTVSQPGRNVRAKSGLNRSILDQGWYEMRRQLEYKQLWCGGQVLEVPPAYTSQRCACCGHTAKENRLSQSKFECRACGYTANADVNGARNILAAGHAVLACGGMVQSGRPLKQEPTEASQTTV

SEQ ID NO: 36815 - protein, 392 aa, unknown
  TnpB Polypeptide
MLKAFKTEIRVTEKHINKIHQSIGICRFLYNSYLAKNQELYELFKEGKIDKKQAFMSANDFDKYINNEVKIKDEFKWIDNCGSKARKKAIVNAEMAYKRFFKGQAKFPRFKKKKNQDVKIYFPKNNTTDWTVERHKIKIPSLGFVELKEKGYIPPNVKVVSGTVSMKAGRYYVSVLCDIVDHNDYSDIKTEGIGIDLGIKDLAIVSNIDEPFKNINKTDDVRKLKKKLRRLQRQVSRKYEMNKDGKKFIKTKNIIKLEAQIRNIHQRLSNIRLNYSHQITNTLVKSKPEYIVIEDLNVRGMMKNKHLSKAIAEQSFHEFRRQLTYKCLWNNVELRVVDRWYPSSKTCSECGSIDNDLKLSDREYVCKECGVVLDRDKNASINLKNAKIFKVA

SEQ ID NO: 36816 - protein, 420 aa, Bordetella sp.
MLTATKIRLYPTADQECHLAVQFGCARFVWNRALAMKRAAWQERKESLSCYTIKGMLPVWKGGEFPWLKDADSQVMQEVIRHLDRAYRNFFEKRARLPRFKKKHAARQSIAYPQRVKLEGNLAYLPKVGWVKAVVHREIVGKIKTVTVSRESTGKYYASILADDGLPEIEPLPRIERITGIDLGLKDALVSSAGHKSGNPKPLRRALKNLKRKQQAMSRKIEAAKKRFEAAKAADDGKAYRLRDFFGANIAKDRKRVAVAHERVRHARDDWQHKASRQLADENQAVAAETLNVKGMMKNRRLSRAIADVGWGSLLLKIDYKLKQHGGRLVKIDRWFPSTKTCSCCGAIHEGLTLSDRSWLCTACGSLHDRDENAAENIRRQGILKLKAEGLSVSAHGGGVSRVSSAPATASEVGSLRLQA

SEQ ID NO: 36817 - protein, 361 aa, Oscillatoria sp.
LRQEIDRTLSGFADACNQILSVAKRDNCWNTTKLHHKVYKPVREATGLKANHVCQAIRRVIGNAKAVKEVHKFRPTSLNLDTRTFSYIEESQTVGVTLMCGRVKFKLSIGNYQLALLKGQSPTAATLKKTKLGDYYINICVNLPTEPTGKTPKVIGVDLGRREIATTSTGKTWSGQQIQAVRDRYSRVRANVQSKRTRSSRRLLRRLSRREQRFQKWLNHNISCQLIREAKELNAALAFEYLTDIRQSLNQKPRSKTERRRTNNWSFYQLRMFVQYKAAIVGIPVVFVPPAYTSQTCARCGHVHTEKGKSFRNGKKFKCLHCGFEFDADLNASLNISALGMSVIHPESPGMSCQLEGQLSL

SEQ ID NO: 36818 - protein, 372 aa, unknown
  TnpB Polypeptide
MRKAFVFKLYPNRGPTAALAAMLEGHRLLYNAAVEQRRIAWRQNRVSVSYGQQSAELKALRREIPALAPTSFSSCQATLRRLDKSFAAFFRRGARGYPRFKSRSRFDTVEFPALGDGCAFDPAAGRVYVQHVGRLKVKLHRPTEGRIKTLSLKRAQGGWYVILSCDLGAAPSYGPAEPSVGLDLGLTAFVTRSDGVAVAPPRFLRESAAALRRAQRRVARRKKGSARRRKAVAALARLHQHVANQRRDWHHKLARALVSEYGLIAVEALNIHGIARSRLAKSTLDAAWGQFLGILHSKAAEAGVQVVAVPARNTSQACSQCGALPAVPKTLADRVHRCSCGCVLDRDHNAALNILRLGRSLQSVTSATAGVG

SEQ ID NO: 36819 - protein, 238 aa, unknown
  TnpB Polypeptide
MSNNGNYYLCVAHKVAALPAENQGRVVALDPGIRTFVTFFSETSVGKIGHSNFSRIQRKCQHLDNLKSKISKANGGQKRRMRKAARRMVIKIQNLISELHHKTARFLVDNFDVILLPTFETSQMTKKGSRKIRSKTVRNMLNFAHYRFKEFLKHKAQETGKVVVDVCEAYTSKTVSWTGELVNIGGSKIIKSKVDGRTMDRDINGARGIFLRALGDTPWLRNQLALVSQGQLLADFGS

SEQ ID NO: 36820 - protein, 445 aa, unknown
  TnpB Polypeptide
LAEIPKSTLRYRGEWENSFLQVIHNRLATCKWLRPAKKRERKKGKRKSGKPIPRRPPYLLTVRFILQSGEQRGRRDAPVVVDLRKREVRIPCVGVAVPILERLARALEEENGLEPRPDFVVQLTSEGRLRIIAKRAPEPRALEIPLRIIAVDENSRYGFVVAVFDFDSNGYCRLTRFEVFKPPNHGYREGIAAALRSYADKPAEALESVRELLPFIPTPSDAERLARAALARKKKLNNAFIEGFVARVRELVRGALQEGAAAAIIVDPIDEGSLRGTPLQGTLLRVRRRLKNLSAYEGIHFVELRASGRYCPLCGAEGMENGHRVFKCPRCGTVWDRDRAAAVNLVLRYLRGLHKEECQDADTMRLADALLAWLKRHTNFLVPSPVPEGAGVRHRGPHPEGAQRAGRTVTDEPAARRARRLPPLTGGRAPRRGGDAGARAGDTEL

SEQ ID NO: 36821 - protein, 386 aa, unknown
  TnpB Polypeptide
VRQSFRYKLYNHRRNRHLGRRIDLAASAWNHAVDLHRRYYKLFKKGLPKAKLQSHLAKLRRTRRPEWLELNSQTLQEISDRLYKGWEAFFEKRAKRPPGFKARRRYRSITFKQIGYKLLASGRLQIGEHTYRFWLSRPILGTVKTVTVKRTALGEYFVSFSCSDVPAPKLMPKTGQTAGMDFGLKAFFTLNSGEVIDAPEPLRQEIGKARLLSRGLSKKARGSKARKKARLALARMHERIANKRADWHHKAALALVRRFDAIAIEDLCFSGMTKRWGRKMADLGAADFIGILSSHAVKSGRTLTKNDRFMRSTGVCPCWGSYRKLDLKEREFECCRQLWQRDRAAAQIHLEAGRRLWTGATVSPQIPVASCEIPAPAGNTAESHAL

SEQ ID NO: 36822 - protein, 244 aa, Staphylococcus sp.
MIKTHLRKIYYAIRKSSEEELREIGIPQPTISLVKEGSENIFNNILELELLPATLYQLYHKFYDDFATIVGIDIGTHHYLSASDQNMNCVYTDESDEINLLLRKYKERLKQPNIDNEEAERKFAKGVRKHINKVVKDLMHLYPGPRVFVIGQGSGINRMDTLYGRIFTYTQKSILKYSEDYDDLVLVDEGYTSLKCPDCLYVHRKNRKKNNRFVCKSCGYQQDDDNVVAAYNIAHEFLAHIHEH

SEQ ID NO: 36823 - protein, 370 aa, Clostridium sp.
MILTKKVRIIPSLEQEQQLWKSVGTARFIYNWTLARQEENYKNGGKFIKDCDLRKEITQLKKKELSWLNEVSNNIAKQAVKDACNAYKRFFKGLADKPRFKSRKKSRSSFYNDNIKLKVKPKQVLIEKVGWVKTSEQIPMNVKYTNPRISFDGKYWYISVGIEKENQILELTNESIGIDVGIKDLAICSNGMTFKNINKTRLVKKLEKRLRRLQRKISKKYELNKEGRKFVKTSNIIKLEKQIRLLHRRLSNIRNNYLHQTTTKIVKTKPSRIVIETLNIKGMMKNCHLSKTIAQQGLYGFKRHLQYKCNFYGIEFIEADKWYPSSKTCSKCGHVKSKLSLSERTYICEACGAVIDRDFNASINLSRYSA

SEQ ID NO: 36824 - protein, 397 aa, Lactobacillus sp.
MVLKAFTLRLYPNKTQRNQIYVNFGCARFVWNQMLNMHIERYKNNKKAKFQGRYSMDIMLKALKLEFPWLKQAESTSLQRVNRDLDDAFQRFFNPSLQNGFPRFKSKKNPNQSYTSKFVNNNIQIIDDHHIKLPKLGLVYFKAGRILNGKLRAVTVRVNSRKQYQASILVESENQTFKKTKKSVGIDLGLKSLTITSDGQKEDILKVDDRLNKQLRIWERKKSRRYENAKKAMAFDKHDKVLFPRTDLKQFPRYQQAVRTVAKLKKHIAKRRRDNLHKLTTRLVKDYDTIVVENLSVKNMMKNHHLSASMANASWGTLISQLKYKCAWYGKQLIIVDPKNTSRICHECKQKNHEFDSLSQSEWLAIREWDCPNCHAHLDRDINAAKNILAKGLETLA

SEQ ID NO: 36825 - protein, 459 aa, Micromonospora sp.
VKTIQAYRFALDLNPAQERAVYAHAGAARVAHNWALARVKAVMDQRAAERTYGVPDEQLTPSLSWSLAGLRKAWNAAKPDVAPWWPEVSKEAFNTGLDALARALKNWADSRSEKRKGRPVGFPRYKSRRRTTPSVRFTTGAIRVERDRKHVVLPRLGRLKVHESTRKLARRVEADTARIMSATLRRDGGRWYVAFCVEVERPDRTPARPESVVGVDVGVRHLAVLSTGDLVPNPRHLTDAQRRLRTLARAVSRKTGPDRRTGQRPSRRWRRACTRLSRAHARVANLRRDGLHKLTTRLATTHGTVVVEDPNVAEMLTNRRLARHIADAGFAEIRRQLAYKTTPNGGKLITADRWYPSSKTCSGCGTVKTKLALSEREYECGTCGLTLNRDLNAARNLAALAAQTTTAGSGPVAARGADRKTRARGQVAEKREPGTAPAGKTGTVPSQGGTTDRALTKAH

SEQ ID NO: 36826 - protein, 510 aa, unknown
  TnpB Polypeptide
MSDGVVPAIAKFSRPAGWPADVSFVFAQAPLTVSTITLSSKVRHEAVAFLEQAAREVNQVWNFCNATSYRAYYGRYGGTAKWLSAFEMNDLLVGCGEVFGKIGIDIAQAVASEHAARRSQFKKSKLRFRKSGGAKRSLGWIPFKANNLRFGLFDAMGKQVRLKGDPQPVVPAWPKRVDTPELSEAENKAAYAKIRKEFEATREAAEEALLAWEYRKIQAAHTIKLSFMGKTFRLFNGQRLVKAYRLAKQGVGALRSGNFSQDSLGDWYLNVVVDIEEVQLVPLYGEDSFQGLDPGQINALTGSDGRTLRSRRYRDMEPKIAQLQSRGHKKQAKRAHRKAKRQRQDDQAKFVRAAVDDYARHWVGNLSPEKLKQSKLKGQAKSISDSAIGAVTTTLTRIGHRAGRVVEKVNEAFSTRRCSNCQSLSGPTGLDTCVVRAWTCTGCGKRHNRDRNSGVNLSHTGELDWNASSPDDRRTFLPEPRYGKREYILASAPRHRHACGGKTSAQHPTS

SEQ ID NO: 36827 - protein, 365 aa, unknown
  TnpB Polypeptide
VILVYRYRVKSFSGLLNQQSCAVNYVWNYCNETQKHALKWNKRWPSGFDLNVLTTGCAKELGLHSGTVNAVCEQYVKSRGQHRRPYLRYRGKKSLAWVPLKGRDLKRDGKAFRYGGNTFRVFHSRALPEGKIRDGTNFSRDRRGHWFLNIAVKLPDTPTRALQRSVGIDLGLEEFAALSTGEKIENPHNYRSLEKRLGQAQRACKKRLAAGIHANITNSRRDFLHKLSHRIVREFDYIAVGNVNAAGLARTKMAKSVLDASWSSFRSMLAYKAVKHGAQYEEVDERFSSQVCSSCGSLPDSRPSGKTDLGIRQWICSDCGCVHDRDVNSARNILARSGHRTPVEGITGLGNHRPSGRVRMSTGRL

SEQ ID NO: 36828 - protein, 437 aa, Escherichia sp.
  misc_feature (64)..(64): Xaa can be any naturally occurring amino acid
  misc_feature (74)..(74): Xaa can be any naturally occurring amino acid
  misc_feature (85)..(85): Xaa can be any naturally occurring amino acid
  misc_feature (96)..(96): Xaa can be any naturally occurring amino acid
  misc_feature (111)..(111): Xaa can be any naturally occurring amino acid
  misc_feature (210)..(211): Xaa can be any naturally occurring amino acid
  misc_feature (309)..(315): Xaa can be any naturally occurring amino acid
VKRLQAFKFQLRPGGQQEREMRRFAGACRFVFNRALARQNENHEAGNKYIPYGKMASWLVEWKXATETQWLKDXPSQPLQQSLKXLERAYKNFFQXRAAFPRFKKRGQNDXFRYPQGVKLDQENSRIFLPKLGWMRYRNSRQVTGVVKNVTVSQSCGKWYISIQTESEVSTPVHPSASMVGLDAGVAKLATLSDGTVFEPVNSFQKNQKXXARLQRQLSRKVKFSNNWQKQKRKIQRLHSCIANIRRDYLHKVTTTVSKNHAMIVIEDLKVSNMSKSAAGTVSQPGRNVRAKSGLNRSILDQGWYEMRXXXXXXXIEDLKVSNMSKSAAGTVSQPGRNVRAKSGLNRSILDQGWYEMRRQLAYKQLWRGGQVLAVPPAYTSQRCACCGHTAKENRLSQSKFRCQVCGYTANADVNGARNILAAGHAVLACGGCQQTG

SEQ ID NO: 36829 - protein, 308 aa, Escherichia sp.
  misc_feature (64)..(64): Xaa can be any naturally occurring amino acid
  misc_feature (74)..(75): Xaa can be any naturally occurring amino acid
  misc_feature (85)..(85): Xaa can be any naturally occurring amino acid
  misc_feature (96)..(96): Xaa can be any naturally occurring amino acid
  misc_feature (111)..(111): Xaa can be any naturally occurring amino acid
  misc_feature (145)..(145): Xaa can be any naturally occurring amino acid
  misc_feature (210)..(211): Xaa can be any naturally occurring amino acid
VKRLQAFKFQLRPGGQQEREMRRFAGACRFVFNRALARQNENHEAGNKYIPYGKMASWLVEWKXATETQWLKDXXSQPLQQSLKXLERAYKNFFQXRAAFPRFKKRGQNDXFRYPQGVKLDQENSRIFLPKLGWMRYRNSRQVTXVVKNVTVSQSCGKWYISIQTESEVSTPVHPSASMVGLDAGVAKLATLSDGTVFEPVNSFQKNQKXXARLQRQLSRKVKFSNNWQKQKRKIQRLHSCIANIRRDYLHKVTTTVSKNHAMIVIEDLKVSNMSKSAAGTVSQPGRNVRAKSGLNRSILDQGWYEMR

SEQ ID NO: 36830 - protein, 413 aa, Streptomyces sp.
MQLRYSFRLYPEPGQARALARAFGCARVVYNDAVRARRDAHANGGPYPSLGLLSRALITEAKHRPERAWLGEVSAVVLQQSLRDAEAAYRNFFASRRGSRKGPGVEAPRMKSRKDKRAAIRFTANARWSITDGGRLSLPKIGAVKVAWSRRLPAVPSSVTVIKDSAGRYFASFVIDTDPAADAERMPATGQAIGIDLGLTHFAVLSDGTKIDSPRFLRRAEKKLRKAQRELSRKQKGSKNRAKARLKVAHAHAQVADARSEFHHQLSTRLIRENQAVAVEDLAVNALARTRLAKSVHDAGWGTFVNMLVYKAARYGRTLIKVDRYEPTSQVCSTCGVKDGPKPLNVREWTCAACGTVHDRDVNAAQNVKTAAGLAVSACGAPVRPGAIPAQREETGSHGIPTGDRAAKRHSHR

SEQ ID NO: 36831 - protein, 411 aa, unknown
  TnpB Polypeptide
VIKVVRVKLLTDAEQFSVLSETLAACNDTANLVSRVAHERRKFRERDLRAITYAQARAHAGLGAQATQSCIRKVAGAYAALRANLRAGNYGAKGSPRRMKVESAPVTFRPDAAQPFDDRCLSWRHDPTSLTTGTVSIWTTTGRMRGVGFVGHPAHVGLLRRYRKGETDLVIQDGVAYLLACVEVPAAVPVTGDHLSAGTGWIGVDLGIANIAVTSDRTLAVTLMTDFGDAALEGPAGRGSTKDRRTRNRELRERLQKKGTKSAKRLLRKRARTESRFGADINHQISKKIVAEAERTGRGIAIEDLTGIRARVRLRKPQRATHSSWAFAQLGAFLTYKAEQAGVPLVQVNPAYTSQRCTACGHTDKKNRTTQAGFLCQECGFVEHADLVGADNIALLAPSTYWAQSTVPSVA

SEQ ID NO: 36832 - protein, 404 aa, unknown
  TnpB Polypeptide
MKLNRQVRLYPNKTMKRVLDSLCDYRRYCWNRAIACWNDQYEARLIGIPQTVLDKLKSKTELTSEEQGLVNQYPSPSHYRVRDELVAQKEDWQYSFSSRVLQQAVKDVATAWDLFFKHQDNAGRPTFKTRKAPKQGFKTDTARIRNGRLLLDKPLEYQGQWKTIRFKGLDIPDGKLTLCSITRVNGRYTATFTLEVEVTPLPHIGLKTAVDANVDHFDTTEGRTTLKPEVLNPLYTRVRHYQRILARKRCKNPRAIHSKGYQATRTKLQRTYERIANIQKDLLHKFTTDIYQQFDTVVIEDLDVKKMQMSKRAKNLHRSLFGQFRQMMEYKSQKFGKMLVIADRYYPSTQRCSSCGFIKTGDDKITLGGNQKHGTRHNEYICYHCGYEDDRDHNAVLNLLALTE

SEQ ID NO: 36833 - protein, 358 aa, Streptomyces sp.
MMTGVQLRYQYRVSLTPGQRIRAARVFGCKRVVWNDALALQKPRKAANKRLGNPKHRIAQGPYWAIPKAAELGKLLITVAKKTPQRSFLTDAPVGVLQQTLRDLDQAWKAHENSKTGKRPGPKVEPPRRKSRKDNRQTARFTISDRFKVLEDGKLRLPKIGDVRVKWTRALPSVPSSVTLVKDPSGRYWASFVVETDPADDVLPWAVGDQGIDLGLNRFAVLADGSHISSPKYLRRAEKKLKKRQRELSRKKKGSNNRDQARIKVARAHAAVADARRNFHHQWSHKLTSENQAVFAETLNVRGLARGRLAKSVHDVGWAQFVSFLQPDLARNPGPFRGSGGVASQDRGDPRRSTGRHC

SEQ ID NO: 36834 - protein, 544 aa, Chloroflexi sp.
MSKQTRSKTPTFLLELPLQVEEGQAKRLQAHLEVARLFYNAVLSEGQSRLRRMKADPAWQRARAIPRSHKEDRAAAFSALREQYGFSEYALHAYAKTARCTFLAEHLDAVLAQTLATRAYRALNWVCLGQGKRVRFKSKARGLNSLENKRNDTGLRFVLETPEEGHHGYLMWKEDQLQAIIDWNDPTVSHGLDQKIKYARLIRRRASSSRAQGADGEGYRYFVQLALSGVPYHKPKHTVGSDTVGADLGLSTIALVAREGAASLETLCEELAPNEQQIRRLQRKMDRQRRAANPENYDDQGRVKKQGKKRFQWKTSRAYERTRRRKAERERKLAAHRKSLHGRTVHQIVSRGKTVTIEKISYKAWQKQYGRSVGLRAPGMFMELLRRTVASTGGTLLEVKTQQTKLSQFCHGCGQRRKKPLSQRWHVCECGVGPIQRDLYSAFLAAHLESENDLPSCARYQVPWEGAETRLRAAQERLLQRANEGQVLPRSMGIPRARARQPQSLSEPQQEPPLLPRGGRVEAWNERSEPPVLEPGESSECILY

SEQ ID NO: 36835 - protein, 193 aa, Wenzhouxiangella sp.
VHTASLKRLRRLSHSLSRKKKGSANWRKAKSKLARLHVRLANIRSDALHKLTSDLTRRFHTVGIEDLNVRGMMSNRHLARSIADMGFFEFRRQLDYKAAQRGGLVIVADRWFPNSKTCSACGSMQSDMLLSVRQWICPDCGSRHDRDLNAARNLATYAVSSTESAYGEEGSGRACKSTVKPASVKQEISTEPV

SEQ ID NO: 36836 - protein, 379 aa, Meiothermus sp.
MQTLTLRCTLKPAPEQAAALEATVRLFAEGCNHALRVAREKGEFRRFSLHRLVYNDLRSMGLSANLAIQAIARVGRKKGSRARFYQPTSAAFDVRTLSLRGESVSLTTTAGRLIVPMKLGNYQRGMLARAKSVQGGVLTKGPKGKWYINLILRLEVPTPPTGGGKVVGLDMGQRYMATLSSGIQVSGGGVKSRRIHLRNKRAEVRSKLDTGRTKGLSALWERLSGKERRFVDHTLHTLAKRIVDSLEPGDTLAIEDLTGLRSRTVKRGKEARHLHNLWPYARFRSLLGYKAALKGVRVVAVDPRDTSKTCSRCGHCDGANRKSQALFRCQRCGYQQNADLNASANIAQRAGSTGAGRRNTAPILGISTLHRPFPKAHAL

SEQ ID NO: 36837 - protein, 332 aa, Meiothermus sp.
MAVHRKVDSLRDAASPGGGRRVHRKVYRFRMEPTREQGEALERMAGARRWVWNWGLARRKEAYAATGKGLTYNQQAALLTALKQQPETAWLKEADSQLLQQALKDLDRAFKAFFEKRAGFPQFKSKKRDTPRFRIPQRVKVEGSKVYIPKVGRVKIRQSQPIDCAIKGATFKRDTQGHWYVTLTAEFEMPEVPLPPANPERVVGIDLGLKDFAVLSDGTRIAPPKFYRKGLSKLRRAQRELSRKQKGGKNRDKARHRLSKVHARVRNQRQDWLHKLTTGLVQKYDGAVHRRPEPEGDGENQAVHIGAGRGVGRVPQATGVQNGLAPQTSRRD

SEQ ID NO: 36838 - protein, 407 aa, unknown
  TnpB Polypeptide
VTDLEGLKSAAEKATPTMILTYKYRIKDKSARKALRAYAWGCNQIWNYAVALQRDCEARYRAGAPKRRWASHFDLTMLTTGVSTELGIRSDTIGEVCRTFAVARDAARRAPRFRASGGRRRALGWVPFKGRFQPMKDGALVYLGKPIRVFGTKSRPLPPKFKSGAFVEDAQGRWWLTLQCEVQQAESASTAAVGIDLGLKTVAHLSDGSTVEALRSYREYEHRLGVAQRAGNKRRTRAIHARIANIRKDHIHKATTRIAKSYEFIAVGNVDAGQLAKTRMAKSVLDAGWSMFRSQLRYKASRHGARFVEVDERFTSQVCSACGTIPASSPKGMGALGMRSWVCSDCGAEHDRDRNAALNILRIGLSAQPHADESRSIARRSSRISATSDQLFKDPHPTQSSEAKADG

SEQ ID NO: 36839 - protein, 392 aa, unknown
  TnpB Polypeptide
MYAIKRELKLNKVETSLMRGNAGFKRFVYNLGLDLLTASWSLENVKASDSKRIDAIKKVFTQITMLRPEYAWMKSYPSTVYQSAFIDLKNAFSRWREGKSGFPKKKSKKKGDSFTVYKTSGIYPEKGKPALPFTNRVVIKPGKRINLPGMKTFRIKERINFICSSQTFTVSRSANKWFVSFVLDAEKIPPIIHPIEKIGVDLGVKCLATATDGSKYEMPASTTRAKTKLGKIQWRNRNKVLGNKKLKIVASKKARSFYLKVAQLNARIANIRQDTTQKMTTSLSRKAYIIRIEDLNVSGMIANHKLANAISNNCFYEIRRQFIYKQAHYGTKVELVDRWYPSSKTCSKCNSIQDMKLSDRIFNCKVCQHSQDRDENAAKNLENAPKNKVRLA

SEQ ID NO: 36840 - protein, 406 aa, unknown
  TnpB Polypeptide
MYQSIKARIYPTDAQSEKLSQFFGCARWWHNRALNETTTTYAETGKGLSREGLNALLPALKKEFAWLGECHSQVLQSVTLNLSKAFINFFEKRAKFPNFKSKHGKQSIQYPQGTKFVDNLVYLPKLGWVKISLHRPLDGEVKTVTIFKNPSGQYFAAILTEQEGEYPVPSSEGSAIGVDLGITDFAITSTGSKYPNPRHIKKHESNLKRKQRKLSRKVKGSNSRNKARKLVARVHQRISNSRQNFLHKLSHKLVNENQVIVVEYLAVKNMVKNHCLAKAISDCGWSSFVGMLNYKCERSGKILVKVDRFFPSSKTCSNCYHRVSSLPLDVRYWTCSSCGTNHDRDVNAAVNIKAEGLRLLALGTSATAGGGDVRPSRGRKTAMRRSPAKPEAPVIAYSHGQVGSSL

SEQ ID NO: 36841 - protein, 404 aa, unknown
  TnpB Polypeptide
MIVFEFKIKAKQAQYAAIDEAIRTAQFVQNKCLRYWMDNQGVGKYDLNKYCSVLAGMFSFAGELNSQARQSSAERAWSAISRFYENCRKKVKGKKGFPRFKKNCRSVEYKTTGWKLSENRKAITFSDKKGIGRLKLKGTYDLNYYQLDQIKRVRLVRRADGYYAQFAVKSDVRIKTQPTGKAIGLDLGIKYFLADSNGNTEESPKFYRQAEKQLNRANRKKSKKYRKGAKPQSNNYHLARKRYARKHLRVSRQRKEYCKRVAYSVIQSNDLVAYEDLNVKGLVRNRHLSKSISDAGWSTFRQWLEYFGYKYGKVTVAVPPHYTSQDCPKCHHRVKKSLSQRTHVCRNCGYVEDRDVAASLNILEKGLSTVGHTGTYAWGDLPSWTIGAILSSNGGSMNQESPRL

SEQ ID NO: 36842 - protein, 403 aa, Streptomyces sp.
MATCVKRTFKFRFYPTHAQAAELSRTFGCVRKVYNMALAARTEAWALRQERINYNATSAMLTAWKKTEELAFLNDVSSVPLQQVLRHLQTAFTHFFAKRAKYPRFKSRKKSRKSAEYTSSAFRFRDGKLTLAKMDQPLDIVWSRPLPEGRQPSSATVSQDSAGRWFVSLLVEDPAIQPLPVATRVVGVDAGLDHLLTLSTGEKITNPRHERTDRVRLAKAQRELSRKTKGSANHEKARKKVARIHARIADRRRDTLHKLTTRLVRENQVVVIEDLTVRNMLKNGRLARAVSDAAWAEFRTLLEYKAQWYGREVIAVDRWFPSSKLCSHCGALAERMPLNVRTWTCDSCGTTHDRDVNAARNLLAAGLAVSACGAGVRPQRSTPGGQSALKQETHRVTRGLPLR

SEQ ID NO: 36843 - protein, 410 aa, Heterosigma sp.
LDEKTFESEETELANDLLSITTSSVVNNWEKDVIKNLKVRIYPTPTQRKIFKEWFGTTRYVYNRVLDAFENKGEKNNAYELRNKYVTSKNNSNVNEWEKRTPMNVRANTVLKLSSNYKSAFSNLKNGNIVRFKMRFKSKKDRSQALFLPKSSIEMKNGSMTIGKHSISKFWSSERKGDKYAFSKFKLKGKTKKRDINIDSQCTLTYDGLYYHVLIPKKTRPKKVQKRCENTIVALDPGLRKFQTGFSQSEIFTVERTAMLKKYNKRISYLHGKFQRNNTRKILKTYRRSANIVSDIHWKLITYLTDNYEHVLIPKFESQELQKITMSKHSNRLYDTYKHYLFKQRLIEKSKEKINTRVYMVNEAYTSVTCTNCGTINAKTRSEMSTCKTCKLLSDRDIRGSRNIFIKYVQ

SEQ ID NO: 36844 - protein, 317 aa, unknown
  TnpB Polypeptide
LRKHNPFWQLVGSQAVQDICQRIEKAYQLFFKHNKKGCCPPGFKKVKKYKSFTLKQAGYKFLGKNRVKIGNRVYQFWKSREIEGTVKTLTIKRTPLGELFMVVVVEDAPLPEIKFMTGKIAGFDFGLKVFLTCSDGFKIESPLFLKQSLNAIKKASRHHSKKLIGSANRERARRNLVRKYEDISNTRRDWFWKLALSLTNRFDVLCFETLNLRGMQRLWGRKISDLAFGEFLQILEWVTKKKGKQVVYVDRWYPSSKTCSKCGHVLESLDLSVRQWRCPSCQSVNPRDENAAKNICAVGASTAKLGDVRQCETAIAV

SEQ ID NO: 36845 - protein, 375 aa, unknown
  TnpB Polypeptide
VDKCYAAIENNPFADGEIVLKMVIQGAWYRLIFDFDNERFREGKVTLPLIKVQDGEPVFIFAVVTDNPVVQFSGDYTIGVDVGINNYATVVVREVETGRIVHETTLSQRVHSLWNSVQASERQVRFLKKKSDHLLPHRQERMSALDEAQLHREAASRKKRELAILAAQEIADLSHLWGNAVVAVEDLSWVVNTMQNGRWNRGAFVQWLTHYVTQNGGWVAAVNPANTSQRCHKCGSKVTHPTHKLSVCTEHGVMDRDVNAAVNIASRVVPRVVKARATRAKNRKLQTQLPLRTPPARASLKYPGRDRTKNVPTPKRGTRRTEGVKLPLSPARVQAPCLVTGVLADQGARGALGTSVATIKQGVSVDYEYPLCIPI

SEQ ID NO: 36846 - protein, 462 aa, unknown
  TnpB Polypeptide
MGQATRTTKLLLDLSERRQGGANTEKRAALDATEEVLNAVRAFYIDFFLAHAQKLAERVPYYSEKHLEMRERPISANELLTWAETCTVETREHPEPWEGWNFTKRFPDMPFIYRRSVIKDAIGKVRSYLSNRARWEKSGQKKGKPGLPGARDHPTLYQGTCSLALESSDPHGRFVQLKVYDGQGWRWVNYPVKCSRYLQQRLSEKAWEHKSPLLLLRAHSAELHFPQTREIAARKVRESKLDPDLVTVAVDLNVKHLAVITVRRHGTIIDTVFVTDHGLDQRRYHHLKRSAKKQWQSGKQVKGEHSSKQLWGHVRRMNEDAAHKVARIIVGVCARYPGSVLLFERLRKIRAKGASKSRRMNRKQANQLRGTINQKAREKAFVEGVVTVEVNPHGTSQYCSRCGLKGERFSIRDGKRIKERWGKLFCCPHCRYEAHADWNASVNVHHSFFDEFHWQSRRTMSG

SEQ ID NO: 36847 - protein, 383 aa, unknown
  TnpB Polypeptide
MQIRKGYKYRLKTNRSTRGQFVRFAGACRFVWNKILAMNEHRYFSGVPRLSYAESCELVAWWKQSEEYGWLKEVHSQVLQQCLKDLERAYSNLFTGRTAPPRYRKKFLADSFRYPQGFKLDGRQVYLPMVGWVEFWDSRPIKGTVKNVTVSRQGKHWFVAFQVEMDVESPAHPALADVGIDLGIATFAAFSDGTLHPPLNAYRRVAKKKARMQRRLAGMVKYSRNWKKQQRRIAQLDTRIAHCRHDFLHKLSTDTSKNHAVIVIEDLQVKNMSRSAKGTVEEPGRNVAAKAGLNKAILDQGWGMFRRMLEYKQAWRGGGVLAVNPRYTSQMCPECGHVAKANRVQQALFSCVACGYTYHADIVAAKNILARGQRERLNACSAR

SEQ ID NO: 36848 - protein, 510 aa, unknown
  TnpB Polypeptide
  misc_feature (100)..(100): Xaa can be any naturally occurring amino acid
MSRKATTPSYVVELPLEVSTPEARRQLLALFSAGTRLTNVMVQHGRNVVAAVRADPAWAAARKLPNKTLPQRKARQAAFAAVRRSHDFSEYAFHAVVARXKNSAGFKGRVGSNVAQKIASRIFKAFDEHLFGSRGQPRFKSRRRPLHSLEEKNHATGIRWDAERCEVLVQDLRLPVRLPDLRKDEWLASALQDKTKYCRLLWRQVRGTRRYYVQLVQEGLVPVKASVLARRAPSGSLGGLDVGPSTVAWVTDTAAGLVSFCEELNTPWQAIRRLQRHLDRQRRANNPENYNPDGTVKKGRKVWQSSRRQRATEARLRHLHGQLARKRANAHGVLANGLLTQACGWRDDGVSIKALQRNFGRSVGMRAPGMFLTLVHRKAERAGGARIRQDARVLKTSQYDHSTHTFAKKALSERWHVFGDGRGRVQRDIYSAFLARNAVEMVDADGVIGWTHDPVVLEAAWQRIAPVLEAKGYFIGEGCRIAPVRAQTAASSDKVHTLVCAGLAPVESFA

SEQ ID NO: 36849 - protein, 467 aa, unknown
  TnpB Polypeptide
MAAKDTKKMEIHTCYTVKIKHQLDAVPDRKTKKLNISRKRRVDDRSMQQTAEICLEALRFCVDVALKEWDHVKAQERRRAFDILLHGSKKEAPKYPEFDIRFSNMPAYMRRALIADAVGMVKSYRSNHANWKALSPAERGVEPKIGFPSRYELTFYDQERKMSNLAEGQIGLKLYNGKTWDWYYFEISASDAGYLMHLCKTRKMLSPVVDKVRGRYQIRFSFKEMRELVQDEDKLAYRILAVDLGINAAASWCVMKADGTVHAKGVIHLPCEEDRLNHMINRKRMYQQAGKKSHCVYRWIRNANRALSIETARKLIEVAVLYSVDCIVFEYLDSKGKIRGKKFRERIHLWRKNDVQKRVELQAHRLGMRLSRVCAWGTSKYAFDGSGVVDRHSIYHFEHGKKVYNYSLCTFQNGKIYNCDLSAAQNIGARFFLREYQKKGADGLPSTPLRTLSTLREFVNNGQPMAA

SEQ ID NO: 36850 - protein, 477 aa, unknown
  TnpB Polypeptide
MSCVSKTIRQQLDYRTEIAGWFEETQALFNRVAAFYFEVIEAHPEVLNLDGNGPRDTLEHLTHRTKTNPEPITPLTSVADNLPALLRRAALQAALGAAHSFHAHLARWHREKEQALDKSKKFKKRPPAPPSHWNKSVMFYAGMWKQRTATSILLKLWTGTSWCWVKFRIGGRELPGDWDVGSLQVVQRGKRWWLHTFVKKDVSTPGTVKEQVTNTPDVRVCAVTFNAKDALAVCTIQTREGTALATRFIHGGRQLNGLRKSSLGRIARRRADTGLIAQGEPDNTRLWDRVRHLDEQVAHRVSRRIVEFAQAHGATLLVFEHLIPYHPKKGSFSQRGNEKCAYWLRSKIFRYSQYKAWTEAIITCRVNPRGTGRECASCNTQITRYKEGQETSGSTPGAPLVLCTACGMRGNADRNTSLNIGQRLFARYQRKENPQTSSRAERLSKERGVPFPQVAESGARPPTELARHGEGDGHGTA

SEQ ID NO: 36851 - protein, 159 aa, Okeania sp.
MDGIINYLLLVLSKLMNKSEATTQKITISRHAGDWYLSLGYEFTPHPTPKTTEVVGVDLGIKTLATLSDGKVFESVKSYRQFEAKLSQLQYLNRNKEIGSANWRKIQLKIAKLHRKIANIRKDTLHKLTTYLAKNHGRVVIEDLNVSGMLANHKLAKIS

SEQ ID NO: 36852 - protein, 374 aa, Acidilobales sp.
MSSYQIAGKVITDNPKALESYRFVTINGKLVLDNPLDHMKLVRLARAYSIVVRKSLNLIWGGHSHKEATKLLYNILPNYVYLETAFKNAKAIAENIRFYEKNLGKDRVLAHIRRFWVASRGNKWDRGNRNIKLIPRDTHFEVLIKYPWDSSWIKAKAFFGKRFIPLLRELTQLANEKKEGYGIVVSFREHPRIHVQVPLWLYLKYFSTPKQEGYGLIAGFDINSDRVNVVVLDGNGSIVAMKTFWYSETVSHGFPRDRAKWVRLNALSDALGWCRRIGVDYIVFEELTKIKIKKYVSNPSINRKISKFPKKQVLVHGVIKALKLGLTVVLVNPRGTSNSVTHRQIMREKGLDRHMASAYIIAYRGLKVIRNNQK

SEQ ID NO: 36853 - protein, 542 aa, Lachnospiraceae sp.
MPRARHKKTTEYQASMTKAIFLFGSPNTGKRALLKKIQLYYTDLVNRDIGILSDQPGLTMELVKNDKKASVVRALEKSIRPAGVNSAFCQNAFDCAFTKLANRLDTIRIDMHAENQTPFTQSKVLYAMSILGRSREEMAAAMDGLAAGVKKKESRAFYQKQAADLRSMTTDEFLFMQKEFSDSYLTHCLSFAVPHVNREQVSLDSRLMRLEVSANTTYPYVICITNPFVKAERIIVPIRCSRDGLRRMKQYKVSKTVHYTFWGKDKIRVQASFEKKLQASNPQKYIGVDTGMNDCFYCSDGRSIGTMEQVIAYYRGVVEPSFAGLSDLRNKKAKILHFLRKHPNLPQEIRLKLLRKIDRLEKMIRTANLPYRKKRRYYAWLSEEVSADVRQYIEKTDRDTLTVLERLDIKEFRKSRRLNGELSVFARGLLQKKLMSELNWHGMAFLEVEPDYSSQTCPVCGHIDAKSRNGKQFCCPLCGHTDDADHNASVVLKNRAIDHEFLDACEKYKYDHKGRQAAIRAIGKKRSNAWKKAKIKMIKATA

SEQ ID NO: 36854 - protein, 453 aa, Rhizobiales sp.
MARVCGTRGPMRSSCCSARGSPKRVYPRSNRDRRNVVILAHRILLQPTPAQARVFEQTCDVCRVAWNWALRRWGEMYGYGGRGWRWWDWWYQEPRKYPKPSRFTVDKQWTKTKKSYPEALLVDSQSPKRVFAELETALRSFWKGVSEFPTPKRRSDEASFYIPNTVLKPDGRHIHVAKIGAVRMRLPLRLTGKIMGARVSRRAGRWYVSIQVDVGEYRRTREDDRRVGIDLGIGKSNAVVVSDGEVFEAPRSLASDSPLLRRLKRLQRVVTRRKKGSANRAKAIARVAKLQARIGDVRSNFQHQTTARICRTSEAIAIEDLTVSGMVKNHKMARAVSDAGMAEIRRQLEYKAVIFGTDVVVADKFFASTQTCSRCGSRKRGEEKLGLGDRMFHCDDCGHESDRDMNAAQNLSTLLPRVRQQLPAVCGKVTPEEIREAPVGALGPGICTRLAMP

SEQ ID NO: 36855 - protein, 459 aa, Catabacter sp.
MLTAWPTIVDQDRFPQIYDFAEKNTALAKNLYNAALFRLRQVFCGWDKTSRTDNEKEVFGEIETVRQAYPKLKVKRVLSYTILEKIMRITGNPDFFSGLPMQTAQAVVRKACDDFRSWLKALKDYKKNPSRYLGKPRMPKYCKSARKSFEVTNQDAVLYRSSTTSSSAVIKFPGISKQEKVMISGLPSYEDLRQVTVKPYYGKYILTYVFENGAPPCYPDLPEMAGVDFGTGNIAALACTDGSSVVFNGGVVKSRNQLFAKKRAAAVSSITKGTYWKHAQSKHLDLLSIKHDCQTRDSLHKISTAIVRWCIAHRVGVLVLGVNRFWKQKADMGKRNNQSFVNIPHARLRWMITYKALIAGIDVIEQEESYISKADATVDDPMPVYGKEEGRPVFSGKRIQRGLYKTASGLILNADCNGAANILRKAVPGAWKNTKDFKFLACPESVGYWVLNPKYKQTA

SEQ ID NO: 36856 - protein, 397 aa, unknown
  TnpB Polypeptide
MLSTNLTDNRLFEKIDLSLQNTKEGVLMQNRAIKYRIYPSAEQRELFAKTFGCCRKIWNLMLADKITYYQQTQKMLQTTPAQYKKTYPYLKEVDSLALANAQMHLQTAYKNFFRNKNIGFPKFKSAKRCRKSYTTNCQNGSIRIEDGRIRIPKAGSVKAVLHRLPERSWKIKSATISQYGDGTYYISILFEYKEAPASPAPVTEEQVVGLDYKSAGLFMDSNGNCQNMPGYYRMAQNKLAKRQRKLRHKVPGSRNYKKQQERIARICRHTSNQRKDYLHKLSTATAKQYAYVCVEDLNMRSLSNKGFGNGKATLDNGYGMFLAMLDYKLAERGGKLVKVDKFFPSSQICHCCGCRNPEIRNLRIREWICPDCGTVHDRDTNAAKNIKTEGLRILLAA

SEQ ID NO: 36857 - protein, 428 aa, unknown
  TnpB Polypeptide
MLRAIKIRLYPNKTQEEYLSKLLGCYRFVYNQCLDKKIKTYTSDKTNLGLKELGNYFHQELTKSEKYVWLQEHNTKVLKQSIINLLDSYKRFFVNGNGFPKFKSKHDNNHSCRFPIDAISKRNEYLTNKITLTSELKNIKFKCSDKYKSYLNKHNEGIKSATLTRTKSGNYFLSILIDGDLMKEKSKPTNDFLGIDLGIKDFIVDSNGNSVENIKIKRNNQKKLAKLHRELSRKELLPTGEFKFNKKYNKEVEIKKPSKNREKARKKLARFYEKLNNKKENYLHHVTNKLLDENQVIAMENLNVSGMMKNHNLARSMQELSLYRFKEMLKYKANWYDRDIVEIDRWFPSSKLCNCCGYKNTKLELKDREWACPDCGVIHDRDKNAATNILNEGKRIFENVEKENLSQEKIGHRLPELTPLESKSIDPQ

SEQ ID NO: 36858 - protein, 366 aa, unknown
  TnpB Polypeptide
LNKSFKVRIYPTKEQQVLLEKTFGANRFVYNYFLNLKSKLYDFYKIKLSFIDCSKVLTELKKHRDWLKEVDSVSLVQALRDLDSAYQRFFNSHGKYPKFKKKDDKNSYRTGGRTLRVDNRYITIPKVGMLRFRDNYKLNDKNTLKVYNVTISKTSSGKYYASISAEVDIKHLETTNQNVGIDLGLKDFAILDTGEKIKNPRILKHLEVKYRKLAKDVSRKVKGSANFRKARIKLARFHEKISNIRKDFLHKLSTMLVSEYDIICMENLNISGLMKNHTLAKSFQDVSLSEFIRQLEYKAKWYGKTISKVDRFYPSSQLCSSCGFKNKDVKNLNVREWTCPECGVHHDRDINSAINILNEGLRLLNS

SEQ ID NO: 36859 - protein, 395 aa, unknown
  TnpB Polypeptide
MYLTKKIRLLPTKEQEVLFWKSAGVARWSYNFFLGYNQEKYKEWLEDNTKERFVSESDVRKYINNVLKKTTHTWLKEVGSNVMKQGVKDASESLKRFFNKTSNYPKFKSKKRSKPSFYVNYESLKRTPNGFYGEKIGVVKTRESLPKILKGQKYANPRISFDGKFWYLSVGYKVKIKQVKLTDEKIGIDVGLKDLAIVSNSNNSYTKKYRNINKGYRVRLLEKRLKRSQRRLSRKILNNIESYNKNRIPTYTRPLEGCKNIQKQKHIIQNLYRKLFNIRTNYIHQVTTEIVKTKPSKIVLEDLNIRGLMKNRHLSKSISDSKWYEFRRQIEYKAELYGIEVLIADRFYPSSKTCSCCGNVKKDLKLSDRVYRCDCCGNIIDRDINASINLARYKI

SEQ ID NO: 36860 - protein, 426 aa, unknown
  TnpB Polypeptide
MPSKTLTRTVAVNCFGSSLTRRILRSVEDAYRRMVEEMVEYAVRHGASQATLHKVFYAKFRREHPWLPTRLIKGAYRDATRRTKSFRAAKKRGKAYTEMPEVRHVTLTFSDAQDWRLEGGALKLRIGGRWVDLRCSSHKQLHRYLYGGWRLTEELKLKRRGKHWVAYLTFKRDFDVDPDPRNVVAVDVNENNVTAAVFVGGVLREVWRLETGLGRMVIAYAERRRKIAEGRHTSDREVGTKLKRLRERRRKLDVVRKAAKFIERLAEEHNAVVAVGRITQRAKEKMEEDKGMRLRHRIHQWSVRTLVRLLEEKPIQVVEVSEAETSSRTPSGVRITFSPLVIRTAVRGASGRVRPMKIRLRVGRAGDEVWERDVLGAVNIGLRYLQMGGFVALAPTGAHAARAMLVNPHLGPTPLAEISTIIDRHR

SEQ ID NO: 36861 - protein, 342 aa, Escherichia sp.
  misc_feature (33)..(66): Xaa can be any naturally occurring amino acid
LSGLTKTSSGSGLLFPDSKSGDRMMHSATRRAXXXXXXXXXXXXXXXXXXXXXXXXXXXXXXXXXXIFLPKLGWMRYRNSRQVTGVVKNVTVSQSCGKWYISIQTESEVSTPVHPSASMIGLDAGVAKLATLSDGTVFGPVNSFQKNQKTLARLQRQLSRKVKFSNNWQKQKRKIQRLHSRIANIRRDYLHKVTTTVSKNHAMIVIEDLKVSNMSKSAAGTVSQPGRNVRAKSGLNRSILDQGWYEMRRQLEYKQLWSGGQVLAVPPAYTSQRCACCGHTAKENRLSQSQFRCQVCGYTANADVNGARNILAAGHAVLACGEMVQSGRSLKQEPTEMIQATA

SEQ ID NO: 36862 - protein, 454 aa, unknown
  TnpB Polypeptide
MATVTQAYQFALDPTPRQRRALASHCGAARVAYNWGLQLVEARLQQRRAGKDVDLPWTLFQLQWEWNRAKQQVAPWWAENSKEAYKSGLDGLARALQNWTNSRAGRRKGRPVRFPHKKRKGRSRDACRFTTGAIKVLNDRTHIQLPRIGVLKTHESTRKLARRVEQGSARILAATISRTADRWFVSFTVEVQRQVRSGNGKTDVVGVDVGVRHLAVVSTGTTIANPHALERSLRKLRRLNRQFARRAPASTRRAQTRRRLARVHARAANLRRDALHKLTTTLATEHGTIVVEQLNVAGMMRNRRLARALADAGLAELRRQLTYKTCWYGSRLVVADRFYPSSRACSACGWVKAKLTLAERTFTCEACGLRLDRDLNAARNLATLAHHVAQSGWETQNARGADQKTQPAGQVAMKREVGTERRSGRTDTAASQGAATWIVQHPLGCSPPGNGWRS

SEQ ID NO: 36863 - protein, 242 aa, Streptomyces sp.
LPRRLSRQRRTNGNGSATHARRINAGRDTELAPVAENIDSAQGLTCIGVDLGIENIATASTGYLAAGRGLGRYRKRQLALRAKLQKKRTKSAKRRLKARARKEARHAANQNHIISKTIVTEAERTGRGLSLEELKGIRNRVRLRKPQRVALHSWAFAQLGDFIVYKAKRAGVPLVFVDPAYTPQMCAECGHVDKRNRVDQGLFICRKCGVVAHADRNASHNIATRGENVWKAGRESRVPATP

SEQ ID NO: 36864 - protein, 398 aa, Kribbella sp.
MSRFRIYPTPAQHAALLHHCAHARHIWNLALEQWSMWTRDKGPTPGYVEQSRQLTEARAAFGWLRAGSQTVQQQALRDFDHAIRNFHAGTHRRPTWRKAGLHEGFRIVGPPATRIVKLNRKWSQVLVPKVGWVRFRRSRAVPDAKSYRVTRDRAGRWHIAFAVIPKPIPAPGTGDVVGVDRGIAVSAALSTSDLLACPGWSKCEQERLKDLQRRLARCLRGSNRRRRVKAALAKLHARAADRRKDWVEKTSTDLARRFDVIRVEELRIASMTRRPKPKPDAQRPGSYLPNRRRAKAGLNRGILTNGWGDLVRRLEDKAPGRVEKVNPAYTSQTCSVCGHCAPENRENQTVFRCVVCGHRAHADVNAAVNIAAGRAVSARRETPVLVSPKREPQLATSA

SEQ ID NO: 36865 - protein, 413 aa, unknown
  TnpB Polypeptide
MKIAMTAPRIRLIIADENYKEQLYWLSCVASDLRRARNDMMRSCLVYWQKQIKGEDVPLKDNGKHLEYNTHIRRELTEDYEFANSTLLWEAAYRTAQIFKAKKKDIIKGDCNLPMFKDKSIPVRGLGTEKSPKSKLWVEDGVYYFKPLSLNGIVFKFVNIHKDNSLKVILGRVIDGGYKFGDSQIIKDGKIWYLHMSYSFEQDMSTNKLNPDIVCGVDLGWSIPAVCGLNKGYNRVFLGDSQQLQRFKTQIKNRRKNLSRQRNNLESGHGKIRSMKALDRLSCKESNFVKTYNHTISKNIIDFCFKQQAGTIHLEKLNKEVKKNKFLTAYWSYYQLQNMIEYKAKKEGIGIKYIDPAYTSQMCSECGHTARENRKTQSEFVCIECGYKGNADYNAAVNIARSTEVKVKAKIAS

SEQ ID NO: 36866 - protein, 344 aa, unknown
  TnpB Polypeptide
LPKLKAVKARLHREYSGQIKLAIVSQVSSGKYYVSILVETEHKELAHTNHNIGIDLGIKDLCITSDGKVYENLKIMKKYEKQLVKLQRQLSHKGKRSKNYYKTKKKIALCHEKIRNIRKDYLHKVSHEIISENQVIVSENLQIKNMVKNHHLAKAISDVSWYELTRQLEYKAKWNGRKYIKIDTFYASSQLCSVCGYQNPDTKDLSVRTWICPKCGAEHDKTTRLMLKLEFDGVIDMKIREVNENKKQFIALLLLADELPHAEIYVHEDDCTKQIDGFIGLNDDYIEGVFVKETMQSKGIGKQLLNHAKEFKSKLKLSVYQENEKAIKFYLREKLAYFVPVNTT

SEQ ID NO: 36867 - protein, 373 aa, unknown
  TnpB Polypeptide
MPKVNRGYECVLYPDAEQKIFFAKSFGCVRFIWNKMLEAKINHYKEHKKTLKITPAAFKKEFPFLKEVDSLALANTQLNLESAYKKFFKKEAGFPKYKSKKGKNSYTTNNQNGTIAVIETEKGVFIKLPKVGLVKAKLHRKLPKNSVIKSATIKQSKSGKYFCAILIEKEVLDVKSISVSPDKVLGLDYSSRHFYIDSDGNIADYPKYYRQKEKQLRRAQKKLSRRQDGSNNKNKARIKIARLHEKISNQRKDFLHKLSRKIANSYDAVVVENLNLRGMAGSLKLGKSINDNGFGMFRTFLKYKLEDQGKQLIIIDKFYPSSKTCSECGYINKELTLKDRTWICPSCGTTHNRDYNAAVNIKKEGLHILNLAV

SEQ ID NO: 36868 - protein, 493 aa, Lysinimicrobium sp.
VVASSVVVVARHTTFQLVADPTAEQARALARHEGAARFAFNQGLRLHLNARRAVKEGTASADGDRHTDPVKVPWTGFDLINAFNAWKKTADAGRRFVVDSSGVAELEVTGLAWRSEVSAQVFEEAVVDLGRALKAWTDSRRGKRAGRTVGHPRFKQKSHERGSFRVRNKVSRTKKGQRSTIRLGERGPRSVTLPGIGAIRVHDDTRRLRRMLDKGRARIVFASVSRRGGRWRISVNVEAAEFHPEAQHPARDHADLSGWAGVDLGLHAPVVIALADGTQTLRIDEAPKAMRAAQPMTRRLSRSVSRKVKGSVNRRAAVQRLARHHERIRARRHHFLHQVSNLSVKTHDRLVIEDLNITGMLANHRLAAAISNAAWAELARQITYKTAWRGGRVLAADRWFPSSRTCCACGRINTTLTLADRVFACDGCGNAIDRDLNAAVNLAAWGDKHASQVLDPEARGQVTNAHRRAGSGRCTRVDETCLDDVGTLTAPAA

SEQ ID NO: 36869 - protein, 405 aa, unknown
  TnpB Polypeptide
MLVIRSWKYRLYPSKNQEKMLNRHLDECKSLWNSLLEYTKKHYKKTGQFPSRKELYLLTKETTIFSQVAQNVADRLVKSLKGMIARKKAGKRTGFPRFKSVDRMKSFTYPQFGFELTDRLELSDVGSIAIKKHREMKGKIKTLTIKRSPSEKWFAVFATETDAEAPARREGLKVGIDLGIEHFGYLSDGKIIENPRHLKRAEEKLKEAQRQLSGKLKGSKNRRKARLRVAIAHEKLANKRRDFLHKISRQLIDSYSLIAMEDLNVNGMAHGFLAKHVLDCSWAEFTSMLRYKAEEAGCDVVLVDPACTSQECSSCGQIRKKTLAERWHDCPCGASMHRDLNAAINVLNRAIANLRNQVRQSESANDSDTPGTGECQAFGEGTSTHYKYNGHVSSMKQEAHGFSRG

SEQ ID NO: 36870 - protein, 425 aa, unknown
  TnpB Polypeptide
MASITLVTESKLYLKDNISLYDYFDDYSRLFNFLVRRCIHHLKNKLNGESESRYRTNLMLEFNLTNRMAKAVMRTAKNQLKLLNESARYQYNNLYKRKRSLFKKIAKLKVILSSSSATLKQRKLAKLQLFWTQMKLNKVNQLIDNGLKLHLTFGTKQLLKTNKAKFLAKRDNQVIYIGDKNETCGNQQFQISFNSNYNRFEYKLRLDNQWVFSNDKYIFGSFVLKNKEAKKDILRTLSEKKSNPLTYRIIKQQDVLYLQIMYRKETMDVTRGDYGVLGVDFNKGFISVSEINSDGKLQSLTRYNYLHQGKSTKTKTSMLNLVSKLVSQAVNVGKDIVIEDLVSLDSNKKQEKTTSKNYNHMINSLKFGLFKRCLLNKATKEGVFVHMVNPYNTSKIAKLSYTDIMKLNVHDAASYVIARRFYQYD

SEQ ID NO: 36871 - protein, 381 aa, unknown
  TnpB Polypeptide
MLKAFKYRIYPTDKQKEHMTRIFGCVRFVYNLGLETKIQAYASARVNIDCFTLNKQITDLKKEAIWLKEAQGQALQASIANLDNAYTAFFKGAGFPKFKNKYSKQSFSIPQYATVNFSKGQVYIPKLKCIDCVFDRTFDGIIKTVTISKTVTDKYFVSILVDNQKDLPIKADIKEETTVGIDFGIKDLAILSDGNKITNPKWFKQSQARLRVEQRKLTRKYKPKSKKQSKGYLKQKLVVAKLYEKIKSQRVDHLHKLTTSIIKKYDTIIIEDLNVSGMIKNHKLAKAIADVSWYELKRQLIYKSEWYGKNLLTIGRFDPSSKTCSNCGKINKELTLKDRAWTCGCGISHDRDHNAAKNIKHFGLRNIKGFRVEPSDVKVVH

SEQ ID NO: 36872 - protein, 405 aa, unknown
  TnpB Polypeptide
VGTATCGSYVPALRYAPYIGGVEKAFEYRIYPSQEQIQLLARTFGCSRWVHNHFLEEKVKVYKETKQSLSYGDCCKMLTKLKKQKDTVWLAEVENKALQQSLRDLDRAFVNFFKRANQGVGFPKFKKKKSRKTYRTCRGRVVDDSHVWIPKVGAVKARISRPIEGRIVSATIKQVPSGKYFIVFTCVDIPELPKIKTGRAVGIDLGIKALVTTSDGEKIGSLEGTKKLEKRLARQQRKLSRKKKGSNNRKKQKIKVAKVYEKIANKKKDHLHKVSAKIVSENQVICAETLNVDGMMKNHHLAKSIAMQSFATFLGFLEYKAKEKGKIFVQVDRWFASSKTCHSCGSKMDAMPLSIRSWECKSCGAKHDRDINAAKNILAEGIRILEGTEGHSGTTAKSFAVTLVE

SEQ ID NO: 36873 - protein, 409 aa, Halococcus sp.
MSTATKTLQATLAPPTAHKERKLQDTLGEYRSALSEAFDSGADTMNGVSEVVTPYDLPYQAKAALCSYVPKLRKTYNARELDDDHPLRFTNQAAKFDHDATREHEYTWWVPRPGRGTNFWIPLRINPEQGELWSDLLDGEASAGEIRLQQHRTSWELHVTVEFSVPDPETDGEQTPVGFDIGETALITGCALKRDLPVQPRMWSGKRAKHLRKEMFTTLRRLQERDASERRVDERFEHYQNALTDIVEKASREAVEYAQRFDSPVIVMEDLGFIRERLDYGKWMNRRLHAWAFARLQGRVEDKATEAGIPVEYVNPAYTSQTCHECNHIGKRSEQAEFRCTNPECRVTEFQADISAAASIAQRLDPWGERCLWKTDSDDSPRDGSGCDTATRHPEQSAPTQMTLGGWSS

SEQ ID NO: 36874 - protein, 398 aa, Halococcus sp.
MEVRRTVPVKLDVADSDADLLRETIRQFLDAANYVVDAAYDGEWVETRKSVLHDETYSEVRDRTALHSNHVQSARDRAVDALKSVVAKWSKGRYSALPAFTTPFVEYNQRNATFHEDSVSLATVEGRITAEYVLPDEDRDTPHSRYLFNDEYETTGATLHYRNGEFSLHVRTKADVDTPDRPENGTVLGVDLGIENIAVTSTGTFWTGDELDHWRTEYAERRRSLQECGTRWAHENVQSVGHTETGRFEQYLHRVANELVAEAVENGCSYIAFEQLTDIRERMPRARQFHEWAFNRLFGYVSYKAEAHGISVRQVNPAYTSQRCSTCGFTVDANRDRESFACQSCGYENHADYNAAKNIGLKLLRSQTGTEGGAPVGVRLNSGMLNTSGLTSAPTGSV

SEQ ID NO: 36875 - protein, 417 aa, Halococcus sp.
MEVRRTGIVKLDVLDERRDDLHTTKEQFLRCANRASEFCWSDRHYDECVTSKAKAERALYDDLKADTDLTANLVQKAIRRAVEAVKSGVDRWKKGRRTNQPQFDSWSVVYDKRSATFSRSEVSLSTVNGRAECEFVFPADSPTPYERYIVNDDYEFRMATLQYDDVTDGFYLHLSTRKYDGVDEADSEASTDTEHQTVLGIDLGVNSLAVASTGTFWQGDDYDHWVREFEKRRAKMQQRETQHGYNALRRLGKRERAWRKQYVHMVANEIVTEATETGCDVIVFEKLDDIRDRLPFAEWHHIWAFRRLYEYVSYKAPEHGVEAKRVPPNHTSQRCSRLGCGFTHEDNRNGTEFCCQNCGYTVNADYNAAKNIGLRYARKRRHRLRSSPKSPNGDAPVDVRINGGTLNGTSRQHVAAE

SEQ ID NO: 36876 - protein, 378 aa, Avibacterium sp.
MQLRKAFKFEIMPNGEQTRKIKQFCGCSRFVFNRALAWQNEQYEQDNSFKFSYTKIANLLPQWKKELVWLKECHSQVLQQSLKDLESAFKNFFQKRADFPKFKKKGVKESFRFPQGCKLEQENDRLFLPKIGWIRYRNSRDIVGEIKNVTVSQKCGRFFVSIQTEFEYDIPTHKGGEIGIDMGVARFATLSNGEFFEPLNAFKTYKGKLAKLQKRLKNKVKFSQNWQKLKAKIAKLHHKIANCRKDFLHQTSSKISKNHAMIYIEDLQVSNMSKSAKGTAETPGKNVAAKSGLNQAILDQSWFEFRRQLDYKTQWQGGFLVAVPVQNTSRTCPCCGHVAKENRQTQANFECVECGYTENADVVGALNVLGRGRAIVHA

SEQ ID NO: 36877 - protein, 394 aa, Deinococcus sp.
LRGVATAVKTFRYRLYPTRPQEAAMFETLRLTRTLYNAGLEQRREAYRKHGKTLSAYDQQKELTALKEACPEYSGVYSHVLQDVFDRLDRAYKSFFSRVNKGAKRAGFPRFKGRDRWDSFKFKQCWDNKKDDWTTCGKPVDEGRRINVPKIGAVKVKLHRPLEGKPKSVQIVLDVDQWYAVYTCEVTGQTLPETGSSVGVDVGTTWFAITSDGEFVDNPRYLKSSLKKLRVQQRRVARRGKGKNRRRKAVQIVAKTHRKIRRQRLDFHHKTARGLVNEHDLIAHEELKVGNMVKSNLARSISDVGWASFFLILSSKAAEAGRKVVAVNPMYTSQQCSKCGHTCRENRISQARFVCVGCGWAENADLNAAKNILQRARILWPSGVNESGGSHVVA

SEQ ID NO: 36878 - protein, 372 aa, Bifidobacterium sp.
MKAYRTELDPTRAQASLIRQYCGVARFAYNWYLDCAQAYYRENGLFLTGYSFSKALNNSTRPDWFTAAPSKAVKHAIMNAEKAFRRFFNHQGGYPRYKRRGNRDSYYVIGSIHVQRHRIRLPKLGWVRLKEKGYIPTGRTPKSATVGIVNGRCYVSCLYDMDNPLPAPATGEPLGMDVGLKNLAILSDGTVFDNADTSGRIRKLERRKRRLERSLARSRRANQGKDKEHGWHNYRKILLRKRCVEQRLANIRTERMRRVCDELARRQPSSLTIEHLNVKGMMKNRHLAPALHKQALATFLELVEHTCHRHNIELRQVDRWYPSSRLCHECGWKNTGLTLNMRVWRCPMCGSRHDRDVNAALNLRDATEYQLI

SEQ ID NO: 36879 - protein, 371 aa, Methanoculleus sp.
MLQAYKYRMYPNREQVASLMQHIHACRFVYNSSLEQKIRAYEQEGQKLSCFDLNARLPALKEEHPWLKEVNSQSLQSANKNLDNAFTRFFREKKGFPRFKSKKNPVQSFQVPQHYAVDFERNRIKLPKLGEITAVFHRTFTGTMKYATVSVTSTGKWFVSILVDDGAATPEPTPFTLATTLGIDVGLTDFATLSTGEKVENPRYLKKSLKRLKVLQRRVSRKKKGSKNRKKAIQKLARCYEKVANQRNDFLHNLSFRVVSENQAIAVESLNVAGMQKNHCLAQSISDVSWGTFFTILEYKCLKYGKTLLKIGQFEPSSKICNCCGYMNRNLKLSDREWTCPDCGIVHDRDINAAINIKKFALQDQNLVGVV

SEQ ID NO: 36880 - protein, 391 aa, unknown
  TnpB Polypeptide
MSRYRLTPTPEQEITLAQHCAHARYVWNLAVEQQSWWRPGRSSAPGYYAQAAQLTEARAEHGWLAAGCQMVQQQALRDFAQAMTSYFAGTHRKPTWRKEGRDEGFRVVALKPSHIRRLSRKTGEVWIPKAGWVRFRWSRAVPEAKSYRVTRDRAGRWHVAFAAIPEPIPSPGTGEIVGIDRGVIVSAALSTGELLHCLGLRPAERVRLRQLQHGLTRARMGSRRRQRVKSAMARLKARESDRRKDWAEKTSTDLARRFDVIRIEDLRIASMTRSAHGTLANPGRNVRQKAGLNRGILSSGWGLLARRLEDKAPGRVERIHPAYTSQQCSACGHVAADSRESQALFRCVACGYVCHADVNAAKNTAAGHCGGCAGTLAAGQRMNREPQLLAS

SEQ ID NO: 36881 - protein, 404 aa, Synechococcales sp.
MHKAYKFRIYPNAQQQQYFAGAFGCCRWFWNYSLNLCQVTYKETGKGLNRAAIQGMLPALKVEYPWLKKGAYSQSLQVTALNLSTAFKNFFEQRGGFPSFKSKHDRQSVSYPQNVTVLDNTIKFPIIGEIKAKIHRKYDGEVKTVTVSQNRDGSYFASVLVDDGIDTPEVNTEGKAIGLDVGLTDFLVTSDGSKHKHPRATAKYAKNLKRKQQKLSRKVKGSNRRSKARKLVAKVNSKIKRVREDFLHKLSRKIVNENQVIVVENLNIKGMVRNHCLAKAISDAGWGMFTTMLKYKAELIGKVYLEIDRFFPSSKTCNHCLFKVSDMNLTIREWKCLQCEAVNDRDINAAKNIRDEGLRFLALGISATASGRNVSQPGRISVLSDAVAVEAGSSHHSCTQLGGE

SEQ ID NO: 36882 - protein, 495 aa, Nocardia sp.
MAELTVVCRWVASHSLVMGRHTTFRYCLDPTVEQQRLLDRHAGAARFAFNTCLGFVKSALTQRETDPDQQVPWTGFSLINAFNAWKKTEAAGRVISVDSSGVAEVEVTGLAWRGEVRQQVFEEAAIDCGRALTAFFDSRAGKRKGKRVGFPRFKEKKSTRPSFRLRNKISKSGGTAIRVGDNTIPRSVTLPGIGPIRVREDTRPLRRMLANGRAKILFTTVTYRMGRWQLSVTVEAADLHPALQHAPRAIDDDTGWVGIDRGLTSYLVAATSDGTEVARIDHPPKPLAAGLRRQRRLAKSLSRKQKGSRNRQDAAARLARHHNRVTNVRRHFLHQLANMLVKTHDRLVVEDLNVAGLLGNRRLARAIGDAGWADFCRILRYKQHWRGGTVVAADRWYPSSKRCSACTALNTKLTLSDRVYFCECGFRADRDHNAAINLAAWPTICDENSPRPPDPEARGRVTNVRRREGADQHPVSVGETDPDDAGTDVHTMRMV

SEQ ID NO: 36883 - protein, 404 aa, Streptomyces sp.
MIRAYKFLMRPTVGQQAALTAMLRDHCSLYNGALQERRDAYRHSSRTSIKYGDQSAQLKEIRAFDPERQGRWSFSSQQATLRRLDKAFAAFFRRIKAGDSPGYPRFRGANWFDTVDFPKDGDGCRWDSTPHDPVTRVRFQGVGHVRVNQHRPVVGQVKTVSVKREGKRWYVILSAEQDQPKPLPATGSSVGIDLGIAHFLADSGGGFVPNPRHGHKAAAKLEAAQQALARFPRVGRDKRTKNHQRAVEKVAALHRKIRCQRLDHAHKTALDLVREHDVIAHEDLKIRNMVKAPAPKPDPGQPGRFLPNGAAAKAGLNHSISDAGWGVFLTILNAKAESAGREVIAVDPRNTSRTCPQCGHVSAENRPTQEKFHCVSCGHSAHADTVGALNVLRAGLVRREAQPA

SEQ ID NO: 36884 - protein, 274 aa, Hydrocoleum sp.
MQSIKTKLKVNNKQKTILAKHAGVARHAYNWGLANCISEYKETKKRPSAITLHKRLIAEVKSENPWYYEVSKCAPQQALRDLDRAFKNFLTIPKCGFPNFKKKGKKESFYLEGSIKILKGNYIKLPRIGIVKTYEILPSVPIKNVTISKRADNWYISFKYDLESVSNSPPKKRAVIGVDVGINTLATCSDGTTYPNVKAYKIAKKRLTRYQRRVKKKELGTKNRAKAVKRLAKVHKKVADIRADALHKLTTWASFEPQHHSCRRLECKWNAQKS

SEQ ID NO: 36885 - protein, 319 aa, unknown
  TnpB Polypeptide
MRQVERHWIKEGHTLYPICNDLTFKAKNLYNAGLYQIRQSIFERNKCDKDEKPSVLSWIELVSQFRKEKQSDMLALPSKVSTNILKTLGSSISSYYKLLKCFHDKSNSSVVRKPQLPRYLHKTEGRYIVEFTSQTISKKRGLNGELILCPKDLNLSIPTKVKTPKCVRIVPKLRAFVIEVIYEVEVSPLKQTGNYAAIDLGVDNLATITFSNGMNPLVVKGTQLKSINQGYNRLIAKVKSKLPTNQKTSQHIHRLWKNRELKLQSELHKITSFLSLYFDEMTIETVFIGKNQGWKQDVSLGKRQTNLSHKFLLIPLFLS

SEQ ID NO: 36886 - protein, 481 aa, unknown
  TnpB Polypeptide
MAKTKKNESFFIYTFPLKINGEVAKELERRFKMAQDIYHTTLREILKRTYKMKKDPRYKKAYRLDKGAERNKILKELDADYDLVGKFTFTKFANKYRNDRNYHDYIPSDVAIKLSSRAWDAYSKVKFAKGAKRINLHNDLLSFEGKSDSGLSIRNKMFKMGRNRKQLLIPVVYKNDPYERNVLTHTVKYSRLVRKMIRGQYKYYVQQIFVGTPPIKEKHVSNLKGPVGINVGIPKIALSSHYQTDLRELAPIPNRKQIEAKIRRLSRKLDRQRRANNPDNYNPDGTVKRGPKKWIYSKNYLKIKAKLAEIHRVLQENRKLSHKALANEILTMGDEFITKDMTYKDLQMRTENGSKRQHGKPILDHAPSQLLQEIKNKATYQGKLVREANTAKVKVYQLDHTDGTYLEEPLRQNNRKIADHMVQRDLYAAFLLEHTKLDNETIDLENCQHDFETFLRNQDLTLSTIDPSLLAIDKEGYNPEN

SEQ ID NO: 36887 - protein, 299 aa, unknown
  TnpB Polypeptide
LKSGELYTLSFSLYRGRKGRIPINVHSASHTEVLDKIVKGDVKLGSLKLCKSKKGIWYALLAVSMEVPDAAEVKGWIGVDRGQNNIAVAALPKGFGKFWKGGRVKGLRRQFQRTRKKLAVAKQHKEVKRLEQRERRIMTTINHIISKQLVQFALDYGMGLRFEDLSGCRKTMKQKKKTKSDAAENRDHWAFYQLEQFTRYKAIREGVPIESVPAPYTSKSDHRHGVIGKRNGDWFRGFDGYHCNADWNAAQNIGQWLGFSCPLDLQKTVAAMAMADREGGVDDSPLTSEASKRADLSPA

SEQ ID NO: 36888 - protein, 594 aa, Actinomadura sp.
LARDAPGGVGTGLQAPFGDGRAAADAPPVGAGGDAVEGGLDGGAVPAQGVERGLDAVAVGKAGAGVRRGMVALRALPPQNGDGPIQILDHHLQSGTGGGCVHEVRTPPGGGVGLLTEMRKNLHVCAYVSSESCRPPGQVAWVLSVVPVTVRGVMVTQAYRFALDPTPAQARALRSHAGAARFAWNWGLAACRDRYDAEGRWWSGAELHRLWNQVKKTDPTLGWWGENSKCVYQEAFRDLDRALREFVRSRKGTRKGRRPGFPRFKKRDRCRDSFRFCTGAMRCSGRTVTLPRLGTIATHDSTRKLARRIENGTARILSVTVSRTAHRWYVSFTVQVDRHVPERHARPGSAVGVDLGVTTLLTTVDNHGAVTEIAGPKALRAGLRKLQRLSKAHSRTQHGSANRAKAAGRLARHHARVTNMRTDTLHKATTHLAARYETVVVEDLNVTGMLANRRLARAVADQGFGAVRRMLSYKTGWRGGRLLVADRWFPSSKICSACGGRKPSLSLSERTFRCDACGLALDRDVNAATNLRDLAASGAERQNACGGDVRPGPAGQPPAKQEPGTTPRVDQTGTAAAQATAVWRTDTHIRSHPR

SEQ ID NO: 36889 - protein, 381 aa, unknown
  TnpB Polypeptide
MNIVKKGIRVRLYPTEEQVTLIDKTFGCCRFVYNQMLDNCKQSYEQTQHFPSKNECITNLVLLKESNEFLKEVDAAALQQSVRDLNFAMGNFFKNKSCFEFPKFKSKRKCKQSYRTPYNGGRADVLNNKHIKLPKLGMVKTKCFDMPKVYKIFNITVEKTSTNKYWASICIETEVQPLPKSGKQAGFDLGLIDLLICSDGTRVERPKFNYLNKGKLAKEQRKLSKMRTKLERAKLNLDECKNYQKQKCKVAKLYEHIANSAKDFNHKLSRKLVEEYDLIAMEDLSVNSLIKNHRLAYSIADVRWAQLLNFIQYKCSWYGKEFKQVDRFYASSKICSHCGAYHKDIVNSLSVRWWICPDCGTHHDRDVNAARNILIQALSAA

SEQ ID NO: 36890 - protein, 307 aa, Streptomyces sp.
VVLQQALRDCERAYTSFFASLKGGRNGARVGEPRMKSRKEARQSIRFTANARWSITACGKLNLPKIGAVKVKWSRALPATPTSVTVVKDAAGRYFASFVIDTDPAADAARMPETDRTIGIDLGLTHFVVLSDGTKIGSPRFLRRAEKKLKKVQKELSRKRKGSKNRAKARRKVARAHAEVTDARREFHHQLSTKLISENQGIAVEDLSVAGLARTKLAKSVHDAGWSSFTSMLEYKAQRYGRTLVKIGRFTPTSQTCSTCGAVDGPKPLNIRNGPVPPAAPSTTGTPTPRSTSRRPPDWRYRPAERR

SEQ ID NO: 36891 - protein, 467 aa, Butyrivibrio sp.
VYRTRQYRISKNHILYDYCRDICRSSAVLYNRANFILRQYSSSVDSMAEFKPLFPNQMMVYRLVRDNLSGTKYLGDSKWLSYNGLDYLLKVTRDKAYYALPAQANQQILKLLLRDYKSFFEAVKAYGRNHEAFTGRPKMPGYMSQGSFKTAILTNQICRINNGCLKFPGTRDRLSLGQLHEEVCLKEVRIKPCGNSFVLDVVLAVPDMGMIPMADKDILADLSDVVDLKDLRVMAIDPGTDNIAAVANTFGARPFVIKGGVIKSINQLYNKEMKRLSSCAMTCNKRYRTRKMNALTEKRNRRIKDQFHKVSRQLADYARDNHVDVVVMGHNTYQKQKIGIGHVNNQNFVQIPMLIFADMVRYKLAEYGIRFVLTEESYTSKADFLAKDYIPVYKKNCSGKYFFSGKRIQRGLYRHYDGTITNADINGAANILRKVFPKVSQWDRGIVDMPCSAGCIEHPAGSCRHAA

SEQ ID NO: 36892 - protein, 384 aa, unknown
  TnpB Polypeptide
MLKAFKYRLYPTKEQATLINKHIGAVRFLYNLALETKQTAYNGYGKNLDCFDLIKQIPDLKKECEWLKEINSQSLQMALRNLDNSYTRFFKGKSDFPKFKKKRSGGSFNIPQNVKVENNLLIIPKFKEGIEIVLHQPIKGTIRQATLSRTPTGKYFVSILCETGEQLPAKAKVEASTAIGIDMGIKSFITTSTGVSYNNPKFLKKTLNRIKFVSRKFSKHKGKRTKQRLAKLHEKVANQRYDFLHKVSSTLVREKQTICIEDLNITGMLQNHYLAQAVGDVGWNTFTNMMAYKAEWQGVNIVKIGRFEPSSKLCNVCGYINKELALKDREWICPGCGTHHNRDENAAINIKHFALKDRLWGTQSQNRDELPTLVGALTPEASAL

SEQ ID NO: 36893 - protein, 366 aa, unknown
  TnpB Polypeptide
MRKAYKFRLYPSRKQAEFLDHELTAARRLYNAALEQRRIAWRRRGLSLGYLDQAGDLKALRASGACTPVNYSACQDVLRRLDKAFRAFFRRVKSGDKPGFPRFKSKDRYDSLTFPSYGDGCRIRVNGKLYLQGIGEIRVKWHRQVAGKIKTVTVRRRGGRWHVCFSVEYEPRSLPQVDADVGIDVDLDHFAALSTGELIANPRWYASAQKRLRRAQRKVSRRVKGSNGRRNAVRELQRIHEHVANQRAEFLHKLSRQIVGDYQLIAVEKLSVGGMSKGMLAKQVHDAGWRSFLQALTVKAAEAGRRVVEVNPAGTSQHCLCGLEVRKTLAVLVHRCPECGLVAPRDVVSAQLILGLGRSLASANVA

SEQ ID NO: 36894 - protein, 145 aa, Okeania sp.
MVKKRCDPATTLVARERAPRDHKLARAINDANWGELVRQLEYKAEWYGRELIKIDRYFPSSKRCSNCGHVVEKLPLKIREWDCPECAAHHDRDINASINILRMGTRVGVRRKGTPTLEGCGRSSVSLWSALLDPRRVNLRLRSIP

SEQ ID NO: 36895 - protein, 474 aa, unknown
  TnpB Polypeptide
MALRAVSNYLRLPKKTFQIIDTLAYHAKSLYNVGLYNVRQHYATHQENRQTLQRLRPDLTSRVDVLVGSYLPYTRKKDFPFKEYSTSVQSKENENYGLLHSDTAQQTLRSVEEAYKGYFELMNLYRKGQLEHCPSPPHYLPKDGRFKLAFPRAHLTIRNGAVTLGMAIKFRKQHGLTGKELTFPIPPCIKPHQIREVTILPAHGGKAYKIEFCYKVPSKPQNLDPAQYLAIDLGLNNFATLVDTATGAAVILDGKRIKSINRWYNKENARLQSIKDKQGLTGITKRQARLLKKRDCRIGEAMDRYVVWIANYALQHRIGTVILPRWDGIKDKIRHGRRGNQNFVQVPYHKFRQKLKSKCELYGIRFDDSHSEAYTSQVDALNLDPIRKPPYGRKRRIRRGLYRSALGTLINADVNGALNHLRKVAGDSVVPRIIGRGRVNRPVRIRTTFEPSTFAPMKLQPCASQGAPAASPLR

SEQ ID NO: 36896 - protein, 362 aa, unknown
  TnpB Polypeptide
MKLTLKIKLLPTDEQSELLLKTIKEANAACNSISDIAWQDKIFNQFKIHNRCYYGIKSSFNLSSQVIVKCISKVTDSYKIDRKTKRTFRELGGITYDPRILTYKPNDIVSIWVIGGRINIPFVCHNRKYLPYIKGEADLIYKKGKFYLFQTVEVPEEEVKDVEEFIGVDFGQTDIAVLSDGTNYNSDQLKKVRKKYSKVRASVQSKGTKNSKRLLKRLSGKERRFVSINNHTISKQIVQKAKTEHKGIAIENLAGIRKTAKTKNKAQKTELNRWSFFQLRAFLAYKSLFNGVKFVAVPPAYTSQVCNNCLHIGIRKGKYFSCENCGNIEDADHNAALNIAAWGCLINQPEKPSMLYCQVHRS

SEQ ID NO: 36897 - protein, 508 aa, unknown
  TnpB Polypeptide
MRTIKRYSLKINKNKWQQLREIAKLYRDEKNFHLRFFNQDNYYCAEPDEIIRRNFLVKEKYKPATGLQARQWKIALTEAHDTVNKNWCALAAEIKTMISRRQKEWTDSEMHYGYWLVFTGKRLAELVAGKAPEPESFTVSYAEKKRVRNYIRRVVRRKRGLRPVAHRTRSFILDANMYSVVENDEQDGKKAQFIKIMGLAARQRVVIPLTGYANIGGTLKIVLDFYKRRIEVHTSNSVIPPENQSDIVVALDAGITEVFTDEQGNAYEPTFGKTLKTASDQLNKDGKGRNSSNALKKVSSKFKARRISKFNLGRNKLRDRRRKARIRIEQQISHAIRTVVKNRKPSVIVTERLDMRGKAKSKKMSRLVHYWMRGSLQERLGFLALAEGFRHKQVNPAYTSQMCPSCLLVHKDNRKGDIFKCLKCGHTDHADRVAAINLRARYNDSDITIYTPKSVVRTILQNRFIASLERIAASAQEAPGETTVSGRTDTYELAVSERNAVTQSLHRK

SEQ ID NO: 36898 - protein, 390 aa, Streptomyces sp.
MVTRAGDAGRWCGRSGNVLARFAVMARFRMYPTGEQAGVMLGHCAHARYVWNLAVEQHAHWYRGRRAAPGFAEQRRQLTEARRENAWLAAGNADVQQQALRDFARAKNAVFASGFGEPTWRRKHVHEGFRVIGTDRVPEFEADGSPKLSAKTGKQVMGRSVVVQRLNRRWARVKVPGCGWVRFRLSSKGRGSELPKAKTFRVTFRNRRWHIAFAVVPAPVEGPGTGEVIGVDRGVAITAALSDGRKLNCPQLTVRERARIRKHQRRAARAPKGSERKAAEYAKAACIKAREANRRKDWCEKTSTMLARGCDLVRFEKLNIKNMTCSARGTVAEPGRKVRQKAGLNRAILAQGWGLLRQRTGHKAPGRVEDVPAPYTSLRCSACWGHLPRP

SEQ ID NO: 36899 - protein, 372 aa, Microcystis sp.
MLDVVKVRIYPNKEQEIAWLKNSGCCRFVYNYYLNKSNTQYRETGRGMSYVDRAKDLTQLKKDANYSWLKEATATTLQQSLKNLETACKNFFNQTGRFPNFKSKQKKQSIRYPESCSMRNKGLKLPKIGIVKAKISQPVNGTIKWGTVSKTSSDKYYASILLAIAENINPQIGKISGVDLGLLTLVTVYDGEKADKIDSVKPTRKYAKRLKRRQQKLSRKVKGSNNRRKAVKIVARVHEKIANTREDLLDKISRKLVDETQIIVAESFCVKGLAHTKLAKSVHDAGWGMLLNFLSYKLDREGGKLVEVDRFFPSSKLCSCCGFKKDSLTLSIREWLCPEGNTYHDRDENAAKNLRAEGLRILSTNTDGQSGV

SEQ ID NO: 36900 - protein, 328 aa, unknown
  TnpB Polypeptide
MTEDEVRAAAERLGLSSNLAIRAIARACAALKDPARMHATFEPTSIDYDARIFRFREWDRTFSLTLLHSRQRIHAALGDRQKSLLEGRKPTSATLVKRRDGRYFLHVQIADEDPDPIEPKGYIGVDLGVRNLATTDDGATFSGDDVEACRRRHHRIRQTCQRTGTKRAKRKLHKARRREARFRANQNHIISKRLVAKAKDTGHAIACEDLAGIHGRTTARKAQRSRLKGWAFSQLRTFISSKAALAGIPLVPVDPRDTSRTCSACGHCEKRNRKSRDEFECRHCGFCLDADWDAARNIRDRAHVMVPLVGAVDAGLGTRRRPLASPAL

SEQ ID NO: 36901 - protein, 409 aa, Actinopolyspora sp.
VRFRLYPTPEQERVLTEHCAAARFVWNLAVEQHSHWQPGRRSGPGWAEQCRQLTEARSENDWFAAWNSDVCQQALKDYHHARTAFFQSGFGEPTWRKKYRNEGFRIIGGGREPDYEADGSPKLNRTGKQVMTRRVAVQKLNRRWAQVKLPSAGWVRFRLTVRQLPHAKTCRVTWKNGQWHVAFAIQPEPVAKPGNGNTAGVDRGVEITAALHDGQTLNCPQPSSKERAKRRKHERRAARAPKNSQAKADEYAQVAKLRARETSVRKDWVEKTSTMLASQFDAVRFEKLNIRTMARSAKGTEDNPGRGVKQKAGLNRAILAQGWGLLRARTEDKAPGRVTDVPAPYTSLRCSSCGWIEKNSRKSQAEFVCVSCGFSCNADTNAAINVAAGRAGGTTPPAGGASVREPTAA

SEQ ID NO: 36902 - protein, 577 aa, Actinopolyspora sp.
MATVVQAYQFALDPTEHQRAMLSSHCGAARFAYNWGLGRMKAVLDQRSAERSYGIVEDELTPSWNWSAYSLRKAFNAVKGEVAPWWGENSKEAYASGLANLSRALDNWNKSRAGKRGGRALGFPRFKSKRSTWSFRVSTGSFGLSDVDRRHVRLPRIGLVRTHESTRKLARHVERGTARIRSATVSFRRGRWHVSFSVEIERSEPASATCGGTVGVDLGVKHLAVLSTGEVIVNPKHLEVAQRELLRLQRQAARRCGPDRRTERKASNRWRRTQVRIATLYTAIANARRDGLHKLSTRLVDEFDTIVVEDLHVAGMVRNRRLARSIADVGMSELRRQLDYKTTWSHRQLVVADRFYPSSKTCHGCGTVKAKLRLSQRVFTCDHCGHTADRDLNAAATSRAWRPPTVGGRRKTSPLETHVRPAMLATGTATGRPRPAGPGPTLRRKATAQEHFRTFPERINDISDDATAAQLIEGYKQLVRRAHRDGMRVLGGTLTQFEGSVVWTPERERTRQRVNAWIRGTELFDGVVDFAAATAQPEDPLRLRPEYDSGDGLHPNDAGARAMAEAVELSALHRRHH

SEQ ID NO: 36903 - protein, 386 aa, Actinopolyspora sp.
MIDMRTAYRCRAYPDSEQAAQLGRTFGCVRLVWNKILDQRHRAYRVEGRKISYKETDAQLAVWKRTDELAFLSEVSSVPLQQTVRHQHAAYQNFFAGRAKYPRFKSRTGKQSAHYTRSAFTLNDGRLMLAKQSTPLDFVWSWEVDLLASLNPTMVIVSREPDGRWYVTFAVDTDEPEPAAPTGAAIGIDMGVKDFAVLSTGERIANPKHLDRKARNLARYQRRLARKQRGSANRRKAKKKVARAHRKVRHARADFLHRTSTNLVRRADTIAIEDLNVSGMTSSARGTTDKPGRNVRAKAGLNRRVLDAAFGEFRRQLEYKTTRAGKTLAVVDRWSPSSKTCSACGYLLEKLSLSSRAWTCPDCGTRHDRDHNAAKNVLAAGRAVAG

SEQ ID NO: 36904 - protein, 245 aa, Actinopolyspora sp.
VRLFTSFVVEVGDEALPAAADERGRDVEIGLDLGLAAFVVDQHGRVITNPRFLRRAERKLKRLQRAVSRKQRGSNNRAQARKKLARQHAKVSDTRADWLHQATTSIVRENQTIVLEELAVSGLARTRLAKSVHDASWGTFRRLLEEKAARYGRQLIVLDRWLPSSQTCSVCGRIDGKKPLDVREWSCPCGATHDRDRNAACNILAAGRAERLNACGDQVRPHTGAQVDEAGSSGTPRGDAAPRAA

SEQ ID NO: 36905 - protein, 607 aa, Calothrix sp.
MDKHEWKIRNGSTHHKQLTLLDVTLNQSVDGKKKGKSKLTGHQEGKEDLNAQKSSSLQGLQLSLFKSELSATGEFQPMDNETTWIDRLISWAQDTQRQKLFQKLGQDSILGGTSLLPYSNELCQEIFNALLLPIQTGFVDSASTLLNGCVQNLIANSWFSITANSAPKRNSLTICSPSSIVSVQGYTDCENTENNSLLNYGQNPFKKSQNIPPNLSVKIPVFPCKELHLIWKQWLAAYRWVYNQCVAFFNSGEKLPKNVSLDQHIQNLQKEKGSVWTACLGKTRQEAVCEAQSAFRQARKAMTRKPKIERTTVTIRFRSCRDNSQVIQFKNDAFKGGTWFVSKVKGLLFCTASGYELPTECVYGTELAYQRSQNGYQWFAIFPEYKEPEISSSQKVIAFDPGVRTFLTGFDGETILEFGKKDIGRVIRLCLHLDKLIGRKIKASGKENKKFRYKLGQAIKRVRIRIKNLINDMHHKVSSLLVQNYKVIFLPTYETSQMVLKAKRKINRKSVRSMLTWSFGRFALTLEQSCNRHGVLLVRTNEAYTSKSCPKCGTVHSKLGSNKTFTCPHCKFTLPRDWVGAINNLIKPVANLAFEIQDNKLVISCAG

SEQ ID NO: 36906 - protein, 380 aa, Lactobacillus sp.
MRRALAQACDYRRYCYNQALATWNEMYDASVVLADKTARPNERKVRDELVANKADWQYARSARILQLAVHDLAQAWENFFNPTMPDHRKPRFKSKKRNRQAFKTDRATIVNGKLRLDKPQNYHDRWYDIRLAEAPRWQGVIKLTAIVKEADGYYACLSMEETKPEPLPENERICGVDANIGKFVYNNGAAMSAIRVLTEQLTSLYHRVSLYQRRLARKRQTNPNHFRSNNYRATKTKLQRTYQKVTRIQSDFMQKLTTMLVKANGTIAIEDLDALHMKMNKRLAKNLHRSLFGRFKVLMNYKTQWYGRQLVMVDRFYPSTQRCSRCGLVKAGDDKLTLAGNALHGTKHHEFHCYGCGAQLERDENAVQNLIQYAQGQAMS

SEQ ID NO: 36907 - protein, 414 aa, unknown
  TnpB Polypeptide
MIQKAHQYRCFPNPKQQTQMNQTFGCVRKYWNILVDCFNNFIDPKTEKEYREEHLYMKDVSAAALQQKRRDCDETKRQFYDKKRKVQIGKMQFKKKGKAKDSYRLPNQKFKIDQENSRIYLEKIGWVAIKMDRPIPENAKLFSVTVSRHPSNQYYVSIQFEIESNPLPLTGNHIGLDFGLKDLFAASNGLAAKNPTFYRKNQARLRKEQKALSRKVFKSNRYYKQKRKVARVHKQIADARSYYLHNLTTRLVRAYDLICVENLNIAGMKRKFGKSASDVSISETIRQLEYKSLWYGKTLIKIDQWFPSTQLCSGCGTKCGPKGLKALSIREWKCGECGVVHQRDHNAAMNILMEGYRVLTNEQYPSNMSESSKDSESVEYTDYKHRESVRLKDWKAILPSQMQDSMKCLLNGVS

SEQ ID NO: 36908 - protein, 377 aa, unknown
  TnpB Polypeptide
MIKSFKIRLEPNNKQNSLLFGCAGIGRWTYNFAIAKIQEYYKETGKFLNDGEIRKQLTQLKKTDEYKWLYKYSAATISQHVKDACDAYKRFFKGISKYPKFKSKKKSKPSFYSRYDRISFISTHVRLEKIGRIKLSEYNRIPIGKDIKYMNPRITFDGLHWYLSIGIEIEDKIKPILTNEKLGIDLGVKDLAIVSNGSKYKNINKSQTIKKLEKKLKRLQRKVSKKYLMNKDGKKFIKTNNIRKLEVKIRKVYKRLSNIRTDYIQKVSTEIVKSKPSQIIMETLNIKEMMKNKYLSKAIQQQKLYEFKTLLKYKSIRDEIEFIEANRWYPSSKTCSECGYKKPKLSLGEREFICESCGFIIDRDLNAAINLSRYEII

SEQ ID NO: 36909 - protein, 407 aa, Firmicutes sp.
MKSNRVEQHIIKKSNPIWKLIDLYSFKSKNLYNYANYLIRQEFINNGKWIKYNQLFSLCKDSEPYKDLGSNVGQQTLKLLDKNWKSFFVAIKDWSKNPTKYLGRPKLPKYKNKDGRAFLGIDNIKFSIQDGYTRFSWKPLNKLNGIFKTKIPINSKLMQCRFIPKGNSYIMEIVYEIEVPDEIDFKSTNIASIDLGIDNFATITNNIGLKPIAIKGKVIKSYNQYYNKKKATIQSELMLLNKKHNSKRLQQLTDKRNNKVKDWMHKASKFTVEYCLRNNIDTLVCGLNKEWKQETDMSNKVNQKFVYIPYDMFIKQLEYKCQNVGIRFITNNESYTSGTSFLDNEEPIKDNYDKSRRKFRGLFISNKGVEINADVNGSYQIMKKVFPNAFMKGIEGVGWHPTAIKIV

SEQ ID NO: 36910 - protein, 580 aa, Natronomonas sp.
MASTHLSLPLRLPFEEQERHARLDTLTTSVANTLIEQYWTPEHLTGIDEYSYQAWKYFDEAEAFGSVDLYLPSRYKRCVMQKVGETLRSHADKREAFQSIQSVLPDHKIRRIDTRRIKERLWDSEEYLKSGYVDLLIGQLNSYYDRHGCFPESYFELQECPSYSKGVLPYSADDGPASGQAVKYEYSEDTQTLTVKLKTPDTVEPETRGDWTWTEHELEGYEAFHELLEHGSLSAPAFHPTQSKTGNEYYELSFPVEVEHQEKSSDVETVLAIDGGLRKDATAVVVNENGEQLSTPYFIQNTERERMQNLARERNQLNSKLAYLRRGGRDHTDSFTQVQAEYERVNNKIRHKRVQLVHDVANQVLALALVYDVDAIIHEDLRSLSPPRGEGQLSWELSSWARREIISKIEYRADIAGLYMDKVRPGNTSRSCPRCGATGHTTKSPDHSFEVWCGGHFRCDNARCGFQADRDYVGAVNVARVFFSETATLEHGFTSSYIGDSEIVPASRSAGSRLVFGEAPIVFTGHSEKVVIAGGGSCFIAPAVTPIETKNNSSNNDSVSSPATHSTSQFVKRTAVYCRK

SEQ ID NO: 36911 - protein, 416 aa, unknown
  TnpB Polypeptide
MISDEEYKKLLKQFHKLSDRHILVVETDMPYSDVLKVVILSDKIRKAGNELVSFMRKNYDQLIRTKRYCKLLKLYGSTKDKKKRKDLADQLNEMQKAYNVTWDYCRKSMIPIGKKYGIDAVFALTKAEDVWRGIEKCLYGNGKAVHFSKYGELPCIRAKQINRGIPISVKDDRLQFKLGKTAFGIQVNDRFQQDEVDAVLTYLAESEIVDNKAVNTLMEDAYCIDTYRPCYATLVPKMIRGRYRIYLHLTIEGKAKPKYDKYGNLRHKYGKGVIGADIGTQTVAYTSDTEVGLKNLSERGNSIQTSERKERLLYRAMDRSRRAANPQNYNEDGTVKKGRKTWKYSNHYKKLKAKHSELCRINAVNRQLAINEDANHLRSLGDTFVTEPKNASKLMKRAKETTVNSKGKFNRKKAFW

SEQ ID NO: 36912 - protein, 345 aa, unknown
  TnpB Polypeptide
MSFQRACSSVSGALSGPMSCRSTPTARQRRVWACIATRCRRSVRSIVVAESSSRRSSCVGAPAAARRSLGWVPFKTGALKYGHGQVRFNGRWLSLWDSYGMSGYDLRAGTFSEDARGRWYLNVTIKVSVATRSEGRTSVGIDLGLKDFAATSVGHVIEQRFYRRYEEALGKAQRARKKQRVTSLHAKIKNCRKDFLHKQSTALVRQYGAIFIGNVNASELAQTNMAKSVLDAGWSAFRTMLQYKCDSAGVWFEEVDERYSTQTCSCCKLRTGPTGQEALSIRESTCPVCQTSHERDANAAKNILRTGLFSMEQAYATAAGKAAVNEASSEAGGGRAPLAEGISVL

SEQ ID NO: 36913 - protein, 513 aa, unknown
  TnpB Polypeptide
MFITLRFRVIPQSKEDYEEISKLMRLYGSTVRYAYNRFLDGHSKNEVYHLVRKTFKDLPSWYVDSAIKEALEILKRIKSRGGNPRKVVFGGKELFAKLCIRHLQGWRLEKVERKWNEKRKGRLVSIGHAENGGNPNIKLVFEDDGTYLLITSTRKRKPVKAKVKRKVNGKRDKWIILTSMILEGKKFPYTIELRMENGEIYGYVTFQIPIPEVKITKDNGVIGIDINAKPFHLAIAEVGKDGNLISYERVKLGYLNNFSKNRKDYEEWLVAHKVIGIAKEKNKAIAIEDMNSLPKGRRGDGNKKKRKILGRFSYKRILDKIERLCKLNGIEIIKVNPSWTSIQGKLKYSPQLNIDKDIAGAYVIARRGLGFKEKVPKNYKRLLNDKKFMEYLKESLKQRQKQLEEKLQKETNIYKQNPIKEDLKNLKKHLALLKSLQSEPGGLLGAYGRNLSNHKNLWQVLEVALTTLLPERRCLSPLKPVLVQGTWERVVSRLGPLCLGGRDNYWTRQRFDC

SEQ ID NO: 36914 - protein, 378 aa, unknown
  TnpB Polypeptide
MNKAIKYRVYPTTEQSIMFAKTFGCCRKVYNLMLSDKIEGYKLTGKFPTVTPAKYKKDYPYLKEVDSLALANKQMDLQAAFRNRFSKARKKNTGFPKFKSKKHSRKSYTTNNQKGTVAIIDNKYIKLPKVGMVKAIIHRTAPDDWIIKSATVSQESDGKYYISVLFEFENSTNSYVADKTNAIGLDYASNGLYVDNNGNVGTNHKYFRESQSKLAKAQRRLSRMQGSKKNEVKSHNYIKQLLKVNKIYRHIANQRLDNLHKISTKIANQYDVVCVETLNMQSMSNKGFGNGKATFDNGYGMFLNMLNYKLSDRNKYLIKVDKWFPSSQICHRCGAIHPEMKNLAIRTMECDCGLTINRDQNAAINILHEGLRLLAEMI

SEQ ID NO: 36915 - protein, 263 aa, Ruminococcus sp.
MNKAYKFRIYPNETQRILFAKTFGCVRFIYNKMLGDKIEYYNQTKEKLNNTPAQYKAEFEWLKEVDSLALANAQMNLQKAYNNFFSNPKKYGFPKFKSKHKSQKSYTTNNQKGSVKIENGYIQLPKTGLVKIKQHRNIPDDYKIKSVTVSQNASGKYFASVLFEYEEEIAEKELESFIGLDFSMHELYIDSNGNCPEFPKYYRLSEKKLKKEQRKLSKMVKGSINREKQRVRVAKLHEKIANQRKDFLHKQPRQIANVYDCVY

SEQ ID NO: 36916 - protein, 350 aa, Euryarchaeote sp.
MILTFNIKHNRDFSDELKKARRVAEFAIRTHTLSSKDVKHFGLSSIIANLILRKYSRNKKIKKVGHVNLTIPNQGIRVDREKQEICIPSLKLTLQYSFRNDFEKINQIEIDDRYAHLSVSVPDKPMIKPQTWLGVDRNATGHVAVVANPQTGKVWKLCKKAEHIHRKYREIRRRLQKIKKYKLLKKIKNRESRIISDLNHKVSRKIVDIAIQQNAGIKLEKLDGIRNNRKHTRSFNCNLNSWYFYQLQKFIEYKAKLNGIPITYVEPKNTSKECSRCGNIGIREGKSFKCLTCGHVDHADANASFNIALRPPLVGSIGQLQVDRDACKGSTDTTRRATPRTTETPEPTKL

SEQ ID NO: 36917 - protein, 404 aa, unknown
  TnpB Polypeptide
MFVLRTLKIPVHYSTTKLKLYKLDRLTRRLSYTVKLWSKLIDDNNIRVRRELQDLRYQHYVQEKTRLSSGFVQQAGNKAFWVWKSYRKKLKQNSFIQKPFSKNKRIAVRIDYRTGSIKKVSLKLASYGVELSTLKKHEKLFLLLNPSEYHLKKLSEGKIQDFEIIKKKGKYFVYVVCGFEVEEQKPEKIRGIDLGINRSITTVLLSKTEKPQINILIDKQKQELLTKYNELIARLQQVKKKKKLKQLSDKRKRIAEYFDRVLAKQLSKLSGENEIVAAGYPYNIRAKNMRGNYNKRLREVVHQWSFSRLLKFITEKYEEKGMRVLLVSEKFTSKKCCFCSSMNTERPTQPELHCKNCNAKIDADVNAAINIALSVRNATDELAATDNDFLYKGLKSETNELIQG

SEQ ID NO: 36918 - protein, 379 aa, unknown
  TnpB Polypeptide
MRIAIKTEVFGNDDLKNTIALSNQACQECIDIGMKAKTFNKTRMHQLTYHVIRKAHPELNSSLVTAVRDQASDMLKRLKLEKKPAKKQQSSIRLNHNTFKFFPDSRIASISTINGRQKYAVKIPPYFQKYNFKDSSSARIRTKKERIFLDIIVETAVPKKRIIKKIIGVDRGIYNPAVTSDNTFFNSRKLREVKGRYKHLKRCLQRAGTCSAKRHLQKLAGRERRFVADVNHCISKAIVNKDCDAIALEELRTSNMKRKTRKKTRSLIGNWSAKQLLTFIQYKAEMLGKTVILVNSHYTSQACNRCGDIRKANRKGRLFKCSVCGFTLHADLNASRNIACLAKGGASRLNVNQPIVACNELKASFKDELRANIVTSSTF

SEQ ID NO: 36919 - protein, 355 aa, unknown
  TnpB Polypeptide
MAGEIREPEVTHVTVAGRVVPLDSYSYMELVLLAHRFRKALTKAAKMYAKSMDKNTIVKEITRELNLGYADTVYKLAKLVVEGARRSNSNPLKVEIRKLFVASRGFSSNKGNRNIRLLSTSELEVNIPWRGWVKFRVLFGGQYIPLVSELVEKALRRELSYTAKIVFRNGRPYLQVSVPIELYLKHFKRGVAGGKLVAGFDLNSDRINMVVVDKLGIIRDVKTEWFPEVTSPGFPREKANALRLRALARLLGYAYYHGVGVVVFEDLERIKGREYTKSTSANRKIGRFPKRKLLQHAIVMALKYGFKVNLVNPAYTSKIGEKLGKELGFDKHTTSAYLVALKALQSENYKLLTEL

SEQ ID NO: 36920 - protein, 506 aa, unknown
  TnpB Polypeptide
MKQTIKFRLHPTASQEQKLHEIFTIYNKIKRIGYNHYFKLKHTNFTKNEKRLFVQHHLMELCHNNPYVNSILINCETKLAQQHTWFEKREKYLKHQIITISKKIKQVKEKNKKDRRLKGLYSHLSSVQNNLFALRFKPIVFGTKKLLRERILGKISRDEYRIRRDSSFCCVGKKQGVNLNLKILPNMTLKVHTFSKEKTKKWFLIPFTVNYKQEQWFEEILDLELYQVEVVRRLIRGGIRYFIHVSYEIPEEELKYGFENGTVGLDMNYNFVSLCNINKAGSFKSFHEIKFRNLHSYRKNKRNDYISYKMDKVVNYCINKQVGIVIEDLSFEQDFSYGRKRNRKLNNFKTSALSLLERKCLKRGVAVRKVHPAYTSLIGKYKYSYSRNLSTHILASYVIARKSLGFKELIPPIYKWLLAQVGDAIKPRLKPSSPYYNWAKLHDFFKHCGITSFKTSEVMKKTLQMKYVLNSVTSEQPDNLRAGLSSMGKVDDWHKFWNCIEITNIL

SEQ ID NO: 36921 - protein, 418 aa, unknown
  TnpB Polypeptide
MSEEKNLKIKNTLHATKERRSQMDCRVISVKIQENRLSKAKLEKLIRFFLEGKWLYNAVLSSTEDFPRSGIKTVSIKVKDTFETREIKNLSAQMKQSVVDSVKTNIINLSKAKKKGLKVGKLRFKKECNEINLPQFGKTYKIKSHNKISVQNIGVLVVNGLEQINLDEVEFANAKLIQKPSGFYIHLTVYSNKQPEVQIEKEVLGLDMGIKDQLTFSNGVKVNFYLEESEQLKGLMRKLSRQVKGSNQYKQTLNRIKRIYEHLNNKKNDVVNKLNSVLKQNYVICFQDELLNQWKRKKSKRKFSFGRKVQHGILGRVKDKLKKNGSNVMLESLVPTTQTCPMCGCLTKHSLDKRIYHCSHCGFENQDRDIHSANMMVLLSGYGTYYQLNVDIISADKMINLLTNIETIGVVIDFIRSK

SEQ ID NO: 36922 - protein, 186 aa, unknown
  TnpB Polypeptide
MGIDLGLKVPAVAVTSNGKTKFFGNGRQNKYIRHQYKSLRQELGKAKKLKKIKQISDKEQRWKKDQDHKISRQIVNFTVENNVSVIRLENLTNIRNTARTSRKDEKNLHTWPFYRLARYIEYKANLEGIGVEYVNPEYASQRCPHCGSSNKAKDRKYVCKECGFSTHRDRLGAINIMNVHVADSVA

SEQ ID NO: 36923 - protein, 401 aa, Actinomadura sp.
MARQVKRAFRYRFYPTGEQAAELSRTFGCARLVYNRALEERTRAWYTEQRRVSYVETSALLTEWKKTGELAFLGEVSSVPLQQALRHLQTAFTNFFAGRAAYPRFKSRKKSRQSAEYTRSAFTWRDGRLTLAKMSEPLDIRWSRPLPEGAEPSTVTVSRDAAGRWFVSLLCQDAIARLDPVETAVGIDAGVRSLVTLSTGEKVTNPRHERRDRERLARAQKDLARKTKGSNNRDRARQKVARIHARITDRRRDFLHKLSTRLVHENQVVVIEDLNVAGMVGNHSLARAISDAAWRDLRTMLEYKADWYGRELVVIDRWFPSSRLCGACGTVAGAMPLDVREWECGCGARHDRDVNAAKNILAAGLAVTACGADVRPKRRKPSGQTATKQETQPATVGIPRL

SEQ ID NO: 36924 - protein, 430 aa, unknown
  TnpB Polypeptide
MTLAQWTGCQRVVGNAKDSEVNLLLWLRKRAILSPSWEGPDPQSEPFPLDQTFSQFKTDLTPWLSEVPSQILRNGVVRYKKGWSNHWKNPGHFGRPRRKKKSDSNSVWLTRELFRFVGPGLIEIGTAAHPVGVLPFVQHREIPEPNSIVISRARYGHWFLSYASDCVQGPEMLPDEDRIKALATATDLETKVLGIDRGVVFNAACSDGSTFKLKDEAKDRLKRLEKRRRHYQRQAARGRKGSRRRDKVLGQAARCSARIASVREDFLRKTAFQIAKVAPEVVALEDLNLKGMSKRAKARKDDVTGKWLRNGAAQKSGLNKAMANAGLGNLKVYTEQALRKLGKMLVAVPAHHSSQECSECGFTHADNRPDQGTFLCQRCGHADNADLNASKVIKKRGIALIISAGSADSARRVPKPKGSGRGTVIPTCIQ

SEQ ID NO: 36925 - protein, 334 aa, unknown
  TnpB Polypeptide
  misc_feature (290)..(321): Xaa can be any naturally occurring amino acid
MAKEIRSVEYVVLPVSRTKAKKMFRIAGACRYVWNHFRERNLAGYQAFKNGKAERPQTNYFSLGVEFTKLRHEVEWMRELPANPIKYTLKYFADALKEAMLGNKGFPKPRSRKKTAPSFTLPSKENFRIRELDTKYSLLLIPRVGWVKLVRRGGNPYVEGVPRQVVLRHDGHRWRAFVFYEVEAQCGPDDGEFLGVDMNVRQVATSDGHFYSLPDLEKKEKRRKWYQRKMARQVKGSNRRKDTKKKLGKVSRKVANIRKNWIHQTTKDIAGKCGTIVVEDLKIKNMTASXXXXXXXXXXXXXXXXXXXXXXXXXXXXXXXXIKRTVKPKRGSYV

SEQ ID NO: 36926 - protein, 239 aa, Lactobacillus sp.
  misc_feature (140)..(140): Xaa can be any naturally occurring amino acid
VSKVIKGIKLRLYPNQSQREQLWQMFGNDRFVWNQMLGMAKERYQNNPNSLFVNEYGMNYLLKQLKCEYAFLRESDSTSFLVVNHNLAQAFKMLFRHRGGYPHFKNRHSSRQSYTGRSACKVLARRRMQLPKLGSIRTSXCCSGIGAVIRISRTGTPYASPIQDVRPVRCSPGEECNCQNWAAFVQAGLVLSVMLKSSVTPSAMNRQAVIICHCRLKLRLISCLRLVSRSDWIWASPIW

SEQ ID NO: 36927 - protein, 446 aa, unknown
  TnpB Polypeptide
MWHSFLSKIASLTTYTIFCDIIFLRKVVSISMVKTVKLKLLTTAQQDEQLMQVALEYRNVCQYVSDWIFEHGFVLNFMTLQKEIYHEIRDKFQLNSQMVISALKTTTAKYKTIKEQHKQKPARYKIGEKTVKGRKKNIYEVVPRTLEWLWESVRFKAPQCDQVRNRNYRLLKDGKLSLTTLSGTVKVPFQAPDCWQKRLDEGWTLGTGKLVKQGKHWYFCVPMEIQTTPVAIESIERIVGIDRGLNFIVATADSDGKSFFKSGHEIMHRRHCFAKLRKKLQIHNTRGSRRKLKAIGHRENRWMSDVNHQISKALVDHYGPNTLFVLEDLTGVTFEEENLHGTAKARQDKRSWAFYQLEQFLIYKAEAAGSLVIKVSPRYTSQRCPHCGIIDKSQRDHDHHEYRCRCGYRTNDDRVGALNLLELGRRYLKGESKPKYTKSKVLAIAE

SEQ ID NO: 36928 - protein, 557 aa, Nocardiopsis sp.
MSGTGMRRLRSIADPFLAPAPTGVSVRDRLKGLTPRDEAVLRAVGAHLGSLASTDLAARCADGTGHGKDSWAARKRQLTPQSSSRWAGAITRASNEQWALARRSQAAHLHRLQAGIDTLRHRLSQPLGAKGSQGAPGGYACRWEWHAKSRRLAALEHRHAAAVADWEAGRVRVVRGGKRLLNTRHHLDQAGLTQAQWRSRWEAARFFLSAAGESGKRYGNETIRITPEGQVSIRLPSPLAHLVNAAHGRYVLSGRVVFAHRGAEWADRVEADGAVAYRIHLDTERDPGQGRWYVSASWTPQAVPALPMQAALARGVVGVDANADHLAAWRLDVHGNPTGNARRFAFELSGSASHRDAQVRHALSRMLRWTTTSGVRAIAVEDLDFSAEKSREKYGRRKKFRQLISGFPTARSRSRLVSMAHALGVAVITVDPAYTSRWGAQHWQRPLSTKRRKVSRHDAASIEVGRRAQGHPVRRRTAPPPHHRSDGVGHRTAQAGPGSSGREGNRPPVTERAHDVRGRTGQERGDPAHPAPFGMGAVPAWPPGVTSDHCSGTVPRR

SEQ ID NO: 36929 - protein, 369 aa, unknown
  TnpB Polypeptide
MIKQKAYKFRLYPNQKQMMMFEKTFGCSRFIWNQMLADKIQYYKDTGQTLKNTPAQYKKEFPWLKEVDSLALANVQLNLQKAYKSFFQSKFGFPNFKSKRHHQSYRTNNQKGTIAIENGKVKLPKIGWVRLKQHRKIKSDIKSATISKTATGKYYISILCETDIQPYPKTNSSVGIDLGLSHFAILSSGEKIENPRFLISASKKLRREQKILSRRGLLAKQRGKRLNDCSNYQKQRLKVARLHEKILNQRRDFLHQLSINLIKNHDRICMEDLASKNLMKNRSLARAIGDASWSEFVRMLEYKAEWYGKQIIFINKWFPSSQICSNCKMNSGKKPLHIREWACESCGVHHDRDLNASLNILHEGLKLLA

SEQ ID NO: 36930 - protein, 389 aa, Okeania sp.
LLLKYKYKLKPHKSQTVIIANWLELARRQYNYRLAERLNWFEATRTPVNACPLNVSVVPVERIYQNVPEFRIQTREGRKKDSNGNPITKKGDKHPNIINGYVVWERVQLADLAKTKKLFPEYKSMHSQVLQDVIQRVQTTMDNFTKPDQNGKTSGRPKFKGKHYYNSFSYPQLSNTNIVKNSNGRYCVNLPKIGLVPFVFNRPIPIGFKVKTGTLIREADGWYISFTIEDKSVPLRRAEIQPTSENSKGIDLGLLNYAVTSDGEFIEVPKFFRFSEHRLSKLQGRLAKKHKHSKSWKILKRKIAKLHQLIARQRLDWQFKLAYHLFSDCQVIFLEDLQIASLVRRCKAKLGNNGQFLPNGQSAKSGLNKSLQDAATVSLFRFWSMLPGN

SEQ ID NO: 36931 - protein, 443 aa, unknown
  TnpB Polypeptide
VQYTYRKYRVPVSLTQDQKRLVSAYRDAQRQSYNWAVSRIKLDNPVTEYGLHKLHTAYRRKHDWLRSTPTAVQRAGIRDAFVAHKLSVRFGRGHTTYRSRKRHNGMSVKCGLAPRVEDKYTIWLPRFGTVRASIPNAIVEHEPRSYEFVQTRSGRYMLYVSCRVTIPSWNAPLNATVKGIDRGMAEPTVVVTLDKNGQVTDKSSYDTATPFKRNRQRYQKMQSKMSRMNRHSNRFRRLRARLRKKLQKIRNRRTYAECIAAKHVCQDHSPSTIVFEDLKISKMTRKGGAYKRELNREMRFVRHYAVEQRIRDRAELGGISVRIVNPHYTSQTCARCGHTDKASRVTRDMFKCTRCNYIQQADVNAAIVIGRHGLPPSDYTQTKVGQHTEVGTPFVRRQLDARLNCFSEGSIRRHESQVPARSLSPSGMEKQRHGTGVVIDSSR

SEQ ID NO: 36932 - protein, 352 aa, unknown
  TnpB Polypeptide
MAIIPDKTTKLYYSIKEVGEMFGLNDSTLRYWEKEFPFLKEVDSLALANTQLDLKAANKRHLDDKKVGAPQLKSKHKSKMSYTTNNQAMHCKDGSFKDTIFVVGNIVHLPKVGNLKIKKHCSHKDDWRLKAATVSCTRTGKYFISLLYEFEEDIQPVAATKEKSLGLDYSSHDFYVDNNGDVANYPRFYRKAETKLAKEQRKLSRMKAGSNNYNQQLQKVRLLQEHTANQRKNFCHTLSTAIAKQYDAVFVEDINLRGMAGSLKLGKSTNDNGFGMFRTMLEYKFTSQGKTFAKIDRWYPSSKTCSVCGLIKDDLTLADRSWTCSGCGTTHNRDHNAAINIRNVGLLGLYPA

SEQ ID NO: 36933 - protein, 341 aa, unknown
  TnpB Polypeptide
MIKSFKLKIYPNKGKFSKLNNLIEFWKIEVQNKIDILWELDILCGQYCPSEFARGGRLVRDASDKAYNMVKVAKKMNQGKPIFKGADIDINSAGIRFMDNITKLYDFWVKITHLENNKRLVLPCKKTNIFNNALRIGILKKSAKILKIKDNFYLQVFVEIPSKVKNINSLLGVDVGLNNSVATSDGNFYGDDIKNLRINTKHRKYVGLSASKQALNRVANELISIYSNTVFVVEDLLFKGKRKRSKEFRRRNNNWAYGWLSRRLDFHGKLEGFQVIRVNPAYTSQTCPSCGSINKANRVGEIFKCIQCGYSNHADTVGAINILGRVAVERASHEYAKNDNA

SEQ ID NO: 36934 - protein, 434 aa, unknown
  TnpB Polypeptide
MKKNELIKSSLKETKEKRKSQLPKVYQLKLQELRELDIELLDRLFLEAKWLTNYVVSDIQNRLTPDTYKLKEVEVKVKDSFEKREITHLGSQIKQSIIERIEDSLKGLRESKKKGNKVGKLHFKSEINSLVLKQYGNTYTIDFKYNKVHIQGVRKEFRVLGLHQIPDNVEITKGELIRKPSGYYLYVTAFLNEEPSEVKTRKGKVKERYVERFDKPLGIDFGVKNQLTLSNGIKINYEVKESKRLKILQRKLARKKKGSSNFRKTVQKIQKEYEDLFKIKKDIQNRIFAFAKLYKKVYAQNDTIKSWQKGLFGKQIQHTGIGGIISRLKNNLETLVLIDRFLPTTQTCSNCGHKQKISLSDRVFKCENCGFEIDRDWNSARDMVLFGEKTPENLSLDWAEVTPVEREASARILESNPYIRASYTSMKQEALSFN

SEQ ID NO: 36935 - protein, 468 aa, unknown
  TnpB Polypeptide
MATSQTRTAVCPITLTGADYRRAHDACHQAALLWNRAVNWVHSEWKAKRSPNKYEIQSFLTLLPQEKRPLHTHTTEIIAHDLYEAIKTSRTNRKNGMKIRSPWRKKNYRPLSFSKGFGWRISKDKLHLSLGQGRPRIDLPIPTILDSETGRPVPPEFWGEIQLCWDKDARQWSLHTPYKTEQVGSCGDGVTAIDEGVINSMALVTWADEHTINVTIINGREARAIKRQRNKSVGSIQSKLSKCKNGSKKHRRLTKAKKGVNAKANARLRDFDHQVSRKAADHIIAHGTSRLVIGDVRGIEQKTRQRRSAGRHLRQQLSQWSRGRQERYLTEKTGLKIEYLDESGSTKTCPACGARNRPKGRDYRCQNPSCGFTCHRDAVGAINILQKALHGEYAPVGCDTEIRVTYLRAVKRWSPDQRKAQRKVQSRKAGALSSAQNRASVVEARQSKPIQANPSTGSLELDPLVVVA

SEQ ID NO: 36936 - protein, 321 aa, unknown
  TnpB Polypeptide
MPSYLRRASIQNALGSVSSYKTRLGLWEKTDRLEGKPRLVYENHAMPVFYRDVMYREDEGGKDAAYLKLYDGHDWKWFHVRLSHTDMEYLRKNWSGKKASAPTLEKRHRKYFLRFSYTEDVILAKIPAKEQIICSVDLGINTDAVCTIMRSDGTVLGRKFINFHSEKDRMYVCWDGYGDSRENMDLYRQRADGLCKTPEYRTGQEDCRSSYKICKREPCRYNCLRIPGDKRKDIREKETENCICGENGISRNAVNIRHTETECGYRGSVHGIPAGLRMMEPEQLSVIRETTACVYSRQENDIIVTYQHRTILEQDTLSENF

SEQ ID NO: 36937 - protein, 448 aa, unknown
  TnpB Polypeptide
MRKNKERRSFHMEKKKVRKKKDRSQIITLIERHIIKSGHRYYNKCDEITFLAKNVYNATLYEQRQSFINGKFKNCNEVSKEFVKNKQVDYKALPSRVSQQVQRLSDKNFKSFFALLKLKQAGKYDKKVRLPKYLDKKKGRLVAYYVKGAISFKKDGYVKLSQTGIEIKTKLRREQIIGARIVPKKGYFVVEILYDVKKAEKKEEQKRYAFIDPGMDNLMTITSNVFNPIIYNGKKIKSINQLANKNNAKRQSRMPLVRFRDGLTTQEKIEQIEKGLLEKDKSKGMKGLWRKRELRIKDSFHKITKDLVNQLVSHNIDTVVFGYNKEQKQDIKLGKKTNQNFVSIPFTILRQMLEYKCRLVGIEFIEQEEAYTSKCSFIDKEELKEKEEYLGERKKRGLYQTQSGKKINADINGSLNIGRKYLEKKGLYTEEIHKELISKMHNPKRKTI

SEQ ID NO: 36938 - protein, 470 aa, Faecalibaculum sp.
MDMPPVYEQPGSLILPLEIRLDKRLCPEVIDCIDDGLSVYSSAYRYAFSQIDHGQRNLNQLTKDLQYKYGLKSRAANSIARDAKARHQAGLELARVQDKNLRASILRKKKRLKKLKKTVEEKSREAAAGRLGHHELSHYRRQKHDLWLLGQLIPRLEAKLKRWKKDIENRHVRLCFGTKKLFKAQYHLKENGLSCHEGWKELFVRSRDRMMYLCGKNDEKNGNQLCHLFRMEDGSWTIGILPVLKPEKGQDKIITGPVKITHAPGLELLNKTFDGFEAAQPAKQAVSVRILRRKKGHYVQFYLHLPKPEGWSTSSFEGAIGLDFNADHIALCETDRSGSVVYARRISLHGFGRKKHNYDQGIAQMMSAVKEITGEARLKGKDLVIENLDFSGKKTDLQKNRDYNRMITQLAYGRYTQAVKRRCFKDNVDLKIVDPAYTSKKAKETVCRELGINVHLGAACMIARRGLGLF

SEQ ID NO: 36939 - protein, 382 aa, Erysipelotrichaceae sp.
MYKAYKFRIYPNDEQKIFINKTFGCSRYVYNYYLNKIKTEGYKNSYNNIKDYTSTLKYNSPFLQEIDSIVIRKSLFNLEAAFKKLFNKTGGYPKFKSKYNRNSYNTAAVNRIYKNKKYCNIELDLENKRVKLPKLKWVKIKGYRNLKKINGEIKNATISKEATGKYYVSLLFEIDKKIEKVDPQSIVGIDLGVKKILTLSDGTTYDNNKYILKYEKRIKRKQRELARKVKGSKNYYKCKKELAVLYNKLANSRKYYIHKITKDITCEYDIITCEKLKTNEMIINGKENKLSSKIQDATFSEILRQLSYKSKYKGKEFFQIDTYYPSSQICCRCNNQNKEYKVLTKREYQCIKCGQEIDRDLNASINIMFEGLKLYMESLIRC

SEQ ID NO: 36940 - protein, 410 aa, unknown
  TnpB Polypeptide
MNLIYSFYIPQTEHLVNLCKVSNSLYNQALYLFRQTLKNENKWLWYADMDKLMKNTPNLEGKINYRLLKAQVSQQILKVLDKNIKAYCKAIKDFKAHPAKYKAMPQLPSFRKRGSLFNLYYSNQSARIKDGMIRLAKNLIIPIPQWDKYKERIQNFQQVRILPSGKKLKVEIVYRQEVKDADLDKSKYASIDLGIDNLAAMVTEKGSFLYSGKFLKSYNRNFNRQLARLQSIKDKQGIKKATKRMQGLYENRERYFEDAFHKYSRMIVNHLIENRIGNLVVGYNTGWKQSVNIGNRNNQKFVQIPFARLASYLKYKCGMAGIRFVENEESYTSKCDALAKEEIGKHESYLGKRVKRGLFRSSTGRYINADVNGAVNILRKVVGDSDCISQITGSGRLLRPIRYSSPFRVA

SEQ ID NO: 36941 - protein, 368 aa, unknown
  TnpB Polypeptide
MLNFKYRIYPTKKQQHLLEIHLEECRWLYNYFLEKRKNSWENEKKSLNYYSQAISIVKLKKERKSLDIVYSQVLQNVAVRVDLAFKSFFRRVKAKETPGYPRFKGTNRYDSFTFPQKGFEITNNKLKLSKIGTYKIKLHRKPEGKIKTCTIKRSATGKWYTIFSCLSEPKLLPNSDKNVGIDTGLKSFVTFSDGGKIENPRFFRKEENFLIKTQRKLSTAGKGTLERKKFKKIVSRIHERITNKRSNFTHQESRKIVNKYGIICIEDLSINKMVHNHCLSKSIMDAAWGQFAKYLSYKAENAGRKLIRVNPAYTSQTCSKCGHRESIKLSDRIYTCSCCKVSIDRDYNASLNILSLGLQTLGFTPESP

SEQ ID NO: 36942 - protein, 402 aa, Thiothrix sp.
MIISHKIRLDPNHKQATYLAKAAGTARFAYNWALAEWQTQYAAWKDDNTQPKPNQMRLRRQLNAIKREQFPWMLEVTKNAPQMAIIQLGAAFKNFFAGRTQYPQFKKKGKSRDSFTLTNDQFSLDGCRIRIPNLGLVRMRETLRFSGKILSATVSRTADQWFASITVDTDQHHLPPAKNQGTVGVDLGVSALATLSTGEKVVGAKPHKALLSRLKRLSRSLSRKVKSSANRHKAKQKLATLHARIANIRQDSLHQFTTDLTRRFHTIGIENLNVSGMVKNRHLSRAISDMGFFEFRRQLEYKAEMRGAVVVVADRFFASSKTCSAAGCEHKVDKLPLSVREWTCPVCGAVHDRDVNAAKNLEEYAVSYTVSACGGEGSGLGRKPKTKPAPVKQEFNTMTTFS

SEQ ID NO: 36943 - protein, 288 aa, unknown
  TnpB Polypeptide
MLANERAKILFATVTHHGGHWWVSLNVEAADVHPAHQHPLRAEADHGGWVGVDRGLSAFLVAATSDGEEVARIGDAPKALRAGMARQRRLSKSLSRKQKGSAHRRQAATKLGRHHHRNTNVRRHFLHQVSNALVKTHDRLVIEDLNVTGMLRNHRLAQAISDAGWAEFARLLRYKQAWRGGDVLVAGRWFPSSKRCPECGTVRGDLNLAERVFTCGCGHSADRDRNAATNLARWGQAHHDPHRSPDPQAGAGPPTPADGTALTSTPRVPVKPARMTREPTFTPPRRPE

SEQ ID NO: 36944 - protein, 329 aa, Phytohabitans sp.
VLELNAWRRQRRDTPLASYQELCRELAASGPGVFGELDSTGARSVLRRFSDAWFAAAKRRRGGDAAARFPRRRRGLVPVRWYHGTFTLDPGGRRVRIPAARGGQPLWLRLARSLPYPVDQVRSVTLLAEGGRLFLDVTAEVPVTVYEPGCGPDPARTAGVDLGIIHPYAVAGPDGQALLVSGRAIRGEHRMHLADTKQRRRAVAGRAPTRGQRGSRRWRKYRRRARAVDGRHARRVRQAQHEAAKTVVSWAVGQRVGTLHMGDPRGVLQVAAGRRHNLRLRQWQIGQLIRILADKATVAGITFTSSTNAAPRPPARAAGGGSRNHPGGS

SEQ ID NO: 36945 - protein, 384 aa, unknown
  TnpB Polypeptide
MIKGFRVQILPNEHQQKEIIKFCNAARYAYNWAIATEEENYNNGGKFVSGYDLTKLFTQFKKQEGNKWLKEISGRALKVAILNATVAYERFFKNISDKPKFKSKKRSKMKCATHEGTIIITSDKVRLEKLGWIKLAQRNRIPFGDNIKYFNPKIEYDGIDFWLSVSVEIINNQDNDKTKTETIIGIDLGIKTLATCSNGIINQKPDIAKIKKKFKRLQRRASKYYQKMIEKSKQMKIKFVQIQKSKNLLKLEKEIKKLHTKIKNILDTNIHTFTTSLIKLNPEAIVIENLNISGMMKNKHLARSIAEAKFYEIRRQLEYKCQWSNIKLIIADRWFPSSKLCSECGHKKDKLSLSERVYICEECGSIIDRDLNASINLKNLAYAT

SEQ ID NO: 36946 - protein, 384 aa, unknown
  TnpB Polypeptide
MYITKTLKQKKTQHLDDLARASGRCYSKVVSLVRKTHKQKNFWLSKGSVQKYLRHKAYALHSQSIQACADTYFDSLKSFFQVRKSNSDAKPPKRTPRYFKVRWKSSAIRLRDGHLILSNGKGREPVILEDVSEKPNYVEMFFKRGHYYFALVYKVGVPPKQDTGITVSVDMGEIHPIVSFNGKRTTIYNGRQLRSIMQYRNKIKASFSAKMDRCEKRSKSWYKLLKAKRKTLDKLDAQIKDAEHKITSRFITDCEKAKADTIVIGDLKGIRDNIKYSKKSNQKLHQWAFARIADKITYKAELAGIHVVSESEAWTSQTCPQCGNRKKPSDRNYHCKQCEFTYHRDGVGAINIFNKVSGLINNPVVGTLAFPFGVRYNQHLCRSA

SEQ ID NO: 36947 - protein, 462 aa, Oxalobacteraceae sp.
MRGGKQATGRREENDVRAWRGSNSSFGTKPILCDLIQNKQVRSDQHGRQNSRCLDQHQCPECTMFLAHRIRLDPNNVQATYFARAAGTARFAYNWALNEWQKQYEACKADPTLPKPSEAALRRLLNSIKREQFPWMLEVTKNAPQIAIMQLGRAFENFFAGRARYPRFHRKGRGDRFTLSNDQFRVEGRRIRIPKLGWVRMRETLRFTGRIVSASVTRVANHWYASITVETSDPPAPPAENQGTVGVDLGVKALATLSNGESFEGPKALRALLMRLRRLSRTLSRKVKGSRNRARAKLKLAKLHARIANIRRDSLHQLSTSITRRFHTIGIEDLNVKGMLRNRHLARAIADMGFYELRRQLEYKAARRGGQVVLVDRWFPSSKQCSGCGYRLDGLSLDVRHWTCPGCGAFHNRDVNAATNLRNMAVSSIASACGGEGSGPARKRKVKPAPAKQESNGNVNDG

SEQ ID NO: 36948 - protein, 557 aa, unknown
  TnpB Polypeptide
MRAASFITEIPLHANGSQERTLEVRFRAAQQAYNSCLGEALRRLTLMRERKAYQTARKLPAGGGRRAAFHDLQQSLGFSEYGLHAWATCYVSHTLIGDHLDANTVQTIATRAFRAVQQYGFGVRGRPRFKGINQIDCLEGKGNKQGLRWKDGSVVWNGLTLQGLISSSNPVLTHGLTHPIKYVRLIRRRLNGRVRFFAQLVCTGQPYQKPHHVVREGVVGIDPGPRTFGVAGADWGAQVDFQTPLKQSRQVIRRLQRHIDRQRRSNNPANYNPDGTIKKGKLAWVISKGHRRNKLKLADMHRTATAHRTSLHGQVAHAILSRGSTILIERNSYKSFQRSYGKSVGSAAPFAFVTHLTRLAESAGGSVTRVPTSLRLSQTCLCGKIKKKSLSERVHHCDCGITVQRDVWSAWLARFAVATIVKKGAERGKEGTIGKDTVTWRLDAEAAHVAWAILPGSDASLPAASTPLPPERFAALVGQLGKREPASGCAVRCAHVVTGERISLVAASEVVAGKGLLKTREATDAVPLTQLSLFGEECVGWESRGKLVGRAQESHRL

SEQ ID NO: 36949 - protein, 367 aa, Clostridiales sp.
MTRIRGYKYRAYPNKKQREFFEKTFGCCRFIYNHYLEAKQQVWNECHDTLSYPEMCKDLSRVLKKENAWLKEADSIALQQSLRHLDRAYDNFFRGRGGYPKFKSKRSAQSYRTMNVNCNIRIDGDRIVLPKAGIVKIVNTRDFEGRILSATVTMTASGRYYISLQVEEEYEVMPNRGGEIGIDAGLKVLYTDSDSCSVINPKALAKHEKRIRRLQRSLSRKQKGSGNREKARRKLAIEHEKVANIRSDFQHKISYRLANENQVVCIEDLDVKGMMSDHRLAKAISDASWSGFYRKLEYKMADHGGVLIRVPKTYPSSQRCSCCGKINHKVRDLSVRRWTCPDCRAEHDRDINAAKNILEKGLEMLAS

SEQ ID NO: 36950 - protein, 494 aa, unknown
  TnpB Polypeptide
MQNGINETEKLKLVEVLLAYRKLATNLHSLIWNEFYKTGNVASYNPFYGDVDTTLSARYEQTCFKQVAGMVKSFVSNRQNDFVTTVVRSSLSKETQHKMLAINKSNNWFKSEGYEHKSKDDSVLIITKEDLKLARKIFRHAINRCRLPSCKGINLALDTKVAVIEENQTTKKWDFWVKVSSLESGNKIKIPVKSNGYFSNGRGEQNNFVQINFIDNEVRVYFVKTAEMLPYDARCKSIGLDFGLATFLASSRGDKFGQRVLDKLLTVDTELIKIVKRHPTTYMKVKRYKDLVQYLRGYLKGLIGSSINRVVEIYAPSEIVVEKLDFRDSNLSRQMNRILRNCGLGALDDKLDRLNLDYGITITKVNAAYTSKMCSNCGYVSPNNRQGQANFKCKCCGYKNNADVNGALNIDARRSSKTINVALGTKKVLHILLNEFLSRIETKFKYKVKGVKGYLYACPYKLQDIFDNEYFMNYCSKEELNNFCSKFRLVAKRN

SEQ ID NO: 36951 - protein, 378 aa, unknown
  TnpB Polypeptide
MLRAYQYRLYPSKNQQRSLWKLLKLGCWLYNTALAERREAWEKDGKSISYHDQAAKLKELRNTTELGRLNFSACQQVLRRLDKAFQAFFRRLEAGEKPGYPRFKKPHRFRTLEFVYNDGLRIKKDRLYIQNVGLVKVLWHRSLPEGRIKQAWVTKKADGWYVTFAVDVPEDTLRRLLPPLNTAVGIDVGIENLLTLSDGKVIENPRWYQKTERKLAEKQRILSKKRKGSKRWKRMCKQIAKLYLKLARQRQDFYWKLAWDLCRRFGFIIVEDLNMDGLTQGNLSKQVLDASWGLFLNRTLSDVAWRAGRMVVKVNPNGTSQVCSMCGFLVPKSLSVRVHRCPYCGLTVHRDVNAALNILHLGLEQALGGSNAPVPERS

SEQ ID NO: 36952 - protein, 261 aa, unknown
  TnpB Polypeptide
VLHNSRKCCKCEIEKPVPAPDRPTIGVDIGIKTLAVCSNGQVFDNPKAYRRMSRKMKRLQRRVSKRVKGSKNRKKAVSKLAKLHLKVSNIRKDAIHKLTTYLAKNHGEVKIEDLHVKAFLKNHKLAGAVADCGMYEFKRQLEYKTQKFGSKLTLVDRFFPSSQICSSCCNHRHKMPLKVRVFECPNCGNVQYRDLNAARNIERWFEGICVPERSELAVSSTVAACGVDKPDNRHCCRYERNRKLTLPATYVQLSLDLGSFG

SEQ ID NO: 36953 - protein, 549 aa, Lachnospiraceae sp.
MYHVECIDIRKNDPLYPYLDRASLCANSMYNVSNFYIRNLMTGLKKDPSMRTVNERAVIDTVSGSISGINEKLREKYEIKIRNIQNAGGLSEQEKAEKAAGVRYLQFSMPTAEKWFASYGLLDAVFRYTGNEDYRSFHVHVMQNAVKACCEAWKGYFEALKAFSPSSGSTGRPRIPGYKKPGGRSTAVFSNIACSIKHGVLFFPCYREDGPSGRKRKRCSIPVAGLPHASGDKLVEVRAVPYFGLFQLQVVTDDGLSEGDLVPDEGDIIRADGEPSGVMMLDPGLNNFASIADNKGNVPIVIKGGAIKACNQWFNKRMAFLRSEQMKGHDPKTYRPPVTRQMERISRKREAFLRDTFYKYAHYICRLMEERGLSYLIIGYNKGQKQGINLKKKNNQSFVQVPFARFRRVLKVVGVHYGIRVILQEESYTSMACFGNRDYIPTYGKGDAEGISFSGKRPKRGLYRQDDGKALNADINAAANTGRKYDGRIFPEGMDCGYLYGTVRAVTYKDVLRKSLRNNRSNPGQTGQRACVCPVGQTGQRACVCPVSA

SEQ ID NO: 36954 - protein, 434 aa, Acinetobacter sp.
MKINKAYKFRLESNAEQELVLNKLLGSARFVWNQILAVSFEMLANNERINKVNLVNKIPELRKKPECAFLENSSNGVSLQQKVRDLGDAWGKFFNKKEQAKLKQKPFRAKKPRFFKLSDGGEVQLRPLMPRFKKKSDGYDSIRIVQFGRYCWVKGNQVKLPNDIGVVKFRKSQNIVGEIKNVTISKHVGKWYVSFGAENTVEAPVHPSKSAVGIDLGVKKLITTSSGQVFDPINSFKANQVKLARLQRKLRKKNKFSQNWKKLNLKINTLHHHIANIRHDYLHKVTTTLSKNHAMIVVEDLKVANMSKSAKGSIEKKGKNVKAKSGLNKSILDQGWSMLVNMLVYKQQWRGGLLVKVDPKYTSQTCSSCGHVAKENRLTQANFSCVECSFGENADINASRNILAVGHTVLSVEGGCGKGRLAKQKASEIREEVT

SEQ ID NO: 36955 - protein, 413 aa, unknown
  TnpB Polypeptide
MPNKAKSKDSQELFYQVVLSYKVNHNHPIKTFLIECRDKLNTAISIIWDNIEYPKENKPKLPKSKEFKRELRNKLLKDWNYASHYIDGIIKTAYSILESWSSNYKKGYRTKTKPIVKRLFVRVKTTLIKYDKEKGEVRITIKPRTEYLILNIKNEWFFNKVRDLTIGEIILKENEAFLTFKDNLNYSDKEIIVGVDSNLKSLDLFHPIENWIRVDLTELHRIKEVYDKKIDGLKKLLKKCPLRVLRKIKRLLERRRNRVNDFLHKLTTQLSRLFPNAIFVFEDLNKRKMYKNKHHNRRIDRANWNGIIEKISYKTIAILVNPAYTSTTCPICGSKMESQEGQVVYCSNCMNSFNRQLVGCINIFRKGLGKIKKLMGGPGVASTGAEVSLRKLMTPNPNVVYYVDYNGKYLKCL

SEQ ID NO: 36956 - protein, 384 aa, unknown
  TnpB Polypeptide
LLKSFKTEIHPTEEQKVRIHKTIGTCRFIYNFYLAHNKELYQNGEKFMSSSKFRVWLNHEYLPQHPEYLWIKEAYSKAVTQAVNHGQTAFKKFFNHESAFPKFKKKGRSDVKMYFVKNNPKDCRCERHRVNIPSLGWVRIKEKGYIPTTKEGYIIKSGHVSMKAGRYYVSALIEIPDNKTADLSNEGIGIDLGLKDFAIVSNGKTYKNINKSARLKKLEKRLVREQRCLSRRYENLKKGESTQRANIQKQKLKVQRLYQRIDNIRTDYIKKTIAGIVKTKPSFVTIEDLNVKGMMKNRHLSKATASQKFYEFRTRLQGKCAEKGIELRIADRWYPSSRRCHNCGQIRKDLKLSNRVYQCSCGYCEDRDLNAALNLRDVKTYQSA

SEQ ID NO: 36957 - protein, 372 aa, unknown
  TnpB Polypeptide
MLKAYKYRIYPNKTQIEQIEKQFGACRFVYNWALEQKIKYYETEKKTLSCFAVTNQLAILKKSEGYEWLKDSNSQALQMAIRNLDNAFTRFFREKKGFPKFKSKKNPVQSFQIPQHYVVDFEEGNVKLPKIGKVKTSFSREFFGTCKTATISRSTTHKYYISILVEDGKELPEKQKFDDNTTIGVDVGIKDFAVLSNGEKIDNPKYLKNSLQKLKVLSKRFSRKQKGSNNFKKAKLKLSRLHEKITNQRNDFQHKLSIKLVRENQAIALETLKVCNMVKNHCLAQSISDAGWSAFVTKLEYKAEWYGKTILRIGTFEPSSKLCNVCGYHNKELTLAVREWTCPSCNTFHDRDINAAINIKKFALQDQNLVGV

SEQ ID NO: 36958 - protein, 322 aa, Nitrosococcus sp.
MTSTLAALTLSRQLTFLKGLGPYAWLKEASATCLIQKLRDQDMAFRNFFAGRAKYPRFKKRAHGQSIRYCFDRRHTGKMKAWIEGKLVLPKLGALKLKCSRKPQGVPKMVTVTQDCAGRYCVSFMCEETLQYLEGWKPGNPGHLRTYRRLLTKTQRLLSRKVKGTYRWHRQRIRVAKAHVKVRHTRQDWLHKLTTTLIRQADFIAMETLNVRGMMANRKLAESIGDVGMHELKRQLEYKSKWYGVEFAQVDRWAPTSKTCSACGMAQKDMPLEVREWTRPDCQTVHECDTNAARNILMLATVGRTGSDARGGAHPPEVAYGY

SEQ ID NO: 36959 - protein, 398 aa, unknown
  TnpB Polypeptide
MLSYKFRVYPSGKQVIRLHRQMQLAKELYNILLEKSKSHYKETGKTFSQFDMNKHIFQIKKDRPEFEAIHSQVAQNISKRIGDAYKAFFRRVKEKKSGKKVKVGFPRFKKFVSSLTYPQSGFKFISESRFYLSNIGSLPMVYHRVPKGDIKTCWIKQYPSGKWYIGLCNDIQEEDFESNGKEGVGIDVGLTSFATLSNGEKIEAPQYLRKSEKKLKILCRRVSRKKKGSKNRKKARFRKARLEEKIENQRFDFLHKLSFQQVNSFGKIAIEKLQIQNMQCNHHLAKSIADAGWGIYKNMLHYKAQSAGCEVFDIDPKNTTKTCNNCGNIQDMPLSKRIYNCPICGYKADRDLNASINILKRATVGLTGSYVCGDSSSTPLARVEQGVSLKQKLNTVRT

SEQ ID NO: 36960 - protein, 420 aa, unknown
  TnpB Polypeptide
MEMTDVDSMIMQKCLILNTLPLTEVKRAKLRETYGSFLQMAQECLALIRDSKVKSDTELHHLTYHEHRKRFGVAAQLVCEARRHAWSVRKTADRINYVVARFDRRIFSLKTTRRGNPALSIRVNSERVGLPITQDGAWRRLQAHLGDGWEISSVIMKSNFKFLAVLRKDDPPKRESPNVLGVDINAGSVAVSILGADGRVLKQLYLGQDLAGMQAKFERRRAKLQAHRDARSRSKAGKKLKQLGRRQRNYTRTRCWQLTGELVKLAKQYDARIAIERLKYLRKRRSEWGKRSRKRVNRIPYGFLRFALEHKAAQGGILIEAVDARYTSQTCPRCGFVDKANRRNFHYFRCVRCGFEANADRVASLNICRRAGPEGWRPERPESQIPVVGGPVNGRVLSGEGVCWQLRSPEGQTLSFRWGS

SEQ ID NO: 36961 - protein, 175 aa, unknown
  TnpB Polypeptide
MGESRLFERDGTWYLHVTATRDAEGGSEVSDEERTPIGVDIGEASLVTVCHRDDHGCPTAPELWADEGKTVRRLRKTYFTATRRLQTRGSERIAESFGDDLWNQIDDVFHRVTREVVDYAESVKNPVLVLEDLTYIRESMDYGEYMNRRLHGWGFAKPTRRYDTKPSRRVSPSRR

SEQ ID NO: 36962 - protein, 439 aa, Scytonema sp.
LAELIQTQLIRIKLPQFETNILEFICKRSNSLWNQAIYYINQNHKLTHPGNLPSVPYEQMAHDLKEELNYKLLYSQSAQQTLKSVAEGFKSFKELLPMWRRGELPHLNSEPKPPSYRKKGGLFQVSYPKQALTFDLGISFVRIPLGAELKTLEGISELFLPTPTNIDPEQIRELTIVPRNGEFYAAYSYAAKSPDAVKLDKMKALGIDHGKNNWLTCVSNIGTSFIVDGLHIKSLNQWFNKQVATLKEGKPQGFWSKHLASITEKRNRQMRDAVNKASRIVIDHCLKQSIGTIVFGWNPGQKQRVDMGKKGNQSFVQIPTAKLKDRIEQLCKLHGIDFVETEEAYTSKSSFFDGDELPKHGEKPIGYKPSGKRVKRGLYRTGNKNWYINADCNGAANILRKVNTMLGINLDGVCRETLTAPVRLHLWHVASKQPLPKTA

SEQ ID NO: 36963 - protein, 155 aa, Scytonema sp.
LQWLHRNKVKGSANWKKANMQIARLHRKIANLRKDYLHKMTTYIAKNHSEVTIEDLNVSGMMANHKLAAAVQDQSFYEFRRHLTYKCKLVNTKLVIADRWYPSSKTCSKCGTVKKELKLDDRIFHCHACNFTLDRDLNAAINLKCYAFNTESSSE

SEQ ID NO: 36964 - protein, 466 aa, Scytonema sp.
MLLNYQYRAYPDTNQKLEFNEWLRICQYWYNKQLGDRFDWWENNRNRIDACSIISCPLPQLRDKPDLFSQKKQLPIFKEDLFKVGHSGELLDFSRVPSQTLQDVSKRVDKAFSRFIQGDSNGKRSGKPRFKNAARYRTMRIEGQAITIERIEKNWLFLSISKLDGWVKVRLHRPLPNGSVLRNALLTLKADGWYITICLEDPNVPVFTPDEIVPTWDNTLGLDAVLHEDDYLATSENTKLPSLKSFRKSEKRLARVSNRKSAKKKGSKARRKLAKREAREHQRIARARKDHAFKTAHAVVRTNKKVFAHEDLNLKALSKRNKAKQDEDGKYLPNGQSAKSGLNKSWNDAAFGQFFKILEYIAGKAGARTIAVKPAYTSQLLAYRDEFIFTDCDIREYWDEFELLWVDRDINAALNLKRVGLGLFPTIKRRRGNPVVGDSTTNSTSKEVLETLKACQKPTPTSLLAV

SEQ ID NO: 36965 - protein, 411 aa, unknown
  TnpB Polypeptide
MEYSHRYPVYPTQQVAAELNRHIDIHRQAYNYTRYEYENVDADDIGSAYKHHYRLPDWKDQFPVFSEVNSKALQRTVTRFYDNLSNLSEKKENGTKVGKLKWKSPREFQSVTFSQSGFELKNTSGRHATLWLSKIGDIKLRYHRDIPDEASIKEITVKKETTGEWFVSFGLETNEAHLREKPDVDKLDTSNSVGVDLGILNYIHTSDGDSVDCLDLEDEYERLCREQRKLSRKKNGSNNYEKQRREVAKVKRHIRRKVLDYQHKITTWLVREYDAVFVEDLDVKGMLEQPHNARNKQDAAWRQFITLLDYKAELYGTRVVQVEAAGTTKECASCGVETAKPVWVREHSCPSCGFETDRDGNAAMNVLQRGFSELGLGWPEDTPVETALPTDTAGFQRVSAKRVIEAGSLGA

SEQ ID NO: 36966 - protein, 560 aa, unknown
  TnpB Polypeptide
MARSKGVIISVKVPINWSATAERTQQRLRQIVGRDTRAIRSFLGIIEQHEHALLTGRNKNRISDGELDKLTITAIKVKSGFSQRLSVPHDMKAQFPRTSSNELIECRQTAVFMYESYLELRRKNSRKASRPCAINGTRRIPRWIFNRRFKLVKRRKKHATWFLDLLDSLDSAPEGRTIHDRLLIPLKTSPFHLTQIERGEIKALQIYIDRTKKWWATFAVQIKTFRGTSRALPVAVLGIDLGIEKAVCTALVTPHRVRETRYFVQKEKALRIKYLDSRIADIQRNMATEHTDGQRHAKLALRLRKLSSNRKRVAKEYDRVLIKQLVDYIKELSEKYTVYVSIGQLKNIRRNASRGNYKGRRFRGMIHRWAFARITSTLKHQLSQLGWIVDGKDSQFRAVSESWTSITCWKCGKKGNRPKQNLFVCPTCGHKTNADRNGAINIAGRLITLTKSLHGVRGLGKWTDAVQRAVKRPRPKARGKTRSSRRKSLLPLKGQVSDLGESAAVHHAQTSLLDFGDNVKMGDKDPAVANDAETLSVPENDALKVRQEKEARTAGGMPSQ

SEQ ID NO: 36967 - protein, 427 aa, Halobacteriaceae sp.
MAKEVVPRTIVASIRNQRQVQPDLDPLGFAASKLWNIARWTCDRIWNETGLIPEDSDLKSYLKSHERYADLHSQSSQRVLEELAEAFKGWYTKRRNGGQKANPPAYRKHNNDHPRSTITFKGAGFKVDTKYGRIRLSKGRNLKEYWSDFILCDIQTRPDIDLDDVKSVQQVRAVWNDSKDEWELHLVCNIEVDAPDTPGGKTVGVDLGINNFAALAYEDGEAELYPLNCLKQDDYYFSKRIARCDESSSEQATRLNAKKSNRRTHYFHVLSKHIVQRCVEEDVGTIAIGDLGGIREDEDSEVKDWGKHGNLDLHSWAFDRFTNLLEYKANVEGISVDRVSERGTSKSCSCCVRERKSNRVERGLYVCDECDMVANADVNGAENIRQKVSPSLTRGGRDRSNGWLAQPSTYLFDSESGCFAPREQVLS

SEQ ID NO: 36968 - protein, 371 aa, unknown
  TnpB Polypeptide
VKKTLKIKLITDDFQHRALLSTMNVFNQICNDFSKQGFENNELRKNQLQRIVYHQSRLDYPNFSSQLTIRAIDVVSCSYKIKKDRHRPNGFKKTSAVVYDERILSFKDNTINIWTTEGRLKIPIIIYNKKLFKLRKGQCDLVLSNSNFYLMCTIDLPEPELVESKDVIGVDLGINKIATASDGTVYSGDQIKKKRQQFHDHRSRLQKCGTRSAIRRIKKIGNKESRFRKDVNHCISKQLVEKAKGNLSALALEELKGINNRVSVRKSQRNERLSWSFYQLRSFIEYKAKEAGVQVLIVPAPYTSQTCADCGHCEKKNRKSQSYFSCMKCGFSMNADLNASKNIRNLGLQSINLLFSDYSDCNKPKTLVVGS

SEQ ID NO: 36969 - protein, 381 aa, unknown
  TnpB Polypeptide
METMNYITKSYKFRIYPNESQRTLIEKTFGCCRFIYNHYLAKSIEDYELTGKSNSYNQNSRDYSELKKKEEFSWLKETDSSAHQRALKNLDAAYHNFFRRVKQGQKPGFPKFKKKTFAQSYTTPNFNSTDVSKIVQGSRIKICKLGWVKAKIDRIPLGHWANMTVRRTASGKYYVSLCCIEVMHEEYETTGSLVGIDLGIKDFAITSDGEKLENPKFLRKSEKRLKMLQRRLSKKQKGSKNFEKARIKLAKEHEKVANQRVDFLQKLSTDLVKNHDLIALESLRVKAMVRNHKLAKSISDASWSEFVRMLSYKCDWNRKMLVQIDTFFPSSQLCSNCGHRNTEVKDLGIREWICPECGTHHDRDINAANNILHEGLRIISA

SEQ ID NO: 36970 - protein, 381 aa, unknown
  TnpB Polypeptide
MESMNYITKSYKFRIYPNESQRILIKKTFDCCRFVYNHYLAKSIEDYQRTGKMNSRFQNDKDYTQLKKKEEFFWLKETDASAHQQMLKNLDASYQNFFRRVKQGQKPGFPKFKNKTSAQSYTTPNFNSTDISRIMRDNHIKICKLGWVQAKIDRIPQGHWVNMAIRRTVSGKYFVSLCCVDVPHEEYETTASLVGIDLGIKDFAITSNGEKFENPKFLRKSEQRLKMLQRRLSKKQKGSKNREKARIQLAKQHERISNQRTDFLQKLSTNLVKNHDLIALESLRVKAMVRNHKLAKSISDASWSQFVRMLQYKCEWNRKVLVQINTFFPSSQLCSNCGYKNSEVKDLEIREWTCPQCGAHHDRDINAANNILKEGLRIICA

SEQ ID NO: 36971 - protein, 405 aa, unknown
  TnpB Polypeptide
LPKLFTNITIHDILVATMIEGGYMQILKGYVFRMYPDEKQEELINKTIGCSRFIYNHFLDDKIKEYKIVGKSKSAYDQIKLIPSLSKEKPWLKEVDSCALRTSIFNLEDAYKRFFNGNGYPKFKTKGVHESYKTNNIKSSYKGNNYSSIKLDLKNKTIILPKLKEVKIRGYRNKKVVPGNIKSAVIKKDAGRYYVSVLIEEELIKPAFVPTSIIGLDLGIKDLIVTSFNEKIENNIKINTKRMIGLQRGISRCKPGSKNRYKMKLKIQRLYQKIRNARKHMIHDITNKLINENDIIVTENLDVKGMQKNHYVAKGLNENPISEIIRVLKYKANWNNKKIIQIDRYYPSSQICNICNYQNKEVKDLSIRKWECPVCHTHHNRDYNAAVNIMFKGLEKYMLYLKQSI

SEQ ID NO: 36972 - protein, 402 aa, Escherichia sp.
VKRLQAFKFQLRPGGQQEREMRRFAGACRFVFNRALALQNENHEAGNKYIPYGKMASWLVEWKNATETQWLKDAPSQPLQQSLKELERAYKNFFRKRAAFPRFKKRGQNDAFRYPQGVKLDQENSRIFLPKLGWMRYRNSRQVTGVVKNVTASQSCGKWYISIQTENEVSTPVHPSALMVGLDAGVAKLATLSDGTVFGPVNSFQKNQKTLARLQRQLSRKVKFSNNWQKQKRKIQRLHSCIANICRDYLHKVTTTVSKNHAMIVIEDLKVSNMSKSAAGTVSQPGRNVRAKSGLNRSILDQGWYEMRRQLEYKQLWRGGQVLAVPPAYTSQRCACCGHTAKENRLSQSKFRCQACGYTANADVNGARNILAAGHAVLACGEMVQSGRPLKQEPTEMIQATA

SEQ ID NO: 36973 - protein, 159 aa, unknown
  TnpB Polypeptide
  misc_feature (152)..(152): Xaa can be any naturally occurring amino acid
  misc_feature (154)..(154): Xaa can be any naturally occurring amino acid
  misc_feature (156)..(156): Xaa can be any naturally occurring amino acid
VHIVGSFKRNDVRTRGIIASKYGQRRTARTGHLLHNATKTIVQLAVKRREAIVLEDIRGIRCLYRKGNGQGRKYRARMNGWSFNQAQQQLEYKARWIGLSVIRLSRRETRGSSMTCPRCGERLQSDKRLERKLWCGKCRIVMDRDRVAAVIXRXSXGDG

SEQ ID NO: 36974 - protein, 382 aa, unknown
  TnpB Polypeptide
MLQPTPEQASALAETSRQFTEVFNVVCAWGWANTERNGVRLHHATYRDLKTRLPALVSDLHCQARVKATEALKSAFALRLKGQKVNAPHSDACPSRLNIHTFKLDWSASAVRLSTTDGRMTVPFSAPQFSEKWTGETPLTADLIERNGRWWLHVAVDVPAPVVMPSAEVVGVDLGIARPAVISNNCFLGKRGWRKIEDRNLRLRRALQTAGTKSAKRHLKKMRRRQARFRRDCDHVLSKQIVAAVQPGGTVVLEDLKNIRSCARQRRGGQSRRLHGWSFAQLKSFVQYKAEEVGVTVALVNPAHTSQTCSSCGHKARNNRRSQSAFVCRQCGFTLNADLNAARNIAAKYLTASGMTGADGLSIKQPDVGSHALHGSLTSRLL

SEQ ID NO: 36975 - protein, 417 aa, unknown
  TnpB Polypeptide
VIKSIKLRIYPNKTQLKIIDDTLGACNFIKNKYLEYNIKNYKKDEKCVTDFDFSKYVNKLKKEDSEYSWIKGISSKAIQEAIISKYRSFKSFFKNKNGFPKFKSRKRMSKESYYFINEQNNYYTNNKNIIKIPKLKKIRITNGDDLPDENSIMSGRIIRHYNKYYVMFIYNEDNDNRDIIKNDIKLGIDLGVKDYAIIYDGYECHHYKHFKDLNSYKKLNERLIKLQKVITKKVEYNYGKKLNEYLDKYNEEPSEIIKNELKGEAYKSYNIRKIFNKINKIRVKLINIRDNFIKQLINKLTARIKPSKINIEDLDISNMIGDNKTTHKLHGLIAESSLYKFKTHLINKCKEYVIKLRLVDQYYPSTQICSECGHKNTNIRLVDRTYVCDKCRMVMDRDENSAINIYNCKSKNYIEIA

SEQ ID NO: 36976 - protein, 491 aa, unknown
  TnpB Polypeptide
VERTMRFEINNKNEIYDYCKDVCNKAKNMYNVANYYIRNTATALTKEANNISLTSNELEVITTVREMIKENNNKSSKRKDKEKTQLKIPDAKNKYLNYYQLNAIFLCSNNYDYRVLPVHSSQKAIKTCCEMWKSYFKAKKDYIKHPHKYSGEPKIPKYRKNNLATVSFSNQSAIIVNDENNNYLQLPSIKTYDEKGNLVQQDKVKYNLGKLEINNLIKVEIKPFHNIFYLLITIKDNDIKDIYNDENFKTKNIMSIDLGIQNFATITDNVGNNPIIIKGGFLKSRNQYFNKYKAIETSRIKNIYNSSIKLDLLSLKRNRFLRDCFFKIAHKICKTAKERNVNQIVIGHNTKWKESSNIGDKNNQNFVCIPFSQFISTLHTVALKYEIKVIETEESYSSKASFVDRDYIPTYKKGDNTKYKFSGKRTKRGLYISKEGIVLNADVNGSLNILRKYCGDEICKDITDYNKLNHIIVLNYKDFYPQYKSKIKTNI

SEQ ID NO: 36977 - protein, 403 aa, unknown
  TnpB Polypeptide
VIFILYKSLIIPVNCNKSDYNYLMQCNKYSAIIWNNCVKADQENINKNGKSLTRSELQFIMKKSVPMILANSICFVILKYVTARDAMWKSRKAKHKNSGKVKLPYKIKEYFNTGWIHQNIKIYKDKGCLTLGKPVLPDEQGIKRKQKPIKCYTKKIPDNIAEIELAYQNNKLYLIIKSKYKNDNILIQSNNEASIDLGEIHSITSIDNNENAIIITGRKLREIKQLRNKHLGKLKSRRSKCVKGSRKYKKYSKAIKNITFTINNKIKNIVHKITKLYLDYCIKNNISKVYYGDLDSCTRNTKKEHRGNRKVHQKLSQWNYGQIMREITNKLTRYGIELVKVKEYYTSKKCPVCSVLNTPKGRNYECDCGYSMHRDVNGAINILNDNSEFKIHKYKNLKYLRIV

SEQ ID NO: 36978 - protein, 386 aa, unknown
  TnpB Polypeptide
MSKRTVSLKLLATPDQSVALSALASVFADACSAIVQHAVEHRCWNRVALHHLAYYPVRERFPSLGSQMVCQAVHRVADAYKTLKANKGIAKDKPVPAINFNPTSVNFDKRTYSIKGDVLSLFTLDGRAKVPFVCGRYQRNLLSSGIPKEAKLIVRKGVWYFNLVLDIPDAAPSSGSGSMGVDVGENNLAATSTGKVWGGGQLRHNRDKYLANRRRLQANGSRAAKRKLRTISGRERRHVKHVNHEVSRSIVAEAVNSGAGEVRMEDLTNIRANIKAGKRVRTRLHRWAFRQLQDFVAYKARGAGLAVTFVDPAYTSKTCSVCGTIGARVKHLFSCATCGTRLHSDVNGARNIAGFAKPIGIARGCKVTSPKFAHQVLPVAVESPVL

SEQ ID NO: 36979 - protein, 410 aa, Okeania sp.
MYNVGLYSVRQFYFAEGGYLRYESNYHYCKDNESVCVAFRRKAPLQEANYQLLQTDIAQQTLKVVDRSFKSFFNLIQKANNGNYRFEQIRLPRYLNKEGYFPLIIPRIKVRNGYFNIPMSRKFKAEYGAVKIPFPERLVGKNLKEVRIIPRYDARFFEVEFIAEEQPQPTIKSDNALAIDLGLDNLATCVSNTGSSFILDGRKLKSINQWYNKENSRLQSIKDKQGIKDLTKKQVSITVNRNNKVRDYLNKAARYLINWCRENKISTIVVGVNPGMKKNINLGKKTNQNFVQIPHHSLRLKLKTICDRYGLTYIEQEESYTSKASFLDGDQIPVYNTDRPTTYSFSGQRVKGGLYRTKQNKLINADSNGAANIGIKSNLNGFTPDRLEASLAMPLRVKFDGLSSRQIYSA

SEQ ID NO: 36980 - protein, 392 aa, Scytonema sp.
VLVLEYKAVVKPNQSKAIDEAIRTSQFVRNKVLRYWMDNRGVGKKELYQYNTQLRAEYEFVKDLNSHACQGSVENVERAIKRFFDNCKGKKPGKKGYPRFKKHSRSVEYKVSGWKLHSSKRRITFSDKKGIGELKLLGKWDIHTYPVESIKRVRIVRRADGYYVQFCVNVDSQQDAPITTSEIGIDVGLEYFYSDSNGNHEENPRYLRKAEKDIKRVQRNIYKKKKGSSGRKKACGVYARKHLKVTRQRNEHAKRLARNLCLANTKVVLEDLNVSGLVRNHKLAKSISDASWYNFRQWLEYFGVKFGRQIIAVPPHFTSQECSNCGARVQKSLSTRTHSCPHCGHVEQRDVNAAKVILSRANARGGHPQSNASGVAASTFVGRKTCKSKQQT

SEQ ID NO: 36981 - protein, 457 aa, unknown
  TnpB Polypeptide
MRKSWKKKDKNNEREYIAIRYRAYPTSEQNQKAAQIDGCCRQVKNLAKEQRDLAYRLTGKSPGYTMQTRDLKELRDDPDLAPWLSNAPSQILQQALRDRDAGYQRFFSGKARYPTWARKSSRIVFRVPQHVEIRRGSRRWAEVRIQGMGWIKIRIHRPLVGNRICSATYTKEPDGKTFISILCERHKRQPTKPLDKENTIVGVDRGVAVTVATSDGKLINRENWTPKERERLVRLERTRERKNKARVRMKGEISHKSKRQVKTELAIAALHARARRRRNDFVEQVSYDLAKNHATVVFEDLHLAAMTRSAKGTIDNPGKNVRQKSGLNRVMLDKSLGKILIRTDDKAHNHGHVVLCVPAPGTSITCPECGYEDLKNRASRSVFICRHCGHRSHADINAAINIRERGIKLALAGGTPVAAYQGTNLEPEFFGAEPRTVSDGRGSGNKKTGYITERVVA

SEQ ID NO: 36982 - protein, 277 aa, unknown
  TnpB Polypeptide
MVALVLNKWLKFIHQTKDLVVFFQQKDKWICDLIVDEPIKYQNKVLMDTTVLALDLGLEKLAHGIDNKGNQVIIRNKAKRINQYFEKQIAKVQAKLSKKTKKSIQHKKVKRKLNQLYTRKNAQIKQTLHIQSKQLANMNYNTIVIGDLNVKKLMSTEGVNEYKKGIRKSFHQANINMFLQFLGYKCQHNNTNVMMINEQWTTQLNCLTKKLFSSKIELKDREVQLSDTIIIDRDLNSAINILNRWFDSHIASMNAPLDLSSVLVKFNLYKEATKSLV

SEQ ID NO: 36983 - protein, 277 aa, unknown; identical to SEQ ID NO: 36982
  TnpB Polypeptide

SEQ ID NO: 36984 - protein, 389 aa, Moraxella sp.
MTTIRGHIIRLDPTNKQATHFGKTCGVARLAYNWALAEWQKQYQADKNYRDECQAKGITIDENRLNKPSQGKLRKQLNAIKREQFPFMLEVTKCSPQLAIMQLGDAFKRFFKGESKYPQFRKKKGVNDRFSLSNDQFKLKLKKDKPFIQIPNLGLVRMTEHLRYNGKILSAKVFTKGGQWFVSIAVELSETTKPLPKTNKSVGIDLGITSLATLSTGEKIQAPKPLKNKLKKLQRLSKQLSRKQKGSNNREKAKTKLSRLHYQISCIRKDFLHKLTTNLVKKFDVICIENLNTKGMVKNRQLSRAINDLGFYELKRQLIYKANQWGKSIKELDRFYPSSKTCSCCGVKLDELPLSVRNWTCPNCNTNHDRDINASINILNKADKILNLS

SEQ ID NO: 36985 - protein, 485 aa, unknown
  TnpB Polypeptide
MARFAVPDGWTAQAYQFALDVSPTQGRACASHAGAAKFAYNRMLARVKAVMDQRAAERTYGIADDALTPAQGWSLPALRRTWNQVKDRAAPWWPENSKEAYNTGLDSLARALGNWSESRSGGRAGGPVGFPRFKNRHSRRSVRFTTGIIRVEAGRHHVTLPRLGRIKAFESTRKLARRLENGTARILSATLSYSRGRWVVSFQTLVQRARRSPAHAGKSEHPVVGVDVGVKDLMVVAAPDGTEVDRIPAPKSLTHAQNKLRALQRKAARQLGPYDSLTKSKREPSRRWQRTQTRVAKTHSRAANVRRDVLDKATTRLAQQHQVVVVETLNASGMRSAGGARKHGLNRALADAALAEIRRMLTYKTHWYDSTLVQADRWYPSSKTCSAFGGRKPNLTLADRTYVCEHCGLVLDRDRNAAINLARLGETHLSGESSPAGSGPVAGRGATQKTNTTQVVEAAGWETSTPHQQQLGQTGTVVLQGTAAR

SEQ ID NO: 36986 - protein, 355 aa, Moorea sp.
MLTMTYEYKLQPTPEQTAIIQQTLDVCRCVWNFALRQRKDWCNSRKSPINACSIHSEYIISADEPFPNYHKQAKQLTEAKKQYPQLKMVHSQVLQQTLRTLDRAWDDMKARGFGFPRFKNKYRMRSFVFPQLGLDPIRNDGIKFPKLGWVQWRQSRPIPNGFEVKQARIVSKASGYFVMLSLQLNVDVPNPIPHGHPRGLDLGFDKFVATSDGEEIKRPRFLKTLQSQLKLLQRRLKNKQKGSNNRNKLNQKIARLHQRISDTRKDWHFKLAHHLCDGAGMIFVEDINFVSWQRGMLSKHSADAGFGQFVNILEWVCFRGDVYFAKVNKDGTSQTCPNCGAHTGKKTRLCSFPPL

SEQ ID NO: 36987 - protein, 310 aa, Enterobacter sp.
VIKKQAFKFLLEPNKGQLSDFLAFAGSCRFVYNKGLALLNENYRSGKKIIGYNQLASELVEWKNEESLSWLKEAPSQCLQQSLRDLDRAFRNFFTGKSQYPKFKKKGRHDSFRIPCQRVRVDQEKKLVSLPKVGWVKYRKSREIIGDLKNATISLNQGKWYISFNTEQTVPDPIHPSDIKSTIVLNNVGSVHLSSGVGGDNTYQAEEKKKLIRLNKILTRRKKHSKNWLKTKGKIDRVKSKAARIRLDNIHKATTAICKNHALVEVVNLMDSVSDKNDNTLSMRYEFVRQLIYKQEWLGGEVIRRESKPL

SEQ ID NO: 36988 - protein, 651 aa, unknown
  TnpB Polypeptide
MIHTIETRLKLNETQELLVDSCVVLWSRYYRKTWKLWNNQQLKETEIYHKLMNLNLFTSRQVGSLINKVKTEHAKIKELSKTQLKQQKAKLLNITKFIAAEEKNISKLLDEINNLKLKLKIKLKNDSSIKDKSILKEPKNKIHERISKLTHSIKKKNLVLFNKKIKLNRLKRSINVLEQRIKFNKFKLCFGSSQLLKQRPGSFSDQFRLTQEQNKYKNKNININLADWEKDWDLARNNIWISIGDKNKPQGNAEIQYDPHTKTLKLRLTEETANKRLREISHQVHIPYEELNNNKNIKYGIYRMQARFMEIPGVEFCPKNQVKIQQAITNQQPITAKIIKKLTPGGKGIGYYLQLSFEEVLSIHQNKMNKSNNLTMGIDLNEKGLAYCIIKADGNKLNSKDQKNNSLQYKPCGFIQWDLKDKTTAQRQWVISNKITELLTIAQDFNIQNIVIENLDFSSNMGTMNSGYKGKTNDKGFNYNKMLSSFAKKQFSDMITRKTERLGINLYLVNPAYSSVGGFSKYGIVNKLPVDMAASLWLARQAIYGEVYKEEVRNGSVVKAIKKYKEAVVFPYDNFSKQSKREIQSKKEWNTIALALGKNRNSWYKNFINYINNKTMNEGVNPKVGKTLLLPKELFNHKHMNEYDPFAINPS

SEQ ID NO: 36989 - protein, 308 aa, unknown
  TnpB Polypeptide
MKCSKEYDVIVKNSEIIKAAIYDVLKIYDSLKKGKTNDKHQEWQNKEYFTFIAPYYEGILKFEKNRLIYSNVLFSKVKIHRNINGVINKMTIIKQGDKYYLIVLVRKNDIKPSGIIKKIVGLDVGVHHFLTMSNGNIIDKDLEYKKDELRLKRLRRVMSKKIKGGSNWKKIVNKIGKLERKIRKRREDFLHKISKKLIEKYDLICTENLKVEKFIRRGKSYGKIWSDISFYKLTKMFEYKAKLYGKKYIKVSQFFPSSQLCSNCGFRNYELKNLSIRNWKCPVCLKEHDRDINAAKNIANQGLKILKV

SEQ ID NO: 36990 - protein, 320 aa, unknown
  TnpB Polypeptide
LPRTRADALDRESGRIHTLALLERRDVRRDGPDGLLLNGRPIGTSPSFLHLASLEAIRRVAERLTRKSRQPRLRRWGASLWPRACLRRRGTELHLALGRGHAPVRVLLPPDLSAILSEGAFFLEMRLVWDAPARKYWWHAVIDDGRLAPPPGQGVIGADLGDIHPVAATDGEAAAIFCAQDLRSTVRYRNQRLRQLKIKQALKQTGSGRWRRLERRKQKFLAHQKRLANDIAHKVSRAVVDWAVDRRAGTLAVGDVGQTRSRRPVNTSAEMAPARWTQGRVFDCPEYKARAAGLQVVLVNEDNTSQACPACGRANKPWGR

SEQ ID NO: 36991 - protein, 392 aa, Fischerella sp.
VRTAYQYKLRPTKQQVQEIDQWLSMLCAQYNYLLADRFNWYEQNRCPINACPLVCHIPELKDNPDYYSQKKTLPLLKKTHPHYGEIYSQVLQDVVKRVKVTFDRFLSGDSNGKRSGRPRFKPRDRYRTFTYPQMKDDCLKDSLINLPKLGQIKVILHRPIPAGFKIKTVSVTKKSDGYYVTLSLEDSTVPEIKPDINPDSITGIDMGLKEFLITSEGEAVAIPQHYRKSQKRLRVIQKRVSRRKKGSKRRQKAVKQLGKQHKKVADKRKDFHFKTARQLLSKYDVVVHEDLNVKGLVISRLAKSVHDAGWSSFLSILTTKAENAGLLVIAVNASGTSQDCSSCGVKVPKNLHERWHSCQCGCSLDRDHNAAINIKNRAVGRSVLKAQSLRAQ

SEQ ID NO: 36992 - protein, 363 aa, unknown
  TnpB Polypeptide
LFLTADGEKDKAWGNETIRWHPGEGWLEIRLPAPLAHLANRPHGRYRLSCPVGFTYRGGEVAGQAASGAVRYDISWDPARGRWYLDASWKAAPAPAVPLEELRQHSVVAVDVNHGHLAAAVVAPDGNILGAPVTIPLDLAGRPAATRDGRLRAAITTLITIAEEHAARAIVIEDLDFAGARSTGRERAGTRPSRGKRGRAFRRAVLGIPTGKLRDRLVQMAANAGLYVIVTDPAYTSRWGAQHWLAPLREHHAEATGHHAAAAVIGRRGLGHRARRRANGNRTAPEDAARPARMRTRTTPARGPAPRKPGAPRDPRQPSGAKTGRPHRITAGNQAAHDRSGPPARRDYVLPNVSRNGEPVPPA

SEQ ID NO: 36993 - protein, 404 aa, Anaerovibrio sp.
VERNVLVKKLLPADNRRFSYRDNSEIYRKSGQVIMVNKAYRYRLYPTNEQKNMFAKTFGCARFIYNKMLGDRLDYYKETGKKLNNTPAQYKAKFPWLKEVDSLALANAQLNLNKAYNNFWNNRKYFGKPRFKSRKTGHCSYSTNNQKGSVRLEGNKVKLPKIGWVKICLHRPLMENSTIKTVTISRTPSGKFYISILVKYENQIFPIIPKNFLGLDFAMHGLYVASDEDNANYPNFLRKAEKKLAKAQRRLSKRQEGSRNRDKQRIRVAILHEKIANQRRDFMHKKARYLADKYDAIGIEDISVKVMAKRKKGGKFSFGKSVADNGWNKFVNILEYKLAWQGKQLVKIDKWYPSSQLCHICGYKNNKTKDLSIREWDCPKCGSHHNRDKNAAINIREEARRVSA

SEQ ID NO: 36994 - protein, 528 aa, unknown
  TnpB Polypeptide
VYFFWEGALAKNQTYKAFAARPSHVLDLNGELLDSARVLVSLASEVRDISAYATFVVRNDVELGDELARVDVAQPAVAGRRAGVTMPDFLVSGKSGRSRKEMLVQHRVVTEFRSWQERDKAANGEGSKYVSQGWKRTVNGSAPSYGVDYVNLGAVDKCYAVIENTPFTDGEIVLKMVIQGAWYRLIFNFDNKRFTEGKVTLPVIKVEDGQPVFIFTVVTDNPVVQFSGDYVVGVDVGINNYATVVVRSVETGRIVYETTLSQRVHSLWNSVRASERQVRALRRKAATLLHDRQARMSALDEAQFHREAASRKKRELAILAAQEIANLSHTFDNAVVAVEGLGWIANTMQNGRWNRGELVKCLTHYVSQNGGWVVAVNPSNTSQQCHQCGSKVAHPTHELSVCATHGVMDRDVNAAANIAARAVPKVEKARRTRAKNRKLRPQVALRTPPARASLKYPGRDRTKSAPTPRRKNHRRTAREVILPVCPARAQTYCLEARVLADQGARGVLGTSRAALKQGNAAYKSCILI

SEQ ID NO: 36995 - protein, 396 aa, Anaerostipes sp.
  misc_feature (76)..(90): Xaa can be any naturally occurring amino acid
  misc_feature (211)..(211): Xaa can be any naturally occurring amino acid
MVIAKNNNSSSEFGQRLSELLKSSNISQRKLAQKVGITEAAISRYINSDRTPNGKIIGSIANALHVSTDYLIYGHXXXXXXXXXXXXXXXGKYEARIKVYIRNTWDWLTIKLRRSDMDYIERRCKARKHCSPILQKRGDEWFLDFPMKEYIELCDTDVADRIICAVDLGINSAATVSVMRSDGTILGRHFLKLPKEQDCLTHSINRIKKAXQHGNRKMPRLWAKVNGINHEISVKTAEFIMDVATLYNADAIVFEYLEKKGKKRGSRKQRLHLWKSQEVQRIVTDKAHRLGMHIARICAWNTSRLAYDGSGRVLRGKQAEFSSYSVCQFQNGKVYNCDLSASYNIGARYFIREILKSLPENERLLMEAKVPPCSKRSTCTWSTLISLNAELMSFVS

SEQ ID NO: 36996 - protein, 408 aa, Clostridia sp.
MITKTILLKIKEPDILKFKLLRQEHSKTLNLGIEYLSNQWPNKTSHSQLYSYLKKKTIIPSSVLNEAVRLIRSRWITFCKQRKQHIKTSIPHFKNTVAIGFNNQNWSVRKDGCKYSIGFPINGSKPYFELALSDRQKDTLDRLSTAQIKIGNGQLLERKNKWYFVATLNFSESEQTTGDNIVGVDLGLNNIAVCYDKEQGKTKFYSGKEIRFHRTRYALRRKSLGKTKKLDCIRKSRTRERRWMKDFNHKLSRRIINFALKVKAGIIHLENLENIRITAKTNHKQRQRLGNTLHNWPFNQLKQFIEYKAKEIGITVDIIDPAYTSQECPRCHNISHLNRSGVWFRCRACGYTSHADRVGAINTANRQPGDVVTALLPGIVYPSREGLPDTALNLRVARNGNGQRASTT

SEQ ID NO: 36997 - protein, 343 aa, Clostridia sp.
MNIAIKNRLFTRYKLHYLAYHNIRKKYNLSSQLVVTAMWKVIETLRSRYKNHSKTVPEFGIYSSVRLNYPRNFSIKWSEISFSIINGRVKTIVVGAYDKLRDEFLNGLWQITESHISYDKHKDIFYFNLGLKRETPQLRIIKNPIGIDLGIKRIAVTSTNNFFSNKRALYLKHKYDYLRSKLQQCGTKSAKRHLKKLAKRIRNFQKTVNHQISKQIVEHVKSIPESGIVFENLKNIRTNGSQFRKKQRKDQFRWSFRELQTFVAYKAEGTGVSVKYINPRGTSHQCSQCGSTNVTREGFEFTCHDCSYQLDADLNAARNIASRYISDAKAVCQPANRIGSYTS

SEQ ID NO: 36998 - protein, 409 aa, Chloroflexi sp.
MLIYEYKVDGTDKQYAAIDDAIRIVQFIRNKCLRLWMDTWGICKNDLQCYCAQLAKEYPFATHLNSQARQTSADRAWFAIDRFYENCTNQKAGKKGYPQFQHDNRSVEYKQSGWKIEPDGNHIRFTDGCGIGRLRLVGNKKQKIATFPTKHIKRVRLLKRADGYSVQFAVQTKRVVEHVWSGKQVGIDVGLQSFLTDSQGHSVDNPRHYRKAEKKLKRLQRLVSRKPKKSANRKKARKHLAKAHLKVQRQREDFARKQASTLVSSHDLIAYEHLQIPNMLKNHHLAKSIHDAGWSIFLSWVKYYGMLHAIPIIAVEPRYTSQDCSACGTRVKKTLSVRTHICPGCGMVLDRDQNAALNILAKALDGTVGHTGTSEPLCSENAWGKKTTPALSEMNVQQVSLWNQEPPAF

SEQ ID NO: 36999 - protein, 397 aa, unknown
  TnpB Polypeptide
MQLTERHIIHNSKQLEELCAKSKRLYNYTLYHLRQALFGKIEKFTEFELIKLMTEFNQEDFRSLPNNISQSVVKNCFQNWNSYWKALKDYKQNQQKYIGRPKLPKYKEEQFVINFTKNTIRFKNDDVTFVNKIITSLKTQIPKEQIKCVRIIPKANHHIIEVIYEKETANLNLDKSNIVSIDPGINNLLTTVNNAGALPFIINGKNLKAFNQWYNKEKSKLQSQLPQGKHWSKHLSNLTNYRNRYIEDKLHKISRFVIDWCIQNNIGTIVIGKNDGWKDGCNMGNKTNQHFVQLPHAKLIQKIQYKAELVGINVILTEESYTSKIDHLIMEPMRHRTMYNGKRVKRGLFRSKHPRITHINADANGAMGIGRKVFGNDFTRSLTNSSCAFQQYKINIL

SEQ ID NO: 37000 - protein, 486 aa, Natronococcus sp.
MMERTNTFDARPLSHRDRLLLLELLDASAACNNQINYERRQAYFHARNNGSHTTSELKDIVWNATTQEKYRQRYIQQLGSSTPQQLYRKNNEAWRSFFELLSKYRDPDDDTVTDEPSPPGYWKDDDKRRLHTCIRQDGYTVQWGERSRLEIVVGTGLKEKYGLGYHDRLRLEIRGDPRWRGKQRRLELTYNRDAESFTAHQPVERAEPRSRHRRDYSTTLAATPGEEGVVAAVDIGANNLAAVATSEGDTRLYHGRPEFDRFRECSEEIDHLQSELAYGEWSSRRIRELYQLRGDRRDHAMDALVRDLAGWLAEHDVRKLFVGDLSGVLRSHWSARVNEKTHLFWAHGRFRERLEHVLEGEYGIEVEEESEGRSSSRCPECDSEVVNRGGDLLQCLECGFEGHSDVAGAVNFLQAQVQAEKEVDALSGSMARPAVSGQNRPCEKGHRLVPCLEWNDHEWRRSDRSTKEESANRSTREGKLASGESA

SEQ ID NO: 37001 - protein, 458 aa, Natronococcus sp.
MDVHRTHRAKITNHAQVARLLDLHGWSASKLWNVGLYYLHNEWGETGEIPDEDELKSELKGHPKYNGLHSQSSQRVLEELAEAFTSWYNSDDPRDNPPGYRKENYYDAEGNRVHEEHPRSTITWKQNGFKHDPKHNRVRLSRGENHKSSKYAREYILVEYETRDDVTVENLQQVRAVYDEVRDRWELHLVCKHEMDTSEAPGEESAGVDLGINRFAAVAYSTGDADLYPGNRLKQDNYYFSKEIAKCDDSSGNEATRLHRKKSERSNQYIHAWAKHVADQCEAHDVGDVYIGNPKGIREDEETGKARNWGSHGNLDLHAWPYAGAADVLEYKLKVRGITLHRESERNTSKTCASCGRERKANRVERGLYECDECRVVAHGDVGGAENIRVGVGEQAGNQRESNSESCGAGLAARGGMNARRFGPVEDRSTGWLAQPGVYLYDLSNGFLPRDQVVDCKP

SEQ ID NO: 37002 - protein, 453 aa, Natronococcus sp.
MKRANTFEVRPLSPTGEEILRRLLDASAALWNETNYQRLIRYTDDDGYEDDDVWDADTGALEGRYKSVLGASTAQQVIRQNTHAWQNFFRAEAKYYDESNATVTEKPNPPGFRGNKDDGRELKTVIRNTSYSIDWGERSRLELLIGQDLKDEYDHTGRLRLEVCGEPNWPEYESQGRLNVQYDEVDGVYRASQPVTLSDDIQATPLADETAALDIGANNLVACTTTTGKQYLYSGRNLFRRFRETTRRIAELQSKLEDGQYSSKRIRHLYRKRTERRDHAQDALCRDLVERLYEEGVSEIYVGGLTDVLETHWSVETNAKTHNFWAFAQFVKRVTCTAEEYGVGVNVRSEAWTSRECPNCGSREETTRHRDTMTCVCGFEGHADLVASRTFLERQTGSAVRLMAQPERFEWDDHSWSESPCSRESPKELRSHQSTTRKRGNVAPEESAEPRLP

SEQ ID NO: 37003 - protein, 424 aa, Natronococcus sp.
MEEPLDSHGFAASKLWNVARWTCDRIWSETGEIPGEDALKAYLKNHERYGDLHSQSSQRVLEELAEAFAGWYAKRQNGDDRANPPGYRKHGDDHPRSTVTWKNKGFKLDTENNRVRLSKGRNHKEYPSEPDYILCEYNLPPEINLSKDTLQQVRAVYKHGEWRLQFVCKYEITVDETGEQTAGVDLGIVNFAAVSYSSGDTELYPGHALKEDEYYFLRHIAKCNDPQSNKATRLHEKRSERRSHYIHAATNGIIHTCLENDVGELFVGSVRGIRDAEDEDGNKIAVSWGSHGNLDLYSWPFDLVVTVLKYKGALNGIRVTEVDERDTSKTCCSCGHRDDSQRVERGLYVCEECFVVAQSDVGGAENIRLKGVGEFESTSESTSVDVDRSNGCLAQPVVNLFRRGEHVPSCGQGTLVQQTSIAKP

SEQ ID NO: 37004 - protein, 472 aa, Natronococcus sp.
MVDVMDDRTNSYVATFPSPEEKRIYCEFAASSDACYNEINYRRHEAYFDPNGNVYKVDLRDLREKYVPVIGSGTFDQLERKNRGQWRSYFDLDGKYERGELADEPGLPGYWGNRSDGYPLFTLIRNDLYEIEWDGDRSTIQFTIGKALKEKYDYGGNQRLRLNLKGVQRWQGKDCQLQLWYDETYDVVRVRHPVKQPTLTVHAGGQTYTPSGNATTPSQATTAAIDVGANNTFSVVTDAGDALVFNARSEFTRFQSISTHIADLQSNLPDGVYTSERIERRYDDRRNRRDHHHDAAVRHLVEWLDERGVEEVIVGDLTDVLSTHWSVTVNTKTHAFWSHGVLCKRLSDVFEEVDGMRLREESEAGSSSTCPCCGATGEAVDRDGDDIRCLDCEFDGHADVVGAVNLLVEQSQASFADVFGPMARPTARGAERTRGDDPNLGVTHLQWNDHSWTPVGSGERGGQSTNEASVNP

SEQ ID NO: 37005 - protein, 375 aa, Escherichia sp.
  misc_feature (139)..(202): Xaa can be any naturally occurring amino acid
VKRLQAFKFQLRPGGQQECEMRRFAGACRFVFNRALARQNENHEAGNKYIPYGKMASWLVEWKNATETQWLKDSPSQPLQQSLKDLERAYKNFFRKRAAFPRFKKRGQNDAFRYPQGVKLDQENSRIFLPKLGWMRYRXXXXXXXXXXXXXXXXXXXXXXXXXXXXXXXXXXXXXXXXXXXXXXXXXXXXXXXXXXXXXXXXKQKRKIQRLHSCIANIRRDYLHKVTTAVSKNHAMIVIEDLKVSNMSKSAAGTVSQPGRNVRAKSGLNRSILDQGWYEMHRQLEYKQLWRGGQVLAVPPAYTSQRCAYCGHTAKENRLSQSKFRCQVCGYTANADVNGARNILAAGHAVLACGEMVQSGRPLKQEPTEMIQATA

SEQ ID NO: 37006 - protein, 355 aa, unknown
  TnpB Polypeptide
MLRAIKIRLYPNKTQEQEFNKTLGCYRFVYNHMLARKQEAYKSDKTNLGLTELSKYFHYELLKDEQYQWLKEQNTKVMQQAIRQMLTSYDKFFKEHKGFPKFKSKRDKQSALFPIDAISKTNTFDTRKITLTKYLKNIKFRCSDLYHKRLQKYKDNIRSATLSKTKSGCYILSILVEMNNEELVKFSKTSRDVGIDLGVKDFVITSDGEVFENKRFYKNDEKKLVKLQRQLSKKCKGSSNFHKQCKRLAKVFERITNKKENYIHSVVNYLLCKYDTIYMEDLNTSGMLRNHHLAKAIQEVGFYKFKTTLQNKALQNDKKVILIGRYYPSSKTCSQCGYIHKDLKLKDRHWQCPNC

SEQ ID NO: 37007 - protein, 507 aa, unknown
  TnpB Polypeptide
MYNTKVSNYMLFKHEPDCISWNGDIPEGLQRMLVDYVAIVNHLIALGLHHKIGLETHHYPLAEGDETKKRKPIPADRELRDLGKAWFVEHYKGKYQIHYLDSAASFAMQHVKSWRSNGGDISALPYVRKPIARLNNDLYTIQELSLNGCMKIRITLAPRKWIFMDIDIKHRHFVEWTKNHIGALVILPRGLRLVFTDDEAVTLDPRKDGAAAIDINLDRVVIARSDGQIRDVNISDITVIQQNHKRKRESVQRTMSHNPKKAERLVSRHSKRQHNRINDRLHKKIHGKDNKFLSFVGNRVLGIEDLSTTTKNILKDDHGRNFNERMSKWVHGEIEDILQHHHPTKEYYTRGTSQFCPFDGSTLKTKYRGKWKHSYCLSCDTVYDRDHLEAIHGLLRLIVKHKKGEPWVLVKEVFAPEVETEFKRSSIIITFTPTDVGMGTSSLETVSLFAPNVPSAIRLQSDTDGIHQIHCPVDAVVHGNRSDAYDKKSLSKTGYDAKTRRTCTQCK

SEQ ID NO: 37008 - protein, 380 aa, Acidobacteria sp.
MKSYKFKLKPSKRIENEFLEWLDVCRELYNSALQERRDAWKLNKISVNYYSQAAQLPEIKLVREDVAGVSAQVLQSTLRRLSKTFDDFFRRVKNGKKAEFPRFKGKSFFDSFTFPQMKGAFNLTGNNLRLSKIGKVKVRLHRQIIGKIKTCTSKREVKDWFVIFAVEDEKQPLPKTGKQIGADAGIENFLTLSNGSTIANFKFYESSQKKLRIVQRSIARRKKASNRQRKAVLHLRRIHQKIKNQRNNFGHRVSAWLVRNFDFIVIEDLNLIGMTKGFLAKQIYDVAWNSFLQKLTYKAENAGRQLVKINPNGTSQTCVCGETVKKDLSVRQHQCKVCGSSVHRDINSAQVILKLGLGNSLKDRTYHPSESVSLETVCFN

SEQ ID NO: 37009 - protein, 402 aa, unknown
  TnpB Polypeptide
MKTQKTFQCKIIQPNKNKGLKLNTTMRQYRKCINFYLYQIAQNKGLKDIYYEAKDIFNLPTALIQTAGDIAKEQYKSYKNNKDNPHFPHFLGFTPMRMDKRTINFRKEDNHFGYWANISTINRKIKVPITGRNLEKLIDDFKSVQVIFKNNSFYLNVIFEEEHKILKEKDFEHFAGVDLGLNNIVTIAVQNREGKLLETKFFSGKQLAEKRRRASELKAKLQSKKAWNKLKEIKGREKNYMKDLNHKISTEIIKIVKKYPNCCVVMEKLEGIRDKIKYSKEFNRKFYKWAFAEMQKFVTYKAHNNSIAVRRVYPAYTSQVCRNCMGKTERVSQSKAICKICKKEYNADLLGAINVTRRLFGYLSNNLGISGSCPKQGNVEHEGVIAPTFGESKGLVAQLNAS

SEQ ID NO: 37010 - protein, 401 aa, Streptomyces sp.
VRRADKFVLRPTARQEAALHAMLRDHCMLYNAAPQERRDAYRHASRTTVRYGEQSAQLKEIRAVDPDQARWSFSSQQATLRRLNKAFAAFFRRVKAGQTPGYPRFKGIGHFDTVEFPKDGDGCRWDSTPHNGQTRVRLQGLGHVRVHQHRPVRGRVKTISVKREGRRWYVVLACDEVPAEPLPATGSSIGIDMGTTHFFTDSNGVHVANPRFLESMAEGLAAAQQRLSTFPQRTRCRTKKHRAAARKVSRIHAKIRRQRLDHHHKTALTLVRGHDVIGHEKLNAAGMTQTPAPKPDPRQPGVFLPNRAAAKAGLNRSILDAGWGLFLGILAQKAESAARRVIPVDARNTSCTCPECGHVAKENRVTQSKFECVKCGHVANADRVGALNVLNRAGLALCAAA

SEQ ID NO: 37011 - protein, 287 aa, unknown
  TnpB Polypeptide
VTTPHEDAGTETGRAERAQAEKTPRDARGVPTGASRRLRRWLYHTDRSERRGGQLQAEWIRKECAQEVRPATHDDVQRRRTSRCPPRPFHERRATTRPQARERYRVVRQNPAPRGLPPLDASTTESRTTDWLEALNAGDATMGESRLFERDGTWYLHVTATRDAEGGSEVSDEERTPIGVDIGEASLVTVCHRDDHGCPTAPELWADEGKTVRRLRKTYFTATRRLQTRGSERIAESFGDDLWNQIDDVFHRVTREVVDYAESVKNPVLVLEDLTYIYGSRWTTAST

SEQ ID NO: 37012 - protein, 376 aa, unknown
  TnpB Polypeptide
MRAYKFRIYPSKKQEELLNKHLWLAKKLWNELLEHCKQTYEDFGYFPTKNTSQLVVKNYGLYSQTQQEIAHRVYNAVMRVFKLRKKGVKCGFPRFKSFDRMKSLHYPQFGFSLEEKLKVTPFGEIAIKKHRNIKGKIKTLTLKREASGKWFAVFCVETPKEFPKENKGGTVGIDLGLKTFATLSNGMMINNPRHFKKYEDRLAFIQRELSKKKKGSASRKRAKIRVAKLHEKVANTRADFLHKISTELVNDYSFIASEKLASQEMAEQHYGKSINDAGWSMFTSFLAYKAEGAGCRVVFVDPKNTSKMCSRCGNIRDDLTLGDRIYTCPECGLSIDRDMNAACVILIRATGGHPGSNASGNATIVASVKEEAHTCL

SEQ ID NO: 37013 - protein, 397 aa, unknown
  TnpB Polypeptide
MRAYKFRIYPSKKQEELMNTHLWLAKNLWNEMLAFTKEIYDNYQRFPTKKTLREIVKQSGLFSQVNQELVDRLIDALHRKIEMKKKGEKGGFPRFKFFDRMKSLSYPQSGFWLDKKLKVTPFGEIAVKKHRDIKGKIKTLTLKREGSGKWFATFSVETPEEIPRENRGEAVGIDLGLKTFATLSNGIRIKNPRHLMKHEDRLTFIQRKFSKKKKGSGNRKKAKIRIARLHEKVANTRKDFLHKTSTQLVNDYSFIASEKLASKKMSEEKYGKQIRDAGWNMFADILAYKAEGAGCRVVFVDPRNTSKMCSRCGNIRDDLTLWDRVYTCPNCGLSTDRDLNAAVNILIRATPGQGGSNACKSVKERDVVLATSVKQEARTLHGWEHVTISYCTGITHC

SEQ ID NO: 37014 - protein, 379 aa, unknown
  TnpB Polypeptide
MLKTYRYRLYPTEKQQETLSEILWVACWLYNRALEYRRKRWNESRKSVTYNEQAAMWRDWRNEEPDENPLRLLNMSAGQQVLRRLDSAYRQFLKGKRGKPRFQKPSRFNSVNYKPGDGATVKANRLYVQNVGLIKVRWHRALPEGKIKNIIVFRKPSGWYVLFQVELPEKPVEKSANPPVGVDMGISHALAISDGTFFDSPKYLHASLRKLRVLQRSLSRKKKGGKNWRKTARQIARLHEHIANQRRDWWHKTTRKLVDTYGTIVLEDLSLNFMLQNGHLSRAAHDIGLGMFQNLLTYKAIGAGCEVILVNPKNTSQACSSCGSIVLKNLSVRTHVCPYCGLVLDRDVNAALNILARGLRARALTCPVGECVALEAPPL

SEQ ID NO: 37015 - protein, 379 aa, unknown; identical to SEQ ID NO: 37014
  TnpB Polypeptide

SEQ ID NO: 37016 - protein, 193 aa, Lactobacillus sp.
MSKPARLEFCKTLRLSATLFCLNHYLPLQVEISEPEKYSLTGKQVGIDVGVADLVILSNGLKYPSFNSSYFEKKAKIWQKKYSRRRHLVKLLVLQNKNKRVLCPRSLESFTNWQKAQKSKAKCQAKAANQRRDYLHKLTTHLVKQYDVIAIEDLKTKNLQKNHHLAKSMANASWRMFRQMLEMRMVWQETNCS

SEQ ID NO: 37017 - protein, 166 aa, Lactobacillus sp.
VADLAILSNGLKYPSFNSSYFEKKAKVWQRKYARRRHLAKLLVLQDRNKRVLCPRSLESFTNWQKAQKSKAKYQAKAANQRRDYLHKLTTHLIKQYDVIAIEDLKTKNLQKNHHLAKSIANASWRMFRQMLEYKCEWYGKKLIAVDPKNTSRICSKCGYNSVAKPL

SEQ ID NO: 37018 - protein, 164 aa, Lactobacillus sp.
VEISEPEKYSLTGKQVGIDVGVADLVILSNGLKYPSFNSSYFEKKAKIWQKKYSRRRHLVKLLVLQDRNKRVLCPRSLESFTNWQKAQKSKAKYQAKAANQRRDYLHKLTTHLVKQYDVIAIEDLKTKNLQKNHHLAKSIANASWRMFRQMLEMRMVWQETNCS

SEQ ID NO: 37019 - protein, 418 aa, Melaminivora sp.
MQRLQAFKYELRPDGQQERQMRRFAGSCRFVFNKALALHKERYERGQKKLGYAGLCKLLTEWRGSMETAWLADAPVHPLQQTLKDLERAYSNFFAKRAAFPRFKKKGQRDSFRYPDAKQIKLDQASSRIFLPKLGWLRLRLSRPVLGSLCNATVSLSSGKWFVSIQTEREVEPPIPQASSAVGIDVGVARFATFSDGSYLEPLASFKKHEARLRRYQRAMSRKTKFSSNWKKSKAKVQRIHTRIGNARRDYLHKATTAISQNHAMVVIEDLQVRNMSKSAKGSAEQPGNNVRAKSGLNKAILDQGWFEFRRQLEYKLAWKGGMLIAVPPHNTSRTCPECGCVSADNRRAQAVFRCVECGREGHADHIGAINILARGHRVAACGEDVSRARPARAKRAASVKQEPAEATPSSHVLVGAP

SEQ ID NO: 37020 - protein, 584 aa, Natronorubrum sp.
  misc_feature (575)..(575): Xaa can be any naturally occurring amino acid
LPDEQRERYNRLDTLTTQTANTLIEQYWTPDHLSEIHESSHQAWKYFDEQTAFDEFDIYLPSRYKRCLLQKVGETLRSHADKRDAFQTIKPLLPDHKIRRIHTRRIKERLWDSDEYLSSGYVDALINQLNAYYDVHGEYPDTYFDFQDCPEYSSGVLPYSADDGPTSGQAIKYQYDESTQQLTVELKTPDTLEAETWGDWTWTEYTVDGYDAFHELVEHGSLSAPSFQPNTSKRGTEYYELSFPVEVEHTDTPDDVETVLAIDGGLRKDATAVVVDNEGEQLSTPYFIQNTERERMRNLNRERNQLNSKLADLRRQGRDHTDYFKHIQSEYERVNNKTRHKREQLVHDVSNQILALALVYDVGAIVHEDLRSLSPPRGEGQLSWELSSWARREIIESIEYRADIAGIQVERVYAGNTSRSCPRCGSTGHTTADIAGIQVERVYAGNTSRSCPRCGSTGHTTKSPDHYYEVWHGGHFRCDNTRCGFQADRDYVGAVNVARVFFAESDSLDSGFTSSYTGDCEIELAGRSAGSCPMFGDSLIAYTGQLRVTAGGGSAFIAPAVTPNGTKNTGSNYSXLSRILDSRE

SEQ ID NO: 37021 - protein, 311 aa, Spiribacter sp.
MTDLPSTIQRSYRIRIYPNADQRAVINRWFGTARWAWNHALERRSKAYRRRGESVSGVDVSRAITALKKTTRYNWLTEVPAGVIVQKLRDQDRAFTNFFSGRSSYPRFRKRSSAQSVRVQIDQRQHRALSRWANEEVFVPGLGAMRWRNGAHPAQAPKVVTIRRDAAGRYFVTAMVVEAPAKGPAPTNNSVGIDLGLKSLAVLSTGEVLANPRHLRAKERRLRRAQRGLSRKRRGSGRWHHTRRSVARLHARVADTRANHLHQLTRRLVDENQVIAVEDLSVKGLARTRLAKSVYDAGWGEFRRQLAYKAE

SEQ ID NO: 37022 - protein, 688 aa, Amycolatopsis sp.
VGSSRAGARGRPRQRIALARAFGCARVVYNDALRTRQDAYKAEEKISDTDVQKRVVTEAKRTPERAWLSDVASVVLVQACQDARAAYRNWFDSMSGTRKGRRVGRPRFRSRKDNRQTIRLTRNGFSVKPNGKLYAAKIGDLRITWSRELPSAPSSVTLIKDAAGRYFASFVVGVDHEPLPETGTDVGIDLGLSTFAVLSNGKTIESPKFLRRAERKLRTAQQALSRKAKGSNNRAKARLRVAKAHAKVRDARTDWAHKNTTALIRDNQAVYVEDLAVSGLARTRLAKSVYDAAWATFLRMLEDKAQRYGRVVRKIDRFYPSSQICSECGRVDGPKPLSVREWSCPCGAHHDRDLNAAKNILAAGRAERLNACGETVSLSAWRGARLVEPGTHRGDLSARSPRRRRGRNPGRSRPGGRQNRAAVTAGVGGQLEFRGQVRRFPDHVPQVVEADRRYPRPCRTQIERYQRFRQLVPRSDRVDHGHGDTVGEVSMNRAHASASEHDRFRALTHQACPFERDPLDHFLAAGVHPGHQAVLRDHPGQFGVLGDMTNRHAAVAQAVVGQQPLIERPGGGRPHREDRETRTKPGRELHGRLARSDHRNLGRLPQKVQPVIRDRVDEHGVEAGFLSTHTGFEVGEIHQPAVGFGQENGGHQGRDDLGGESVPDDGARNLVVPVPFGADGVQVGDTHL

SEQ ID NO: 37023 - protein, 384 aa, unknown
  TnpB Polypeptide
VQKIRLYPSKELYKVWKQWLAQYRYYYNETISLLRCFDNVERVSAEALDKMLQRLENAPDWVKTIPGHQRQEACYEAYDAFNRAKRDGGSASFKSAFDPSQAIQFKVGNFKNGTWYCNTTKGLKFTTVGQSVPIQCEYGTELVYRRGKWFGCFPCVEEIVTTGSERVIALDPGNRTFLTGFDGENVLEIGKGDIGRIQRLCQHLDQLISRSTKAKSRQRRKMRLAANRIRERIQNLTKDLHNKATSLLVSSYKVIFLPTFDSSQMVIKKRNGKKRRINSKSVRQMLTLSHYRFERHLQQAASKKGVLVVLCNESYTSKTCGSCGHLHHKLGGAKIFKCPHCGILISRDVNGARNILLRALQATAFTVTLDSIRLSDSSDFDGKL

SEQ ID NO: 37024 - protein, 197 aa, Hydrocoleum sp.
MSEIKIPVVVDTVIEVRIVPASSCYIIEVVYEKTSVPQIHSTYVAGIDLGIDRLVAISTNKPGVKPMLVNGQPLKSVNQLYNKRKAKYQSHLQGNRKTSRKIEALSYHRNRFVENYLHNTSKLVINYLVTNNIGTVVIGKNDNWKQGANIGKKNNQNFTQIPHSKLIQQITYKCQLAGIKVMETEESYTSKTSALDL

SEQ ID NO: 37025 - protein, 397 aa, unknown
  TnpB Polypeptide
MLKSLKIRLYPNKSQENYIDDLLGSYRFVYNKCLNLKINAYNEENKSLGLKDLGYYFHNDLTKNSDFQWLNNHNTKVLKQSIINLLDSYNRFFKGNGFPKYKSRKEFKQSCRFPVESISKKNIFTDNKISLTTKLKNIKFKSSSKYIKYLNEHKNNIKSATLTKNKSGNYHLSVLIDIKPSKSLPKTDQVCGLDLGIKDFITTSEGQSYENLKIKRSNERKLRKLNQNLSRKQKGSKNKNKSRIKLAKYHEKLNNIKENYLHLIVNQIINENQVIVMEDLNVKGMMKNKNLAKSIQELSLNRFKTIMSYKSEWYERDLVFVDRFFPSSKTCSCCGYINKDLTLNDRKWICNQCGSVLDRDLNAAINIKNEGLKINKVGHRLPDLKPLECIELSNTMN

SEQ ID NO: 37026 - protein, 413 aa, unknown
  TnpB Polypeptide
MAHLYRLTPTSEQEAAMRDHCSHARYVWNLCVEQQSWWRPGRPSAPNWAEQSCQLTEARAEFNWLRAGSRVVQAQAIRDFGEAMNQFFAGTHFRPRWRKAGQDEGFRVTEVGRTYGVRRLSRHVGVVQVPKVGWVRFRWSRDVPEGVKSYRVTMDRAGRWHVSFTAPQPALDRQPTGAVVGIDRGVRTALVTSDGQHYRAPRISDRRTARYLSLQRRMARQQKGSRKREKTKRAMARITAGVTDRRRDWAEKVSTRLVMDHDVIVLENLNTRGMTRKPAPKPDPDQPGTHLRNGARAKGTLSRGILASSWGTLARRSEQKAVASGALVIYVNPKHTSQQCRVCGHIAAGNRESQAVFRCVKCGHEDHADVNAAKNVLARGLALTGVSAHAPGHGAPSPRKPAKAAAGTTREAV

SEQ ID NO: 37027 - protein, 401 aa, unknown
  TnpB Polypeptide
MKRAYRFRLYPREKQADQLEKTLTLCRSLYNAGLEHRIVAYRNGQPATYLQQANELPQIKKELSEYASVHSQALQETLKRLDRAYKAFFRRVEEKRKGGKVKAGFPRFKGQNRFDSVTYPQSGFRLLPNGHLLILRVGEVRMFMHRVPKGKIKTLNVKRDRCGCWYAVLTVDKPAVRKRATRMVGVDLGLRNLVALSTGEALPAPRFLRRSEAKLKRLQRRVSRKEKGSGKRREAVLRLAKGHRKVERQRTDLLHNLSHRLARCDVVFEKLNVSGMLKNHCLAKSIADASWGRLVKMTVYKAEDAGGRVMLVDPRYSSQECSVCHSRVKTVLADRIFKCPRCGLIICRDVNAARIVLQRGVGRGTAEFTPVENAPLLVEQAHSTKREAPPFREERMSRLAA

SEQ ID NO: 37028 - protein, 567 aa, unknown
  TnpB Polypeptide
MRFKKIKEVITKFFYPDNLNQKKEQEIYNKAFQLRLVKNYISEILFKNIQQYKEYSKVDLIKELAPTISNPYLTQKDIEYAIVEVWTTYRNKIDLIKKNIEFKVQDKIIKKYYKNNSKVHNRGELRIFEVRKKSTKLSKVMSFLGRYGYVGIAKKIDNNLKDGKYKDDAKREVFYKTVSYFLNKYGEDRLLKLAFQKRFNTFNKYNRNQHQFSSLSFTTQSRIKHTIVNKNKNRDSKIDSFISIGGYKKDDKQTKKGISKKYQLDIPTKTDQAYHLNFNDYSKVYTMQFEENQLKRVNLTIEVEKSRPVANNIILKKPNRNQNKRVKSNKDKILGVDINIKHNLFATSDENIEIDYDRNLFNGFVKFLKKLDKREKDENGKTKKLGKKKNKAYQRWQNRVSNMVIESTVELIKQAKEKGYNHLVLEDLELMSKLRSNNQEFDINNGRLIKLLNLSSIKNRIINIAHKYQINISFIHPEYTSQTCNRCGSISRKNRKTQEEFRCIECGHIDNADFNSACNIRDRLLLDVLRVKFLNINNFSEYKTKDFKKESIKYILEGYLTIIRNAN

SEQ ID NO: 37029 - protein, 210 aa, unknown
  TnpB Polypeptide
MQVYYMKNCENQAEEFDYEDAKILGIDYAMHGMAVFSEDIQKENEGYFRKSEERLAREQRKLSHCVKGSNNYYRQKKRVALCHEKIRNQRKDFLHKLSYEMAEAYDVVAVEDIDMKAMSQCMHFGKSVMDNSYGKFRVLLEYKLTWRGKKLVRVDRFFPSSKKCCKCGSVKKELKLSDRVYLCRCGNRIDRDLNAAINIREEARRMLLAG

SEQ ID NO: 37030 - protein, 358 aa, unknown
  TnpB Polypeptide
VQARVQRLQDRAPWHVLSAPRVCVRGRRKRPQEPSEEGQEREGGPDTVCQAAVHETENQAYKLDRTNGVIDLPIRAGCHVDFRLVLSEYHRGFLNDASFSLGSLTLFPDRVVIAFRKTEPRPYVPESVVSLDTNERSLDGVFVSEGEGVPVKARFPEVATIQQRHHDRRKRLQKKKSHDRRTSRRLCRREGKREHDRVECRMHQVANAVIDFAEENKAAIVLEDLKGVFKPREDKALNRRLSMWPRRKLHQFIEYKAEWRGVTVLKVDPRNSSRKCPMCGRLQDSRKGTEFRCECGWHLDRHINASLNLLQTAVSKEMVGGLRFDPGALQHDVMMILYDPEKGARSEPNGASCEGAAA

SEQ ID NO: 37031 - protein, 422 aa, Lactobacillus sp.
MSKTMAKLPYHYGVKVRVFPSTEQKRLIKHNSDACRFIYNEMNGMNRELFMLKQVKLPIAIVQTRIETLEQRLKRPSTGISNIHGWLNDPDLDSLMKANAIQNYRAAWNLFRKVHQSGVPVFHKRKTEQKYQTSCMYASKLNVANMVNGSVRLIDKRHLQLPKLGTMRFKGIPDKIFAHRYDTRIGTTTISMDATGRYYVSLQLASEQPFVEINHVKQSPIGIDLNIDNFLTDSNGLVVANPRYYRSIKGKLAKAQRKLSRRALRAKKENRPLCQAANYQKQRAVVATIQRKVANHRKNFLHLVSTTLIKNHDLVVAEELRSKNMLRNHALAMSIADVGWRTLLGMLSYKAKLYSRQFVTINPRNTTQTCHECGFVMGNAGTKKLTLNDRDWTCPKCGIHHIRDWNAANNILDKGLEKLATI

SEQ ID NO: 37032 - protein, 403 aa, unknown
  TnpB Polypeptide
MIKGYKIKIYPTKEQQEIIHKSFGCSRFIYNWCIDTIQKYYDENKKTLSNIDLQKLITKLKQNKEYSWLNDVSANMLKQTSIDCGEAFKKWFKHIKTKGITYSEKTKKKSITKGFRFTIKHSEYYPKYKTRKSELKCPTRTDRMVFKGRYVKLEKLGDVKLSKVKLNLQGKLMNARLSFDGIDYWLSFSVDLGEVTIPKKHKIEPIGIDLGLKTLFVCSNGQSFKKPHTKKIDKKIKKFQRKVSHIYQKMIDYCMETRTKFSDLVKSKNLLKYERQLRKYQIKKTNILNSNIHKITSELMKLNPERITIEDLNVKGMMKNHKLANSVMNAKFYEIRRQLIYKCKNNDIKLVIADRWFPSSKTCSYCGSIKKDLKLKDRTYYCKECGAVIDRDLNASINLSRIA

SEQ ID NO: 37033 - protein, 396 aa, unknown
  TnpB Polypeptide
MIISKKVRLLPTLEQETKMRQSAGTARFIYNWTLHKEMDNYKNGGKFIPDGKLRKEITQLKKGPLSWLKEVSNNVAKQAVKDCCNAYKKFFAMPKRFSDKVIKKAKRQNRELTFYDLEGHPKLKSKKRNKPSFYNDPIKLKVKNKTVLLEKIGWVKISESLPSVKYSNPRVTFDGKYWYISVGIEIEPSKVELTDKSLGIDLGIKDLAICSDGKVFKNINKTFRIKKLKKRLKRLHKQISRKYEKNKIEKGGSCQFIKTKNIEKLENKMRLLYRKLTNIRDNYIHQITTSIVKTKPYRIVIENLDIKSMMKNKYKAPLIQEQKWHKFRQYIAYKAEKNGIEFVLAERFFPSSKTCSCCGSYKSNLKETDRTYICDQCGLIIDRDSNASLNLANYNI

SEQ ID NO: 37034 - protein, 367 aa, Clostridiales sp.
MRSCAMTFRTYSYRIYPGKGERQKIESLLDRADDAFDRLCKDAYPCASCSGDAELVREYIKDYDFNNAVSHAAGEGIKRSAEKVLLKLADGKIDAIYPRNRKRTRRSVDVPLPSVNGKFVYISGIGKVEIVRHRPLPTGARIFRTTLKADACGAEYYLDYGIYFEAQKEEAAAPDPKKAIGLDYAQNGLYVDSEGRNGEYPGFAALGKEKEAEILEKLSRCHYGSGRWKKYTQRLKKLEKHIRNQREDWQYKRAKLLSESYDLICHEHLNFEEMKKENPLLSPKIADNKWNDFRKKLEDKMQIRGKYLIEAPKYYPSSQICSACGYRAGKQPLDVRTFVCPSCGIEIDRDVNAAINLKNIGVELIAA

SEQ ID NO: 37035 - protein, 401 aa, Lactobacillus sp.
MPIKTHKIRLYPNAEMVTVITELMDYNRFCWDKGLEAWNTMYTESLLMKNKKLRPSGRKVRNELVKSKADWQYQMSARVLQTAVHRLRQAWKNFFNPKMPDARKPKFHSKRDPKQSFTTDRGTVNGKFLTLDQPHESTHRFTKIKMAETLRFTGKIKTVTITKRGNKFYASITVSVEDLPRPVFTNSWDIVAVDVNVGHFSWNGGEVNTFTPRMAALHQRIKVYQKRLNRKRRDNPHHFRSKNYQRLKAKLNRTYEQVYALQDDLIHQFSHQIIRDYAAPCLEDLNVRAMMMDKKKVKSLQRSLFRRFRTAVEYKAAWHHRRLVLADRFYPSTQRCSNCGYIKKEDSYGGKMTLKGDSICHQHDVYRCYECGLVINRDENAVQNLIAFAAGLPPEWATIQR

SEQ ID NO: 37036 - protein, 403 aa, Lactobacillus sp.
VELTKTVKIQIKLAAAADGGLLRQAMEQYRLACDDVSRYVFDHGFVLNTTKLQIVLYRDLRTKFGLKAQMAQSVLRTVTARYKAVRTQLKQKPYRYQDAAGKWQKQAKDLTWLWYPISFRRPQLDLVRRRDWAIRKDGSFSLNTLDRRITVWPVLNHWRDYFDGTWKLGTAKVLTSGGKWYLHIGATKEVPDYTQDQTVHVVGVDRGLRFLATAFDETGRTIYRSGTRALNKRRRYKHLRAKLQAKGTKSAKRVLKRIRQRENRWMSNENHRAAKALADYYGPKTLFVLEDLTDVRFATEKVAKDRRYEQVSWPFYQLEQFLIYKAAAQGSLVLKVPADYTSQRCPQCGAINKQQRDHDHHEYRCACGFQANDDQSAAMNIQQLGNQWLTGTAKPRYTRKRTG

SEQ ID NO: 37037 - protein, 240 aa, Lactobacillus sp.
VVVATDEPAPTRPVSYADTKLGLGIDLGIKDMAILNTGKKFINISKTSYYYHVEKMKKRWQARLARRKIAAEKSFAKNHPHQKAGYLTSRGIEEARYYLARWSAKLAKINKETVRQAIAQIVKLKPPHITVEKLNIKGMKANPKLAPSIQKLGLSYFKTWLTWQCQKHGIELREVSTWYPSTKLCSTCGTYNRAQFHGTMADLAVRQFNCPHCGLSIDRDVNAAINLQQATDYTVLTATE

SEQ ID NO: 37038 - protein, 394 aa, Lactobacillus sp.
MATALKGFKLKLYPTSDQQILFRCTFGCTRFVWNKMFAMQIARRKNNPKQWLVSRFGMDSLLPLLKKEYPWLKDIDATALQMATDQLADAYTRFFKGQNGFPHFRKRTYAQSYTSKCINNNIQVVDDHHLKLPKAGLVYFKAGRLPAGKIKRVTIRQKSAGHYEATVLCECEIADLPKTGKSVGGDLGLKALLILSDGQKEPNLRYDKQLAKKKHQWEKKKARRLLGAQAEIARDKHEHPNNVRTLEDFKNYQEARTMVAKYAAKEAYQRQDQLQKYTTWLVQNYDLIVLEELNVKGLLKNHKLARAISNASWGRLVAILAYKCRWYGKELILVPPAYTSQECSSCHERNQRLGLSQSQWLGVREWDCPSCGTHHDRDINAAINILNKGIKTAA

SEQ ID NO: 37039 - protein, 412 aa, unknown
  TnpB Polypeptide
LILVQQHIIKPNNEYFNECLNLTHLSKNLYNQALYRIRQHYFETQSYKNVFELINELVKEKQVDYYALPTKVSKMCLNKLNKNFISFFKANQDYKVNPSKYKAKPRIPNYLDKNGSFVVEYYKEAISKKQFKLGILNPSQTNIHLTFKNLTWNNLVGVRIIPKNNYFIIEVLYEKTELHLKQDNHRYMSIDLGVNNLATITDNINSKPIIINGKPIKSINQYYNKEKARLTSELELKQKVKTSKQLNKLSLKRNNKINDYLHKSSSYIVNQLVSKSINTLIIGRNKDWKQDINIGSKNNQNFVSIPFYKFIQMISYKCKLHGINIILNEESYTSKCSFIDNEKLCKHDVYLGKRVKRGLFKSNSGLTINADVNGSFNILRKVICSENKYLKVVHNFKWIEGLSVNPLKVNLL

SEQ ID NO: 37040 - protein, 383 aa, Candidate divison MSBL1 archaeon
MKSTVTAKVKIRKDERLVKTMRVYSKALQFCIDRAWNNLYTRKSIHDECYYKIREKFGLQAQLAVCVISQTHEMLKNSPKNKPKVKKFATIRYNFSRSATIKGEWEKLSLASTDGRVKVELNIPGCYEEYLDRNVRESNLILKNDMLFFCFTFTKEVDINPFSFCDGGKIRGVDLGINKIAVTSDENFYGTNAKEKRIKWEELRAELQRKGTHASHKRIKSMGKRFNRYMTWMNHNISKKIIDKLDEGDVLVMEDLTNIRKTAKYNEWVHKWAFRQLQNFLEYKAVEKGIRVVYVNPENTSKKCSKCGSLDTERHGGFFECNNCGFSLDADLNASRNIAHSYTETIGRAGSRRSAYGSRVYEVETFNTGRIETETTRKLHASF

SEQ ID NO: 37041 - protein, 175 aa, unknown
  TnpB Polypeptide
LSRVHLCLEKFAWGETPLATFRKISRQRKNFPIKLARCVITSNDVVVYEDLRVKNMVKNYCLAKSINDAGWFQFRVWLEYLGKVFGRITIAVNPAYTSQACSDCGAIVKKSLSTRTHVCQCGCTLDRDLNAALNILNSGLRTAGHVGTSALVAGKASGELTSTQTGEILLEQVDS

SEQ ID NO: 37042 - protein, 484 aa, unknown
  TnpB Polypeptide
VTRRERPVTDTAPPVIMTAEGSPAVPPVTGRGAAAHPPAGLAAAAGAVMTLAGARGILQAYRFAVDYSPVVERMFRSHAGASRFAWNWGLAKCIERYQAEGKWYSAIDLHKLWNAEKKADPALAWWSENSKCAYQEAFRDLDRALRDFIKSRKGERKGKRLGFPKFKKRGKCRDSFRLAEKSLRCDQNTVTLPKIGTVRTHESTEKLASKLEDGSARILSATVSRTAQRWFVSFKVEVKRGIPERHARPGSAVGIDLGVKALLAGVDDTGRVLAIAGPKPLRASLRRLRRASRAHSRKQPGSANRRKSAARLARIHARVANVRADALHKATSMLAARYETVVIEDLNVAGMRQNRRLARAVGDQGFGEARRMLVYKTTWNGGTLVTADRWFPSSKTCSECGAVKAKLTLKERTFRCESCGHQEDRDVNAARNLLKLAGSGPERINACGGTVRPRPARHDPVKQEPGTSPEGQTGTAIPQGTAAA

SEQ ID NO: 37043 - protein, 420 aa, unknown
  TnpB Polypeptide
MFLWYNINIKYMKGEAMLKRKFTVVSQLHETNNQDIIQYFEEARFTYAKAVRQSFHIIKNTSTFNKSHYNTSLQAYKIESLEQLIERLQQQKITNTQKLQQKKDVSLIKHRNLKRKLVAKKAKLNRLTQRYQNLLYQIDNNRYKLCFGSKKLLQSDYQAFVEQRDSQIAFVGSKSETSSNQMLQLQFNSKKNQFQIKLRKDFGGFKSSDDKYAYGQVYFNHHKNIIKHILRDKNSPLSFKIIKKHNRYYLHCTFEIQVELSEFKTRSSYGTIGLDFNKGFVTLTETNQYGHMVQTQLLPYRFKSGHKTTTDLQQIAKQVITLALETGKDICIENLDFAKTKAKAQQGQDKKYNEMLHSLAYKQFVDNIEQCGYRHLVYTKRVNPAWTSWLAKQNYCPTMKLNIHIGASYVIARRGQGYTE

SEQ ID NO: 37044 - protein, 412 aa, unknown
  TnpB Polypeptide
MKEPETGKKEKTGKSGYSITTWRLHLWCRHPEWLRTTQEFYNRIAEFYYNLLLDHTDLWEMGSQQTLRELEIMSIPGRGGRIPSDPLPWQKVPLYFRRAAANEGIASAKSYISRFAQDEKIGRAEKLNAAVTYYKGMYQEFSAKEITLRVWTGDTWTWMHCRLSGRDFPENARLMSPSVVFEYKYDMLHVPVRQNNENTATVRQRMQAGCRILCIQFTNSDAFAAGVVLDGTGQEIAVKFWKGGKEYSHHCRKLLEKIQKSQEATGGRQTGRVDQKYWMHLKHLSEHYAHEISSQIIGFCLEKQVSLIVLPKYKKEYTDYVMIGSGNWSTMHLSSGIRSNLPYKAWKNGILVIETYAKGISETCSVCGAPVKTANRKTDEYTCENGHRGSRSLNSARNLSHKCILQFGKQVV

SEQ ID NO: 37045 - protein, 444 aa, unknown
  TnpB Polypeptide
MISISHKIELKPNNKQKTYFRKAFGCARLAYNWGLAEWQRKYKKGEKVSIYDLRKTFNSIKKEQFPFVAEVTKFAVERPFFHLKAAFTKFFSDLKKGIVSYPQFKKKRDNFGSFYIGGDQVVLSDKNRNSKAFEKIAHNISCKKQYIKVPNLGWVKMTERVRYTGKINNVVISQNGDKFYVSFSMEITEKEYKRTHLYASKIKSHSVGIDFGIKSTLVLSDGIEVLNPKPLRRSQNRIKRLSRQLCKRSYAKTKQERQQGVGKSNNYKKLALKLCNVHRRVANIRYDFIQKVTTILTTNYAHVAIENLNTKGMMRNHRLAQAISDVSFYEIKRQIEYKSAYNEVLVTKADRFYPSSKTCSVCGNIKSELKLSDRIYHCSKCGAVMDRDYNASLNLLSLVTNKSVGMGYPELTPVDLTALFLCFERNGVATSKVETGIQHKSLIL

SEQ ID NO: 37046 - protein, 378 aa, unknown
  TnpB Polypeptide
MRFPFWYPSLMNKTLIRTISIKLDIDGNEAALQETQQQFNAAASWIAALCWEEGITNTNTAHHRVYGETRSRFGLGAQLAVCARAKAVESIKATRSKKGETCPQFGRRGSIRYDARTYRLLSLDRVSLNTLQGRITCRMILGKRQHEMLIDPTWMIGGADLVWKRGTYYLNVTQSKDAPELTETSGTLGVDLGIVQLATDSTGETFSGEQVKAVRKRYHQRRQALQKGGTHSAKRRLKHMSGREKRFQKDTNHRIAKALVYKAVVSRKALALEDLTGIRERTTVQRKNRYERHSWAFSQLRTFISYKAAWTGVEVKLIDPRNTSRTCSQCGHCEKANRQSQASFQCKQCGFCLNTDVNAAINISRADVKRPMASVSNG

SEQ ID NO: 37047 - protein, 356 aa, unknown
  TnpB Polypeptide
MLKTIKASVINLTKRKKELLDWDYNNYQWWMIFGIDKGLLSYFKTTKRFRQKDIKYHNYSLPLWSISIKDWFRKRDTKITKDWIKIPNSKLKGQGLWLPLKYHQPIPENSIIKDSYLVLKNNQYCIHFSVEIKEPKLIKPKNIIGIDLGLKNPITLTSLNNKKTIFLGKEINQVRGKSFYIRRTLSKSKKLNTIKKISDKEKRRINNLLHELSKWIVNQAYLTKSAIVIGKLKNLPKIYNRKFNRKLSNFPYYKLTNYIEYKAKQKGVPLVLVNEAYTSKTCSVCGTIGQRTKNWFKCNECKYEDNADRNASINIGKRGLSYMLGSGVVASALKSLDKYEGISVKTKVNSKLVALI

SEQ ID NO: 37048 - protein, 396 aa, Cyanobacteria sp.
MTQRAYQYRFYPTPEQEQLLRQTLGCVRWVYNKALHSITEAWYSRQERIDYKQTSEMLTDWKKQEDLQFLNDVSSVPLQQGLRNLQKAFTNFWAGRAKYPNFKKKRSGGTAEFTRSAFKWKDGQLWLAKCSQPLPIRWSRTIPAGCQPSTVTVRLGASGRWFVSLLVDDHTVKPLPQVDKVIGIDAGITSLMATSDGEKIANPKHFKRLRYKLRKAQKALDRKVKGSSNREKARHKVARIHAAIADARTDFLHKLTTRLVRENQTIAIEDLAVKNMMKNRQLAQAIADASWSELIRQLEYKCQWYSRTLVKIDRWFPSSKRCGNCGYIVDKLPLDVREWDCPECGTHHDRDINAAQNILAAGLAVLVCGANVRPDRHESEGQLRKTRKGRKQKPKS

SEQ ID NO: 37049 - protein, 371 aa, unknown
  TnpB Polypeptide
MKRVIQIQLQPTAEQIGLLEQAMRRFNEACNWLAGKAFERQLANRYALHKLYYYDLREQFGLPAQMACLVCAQVAGNYKRDKSKQVSFRPLASVPYDRHLLRFWDLTTVSLATLTGRVKMPMVMGDYQADQFGNVKLFAELVRRKDGKWFFMATVETDDLLPLERDDFLGVDLGVENLATDSDGELHSGEDVEEVRVKCQTLKQSLQSAADLAANHRRRKRIRKKLKRIADRESRFRRNTNHVLSKRLVAKAKDTARSIALEDLKGIRERIRFRKPQRNRMGSWGFDQLRQFIAYKAEAAGVLLKIVDPAYTSQMCSSCGHVEAANRFWQARFCCKQCGHQAHADYNAARNIRAKALVNVPIVSAYSVAAG

SEQ ID NO: 37050 - protein, 377 aa, unknown
  TnpB Polypeptide
MIKGYKIRIYPNKEQKILIEKHIGACRFIWNYMLNLQNEKYKVGNNYISRFDMIRKLTPLKKQEEYQWLNEVSMSSLQNICTDLDKDFKGFFKKEHKYPNFKSKKKSKKVYPVCIDRFYFKDGKHIQVQKLGIVKCKTDFKIPIGKYKFYDVRLSKELNKYFISFGLECENQTRQLNDYSMGIDLGVKDLAVVSYRDNSLVFHNINKSSKIKKLNRELKHLQKSISRKYEVNKQGNKYIKTNNIIKAEEKLRKINKKISDIRNNYIHQTTHKLIELLPKRVVMEKLNVLGLMKNKHLAKAIGEQAFNKFIEYMKYKCKWNGIEFIQADRFYPSSKKCSCCGNIKKDLKLSDRVYVCKCGLNIDRDLNAAINLKNYVA

SEQ ID NO: 37051 - protein, 200 aa, unknown
  TnpB Polypeptide
VRTARQKIDVGASETLPREIHFYHTLTDAIITECVERGVGTLAVSWPKDVRESDWGKTGNKKLHSWAFDRLYQYLEYKGEMRGVEVLKENEWNTSKTCSRCGDDTKSNRVERGLYVCSSCELVGQRGLQRAENMRQKITPSPHGEDRSNGCVAQPSTYLFDCESGCFAPREQVVVDQQISHLRYGKPRRLRRGGCHFRRW

SEQ ID NO: 37052 - protein, 559 aa, unknown
  TnpB Polypeptide
MITLQCQLEFQNKQDEEIVLDLMRRFSSAMRYAYQRLLEGEKRKDLKKYLSKLFDINTRYSDDAIFLTQSTIASCKERGQNPKKLVFGLRKLFEQLKKNHLTGKRRKQLKTKWKESRQGNLYSRGDKSKQGNLNLRFQWINDELYLRINTGNRQYIYAKVIRSVKRDKDKWIEFMFMLENAHQTGEWFPYSIRLKTKNGKIYAFISIDEKLPPITIKRDNGIIGIDVNAYPFHLALSFTSKDGNLEKYQSINLNELLEANSEKRQYLEWQIAHKIIEIAKKENKAIAIENLEKLPKGKRGDGFTKLRRKLQKWSYKRLLDKIEILAKRNGIEIRKVNPAYTSVIGKLKYSPQYNIDKDIAGAYVIARRGLGYKEKLPKNYKELLNDTDFLSYTIAKIEDNIKKLKQKLKEEKNEYKINKIKSILAKLRKNLKTLQKHVSLLTSHISRLESGKSEPASQQPVNQWKEQVRGLPTGRHKSWQVLSIALAFCCLEKSYRDFSPLKRVIISKDWIAVANRLVPACLAAGTMALPKYRLLGTEVSEMAEYKYPNPNCVSFVQFG

SEQ ID NO: 37053 - protein, 497 aa, Meiothermus sp.
VGNHCFGNHARPRTSVHFGRPRHGPVPSNAPPQGVHLSRSPQGVPPPDTPSRAVDKELFGVHSGYVEQQDRRAVHRGPKNEGLMTHRKVYRFRMEPTQVQGEALERMAGARRWVWNWGLARRKEVYEATKQSLPMAQLGAELTALKKQPETAWLKAVDSQLLQQALKDLDRAYQAFFGKRARFPRFKSRKKDEPRFRIPQRVKVEDSRVYVPKVGWVRIRQNQPIDCTIKGATFKRDAEGHWYVTLTAEFEMPDVALPPANPEKVVGIDLGLKDFAVLSDGTRIAPPKFYRAGECRLKKASKALSRKQKGSKNCEKARRRLSRVHAKVRNQRQDWLHKLTTNLVTRYDGLCIEDLSLKGMARTKLSRSVMDAALGEFRRQVEYKTVWHRKHLAVIDRYFPSSRLCRECGSINANLTLSDKVWTCGCGAVHDRDLNAARNIRAEGIRTIPLVYGQSPSREGIVPVVVGHTNTQNACGEPVRPRQQLRHGSVKQESHVL

SEQ ID NO: 37054 - protein, 669 aa, Streptomyces sp.
MQAAQPQRKFRGKNKAPKWTKPDDGTVSVMVLPLAVTDPGDLARVEKLFGAMGSLKRAVQRDARSKVDAYWAAYHERDDQGAKPVRQRLGLSREALERCAYKHLEDSGYLGHHASKALAMHMADEVWNGVQRHLFPDAAGKRFGRPKTGRLHDFTRIPGRARSHTTVSKWETFRLVGSLHGHVVAYTDGGRHDLRQPRRMPKPALPDAKVPTGKTSASGKALMRKATWWDHTGPLAVVFAGGPDSGRGDLVLPVRIPQGSGQWARVEHFLADPGRWHKVDLVRRRKASAPGGWVYEAHVMILGPGYSSQAVQEMRQQAAALDRVGGVDGNVSNLSVVSFPASLDPADSAPRSSEIVLTDEEKTRLEKGAKKRRGRARALERSRRATNTAQYGLSKKQQARADRRNAKGLPEKQVTTPGGARDARTDGVPKQAFRRDRLSVNYRETRARQAEAAASAAEYRRHRARTVARQIIAAHGPVLVVEDCDIRTWYRLWGKRLSQTTPGMLIAALDRECTAAGGRLVRASTWSTALSQHCLCGERVNKSLRDREHQCVACGLKGKRDLVSAALAAFVRLTDVDDPKTAYLDTAMSRHAQIVYAEALEEALAESTTPCQNTPRGAGRVAVPRQRGTSAHRTAGTRDRATPDEPRPVRDHAGAPGPRTACSPQLTLW

SEQ ID NO: 37055 - protein, 542 aa, unknown
  TnpB Polypeptide
MGTKSREERTPPKPKTPTFQLELPLVAEAGQAARLGAHLEVGRQFYNAVLSAGQRRLRRMRADPAWQAARAIPRTHKQERKAAFSALRERYGFSEYAFHELARKLRVNWLAEHLDAVLAQTLASRAYRALNRVCLGKAKRVRFKSKSRGLDSIENKRNDTGMRFVLQTQNQGRPHGLLLWHNDQLAALIDWDDPVVAHGLAHEIKYARLVRRRASSPRAQGADREGERYFVQLVLKGLPHHKPKHTVGTDTIGLDLGPASIAIVPREAEARLEPLCAELRPDARSIRRLQRQMERQRRAANPEHYDERGRPRKRGKGAPRWKQSHRYQAIRRRKAARERKLAAHRKSLHGQLAHQIVRVGHTIITEKISYKGWQKRYGRSVGRCAPGMLIDHLKRTVASTGGTLIEVPTRSTRLSQFCHGCGEVVPKPLWQRWHQCPCGIGPVQRDLYSAFLAAYLDPAADPIPSCARYVVPWEGAEARLRAAHERATQRANEGQVMPRSMGIPRAGARLPESRSEPTPKPVVLAPSRPAGNVEGTLRTLRA

SEQ ID NO: 37056 - protein, 355 aa, Cyanobacteria sp.
MFGCQQVLLNPDTELKAILEFICFESNKLMNQGIYYARQLYFKSKKWVQKHTLSYEHQSSKHYQVLYSQAVQQSLISVYESFKSYRGLLKLWNTGQLEHKPKMPNYRTKGGMAVVSYPKQALKLENGVIRVPLGTLCKTWFGIDHFAVEMPSNLKFEEIKELRVVPRNGCFYAEFANRVQPIQIDVNPTNVLGIDPGLMNWLTCVSNTGTSFIVDGLHLKSLNQWYNRQISVLKAGKPQRFWSNQLAQITETRNRQMRDAVNKAARLVMNHCIENRIGRVVFGWNRGQKNESNMGAKTNQKFVQIPTARLKDRIAQLCEQHGIEFVETEESYTSKASFVDSQHYKLGINEALRKP

SEQ ID NO: 37057 - protein, 363 aa, unknown
  TnpB Polypeptide
MLKIYRYRLLPGGKQIHIMEQWLEECRWLFNHFLAERKNAWQQEQTNLNYHAQATSLRTIKNERPTLSSVHSQVLQNVAMRIDLAFKAFLRRIKAGEKPGYPRFRGKGRYDSFTFPQSGFRLEGDKLNLSKIGELQVILHRPLEDQVRTCTIKRSSTGKWYVTFSCHWEPVPLPKNEWAVGVGVGLHSFATLSTGEQIENPKFVRQEEKALTKAQRKLSKAEKGIPERKKCHKIIARICERITNRRHNFVHQLSRKIVNSFGVIAVEDLNVNRMVHNHCLAKSIMDTAWSGFFSVLAYKAEWAGRKFMIVNPVYTSQDCSKCGHRQQIPLAQRIFQCPCCGLEINRDYNASLNILRLGLQSLG

SEQ ID NO: 37058 - protein, 364 aa, unknown
  TnpB Polypeptide
MIKLDPSPEQHKVLCETMKRFNEACNHIAETVFAMHSANKVEIHKTVYYPVRERFGLSAQLTVRAISKVCEAYKRDKSIKPEFRLDGAIVYDQRILSWKGLEKVSLITLQGRQAIPVRFGEYQKARMDRVRGQADLILVKGVFYLCVVVEAPVATPYDPVGVLGIDLGIKNLAVDSDGEIHSCEKIQNVRAKSDALKAKLQSVGTKSAKRHLKKLSGRMARFARDTNHCISKTLVTKAKDTFSPISLEDLEGIRERTTVKRSQRRDHHSWSFDQLREFVTYKAAIAGVPLVFIDPAYTSKECPICHCVSKSNRPTRDDFRCICCGFSGLADNVAALNIRARVAVNLPIVARFFVQPQALPFGAE

SEQ ID NO: 37059 - protein, 383 aa, unknown
  TnpB Polypeptide
MISYKFRLYPNKEQQKRLELSLDICRITYNELLSELNSGFTKLELSNYPLDLKACYPEMKNVYSKALQVENDNLFRNLKGLSESKKNGNKVGILRFKGKGWKKTFTLNQSGFRLDEEQNKLKLSKIGEIKIKNHRLIKGKIKQIIIKKEINKWFAILQTDETIKRKHGENEIGLDFGLIDFTTDNNGNKVKLPKEWSLQENKIKCHHQKLSRTKKGSNNRKKTIKLLQKSYNKLNNQKNDFFHKLSTKLVTENKIIYLEDLSVKDLMMKSYNAKNFQKSAWSRFVNNYLINKAESTDCQIIFCDRFAPTSQECSSCGRIQKIKLSERIYNCSCGLSLDRDVNAAKNIVNYGRLGISLNGEETNTQSNEQISSMKLEAYPFKDR

SEQ ID NO: 37060 - protein, 402 aa, Escherichia sp.
MKRLQAFKFQLRPNGQQERDMRRFAGACRFVFNRALALQNENHEAGNKYVSYTKMASWLIEWKSHPDTQWLKDTPSQPLQQSLKDLERGYKNFFQKRAAFPRFKKRGQNDAFRYPQGVKLDQTNNCIALPKLGWIRYRNSREVIGEVKNVTVIQSCGKWYVSIQTEYEVPEQVHKAASMVGLDAGVTKLATLSDGTVYQPVNSFKANQRKLAMLQRQLSRKVKFSASWQKQKKKIQRLHSHIANIRRDYLHKVTSEISKNHAMIVIEDLKVCNISKSAKGTAERPGRNIRAKSGLNRSILDQGWYEMRRQLEYKQLWRGGQVLAIPPAYTSQRCVCCGHTAKENRQTQSKFVCQVCGYTENADINGARNILAAGHAVLACGGMVQSGRPLKQEPTEASQAPV

SEQ ID NO: 37061 - protein, 383 aa, unknown
  TnpB Polypeptide
MKRAYKYKIKPTMKQQHQLQQVFGCTRFIYNWGLDIKSKSWSIEHKTVSYFELAKKLTELKKNEKYKWLKQIPAECLQQSLRNLDNAYTQFFKGIKSFPRFKTKKNSKNCAKYTQAIYFDFDNWKVKVPKCGWVKLCENKTFDLSSSKIGTLTVSRDKCGEYWCTIVVDDNAPQKSKTKISEETSVGIDLGIKDYAILSDGTKYSNPKYYENNRLKLKVLQQKFARTKKGSNRHEVMRLKVARQYKKITNSKIDFLHKLSTDLIRRYNTICLENLNVEGMMKNHNLAMAIQSASWSEFVSQLKYKAEWEGKNIVFIGRFEPSSKTCNKCGYVKHDLKLSDREWVCPICGKHHDRDINAAINIKMFALNPQALVAIEDKANEVK

SEQ ID NO: 37062 - protein, 375 aa, unknown
  TnpB Polypeptide
MIKAYKYKIIPNKQQEELLAKFFGCCRYIYNWGLNRKTSAYKENGTKVTYVELAKELTALKQNEEFKWLNDCSNEALQQSLRSLDNAFTAFFRKSGKYPKFKSKRRSKDSVKFINSVHFDFVNWKVKLPKLGWIGLCKNKTFDQSICKQGTCTVSRDNCGTYWCVISVDDLQPKPTKTKLEKDNAVGIDLGIKYYAILSDGAKFANPKYLEKMKRKLTRLQRDFARAKKDSKNHEKMRVKVAKCYRRISNQRNDFLHKLSTHLVKHYDTICLENLNVKGMEQNHRLARAIKGAAWSEFVRQLEYKSEWYGKNVLFIGRFEPSSKLCHKCGYINRDLKLSDREWICPMCGEHHDRDINAAINIKEIAFDKQNLVGQ

SEQ ID NO: 37063 - protein, 286 aa, unknown
  TnpB Polypeptide
MFLYARRGGSIEALHRRSLRQSCTVSEQPAPSFSHPLHDPDPENWIGVDLNTTGHIAVIAHPPTGRVMKLGKNAGRIHAKYEKLRENFRKHKKARKLEKIGDRERLILQDLVTRISRQVVYCAQSLHAGIKLERIYGPDPEKNPPDESVPEYAITSRAFRKLQSLIETRAGKAGVPVVYVDPAFTSKKCSRCGSMGIRHRKKFACPSCGYAEHADVNAAFNIADSPFVIDEERIARARRHKAGQKVRQQLRARQNARFPDFVTYEGIHARKAGESIFCTLDAGTGR

SEQ ID NO: 37064 - protein, 377 aa, unknown
  TnpB Polypeptide
MDIKRAYRFRFHPTPEQERILARTFGCVRFAYNHMLRLRTDAWMQEQRRIGYHETSSALTALKKQEEYAWLNEVSSVPVQQALRHLNTAFLNFFAKRAKYPSFKSKHDRQSAEYTTSAFKWDGKSLKLAKMDAPLAIRWSRTLPKAAKPTTVTVLKDAAGRYFVSLLCDDAVQAKPPVKGKVGIDLGLTHFAILSTGEKVAGPRTFRKYETRLARAQRRLAKKTPGSANRAKAKLKVARLHARIADARRDFLHKLSTRLINENQVIAIETLAVNNMQKNGRLAKSIGDASWSEFVRQLEYKAQWYGRELIGIDTWYPSTKRCHVCGHTVAKMPLSTREWTCPECGTKHDRDINAARNVLAAGLAVSAHGEAVSPVCM

SEQ ID NO: 37065 - protein, 545 aa, Streptomyces sp.
MGDLRTIDAPFVALGPTGVAIRDRLGHLTATDEKVLRLVGAHLGSLASRDLKTRCQGGSGHSTDTWAARKRELTAESSSRWAGSITKATHDQWALSRRCQLAHIQGLEAGIKTITHRLSQPIGERGTKRAPGGYRSEREWHAKTRRPATLEDRLEHERADREKGVVHVVRGGKHLARNRHNLEAAELTETEWRQRWEAERWFLAADGESGKHHGNETIRVTPDGEVSIKLPAPLAEYANARHGRYVLAAKVRFPHRGTEWADRIEADRAVAYRIHLDVDRGRWYLTASWQIPPAKTIPLEAALAQGVVGVDTNADHLAAWRLDAHGNPIGAPRRFFYDLTGTADHRDAQVRHALSRLLNWAGSCGVKAIAVEDLDFAAEKTREKHGRRRRFRRLISGMPTGKLRARLTSMADQTGIAIIAVDPAYTSKWGAQHWQKPLTSNTRKTTRHDAASIAIGRRAQGHPIRRRTAPPPHDRSDRAGHRTVQARPAALGREGPRPRIPGPRTRSVPPDAARTRATRTSTTVRDVRSEQEWVQDSLLLTDEER

SEQ ID NO: 37066 - protein, 404 aa, Microcoleus sp.
MRTAYQYKLRPTKQQVIELDRWLSMLGAQYNFLLADRFNWYEQNRSPVNACPLVCHLPELRDNPDYYSQKKTLPQLKKTHPWYGEIYSQVLQDVVKRVKITFDRFLKGDSSGKRSGKPRFKARNRYRTFTYPQVKEGFLRGNLINLPMFGKVKIVLHRPIPDGFKIKTASVTKKADGYYLTLSLEDKTVPEIKPDFNPRSITGIDVGLKEFLTTSEGETVAIPQYYRKEQKRLRVIQKRVSRRKKGSSRRQKAVKELGKCHKKVADKRKDFHFKTANWLLSKYDVIAHEDLNIKGLARTRLAKSVLDAGWSSFLSILTNKASNAGLLVVPVSPHNTSQDCSNPHSAPQLSHGVRVGCKFWFDGKRASRTIQYKCLKIDLPDTIIHLFCWSIKHRSSANCDRQLS

SEQ ID NO: 37067 - protein, 342 aa, Microcoleus sp.
MRTAYQYKLRPTKQQVIELDRWLSMLGAQYNFLLADRFNWYEQNRSPVNACPLVCHLPELRDNPDYYSQKKTLPQLKKTHPWYGEIYSQVLQDVVKRVKITFDRFLKGDSSGKRSGKPRFKARNRYRTFTYPQVKEGFLRGNLINLPMFGKVKIVLHRPIPDGFKIKTASVTKKADGYYLTLSLEDKTVPEIKPDFNPRSITGIDVGLKEFLTTSEGETVAIPQYYRKEQKRLRVIQKRVSRRKKGSSRRQKAVKELGKCHKKVADKRKDFHFKTANWLLSKYDVIAHEDLNIKGLARTRLAKSVLDAGWSSFLSILTNKASNAGLLVVPVSPHNTSQDCSN

SEQ ID NO: 37068 - protein, 540 aa, Streptomyces sp.
MTEKPKRKQLRTIEAPFVTLGPSGMAIRDRLKHLTSEDEKVLRLMGEHLGHLASLDLAARCADGNNHDTQRWATRKQGLTAASSSRWAGSITKATHDQWALSRRCQLVHIQSLEAGVRTLMHRLSLPIGEKGTKRAPGGYRSKGEWFRKSRRLHTLEHRLVVARADREAGVVHVVRGGRKLLNTRHNLQAAQLTEIQWRQQWEAERWFLAADGESGKRFGNETIRVTPDGEVSIKLPAQLAHLANAKHGRYILASRVAFKHRGQEWADRVTANRAVAYRIHLDVERGRWYLTASWQRPVARTIPLETVRAKGMIGVDTNADHFAAYRLDRHGNPVGDPMWFPYDLSGSADHRDAQIRHAITRLLHWARTCGVAAIAMENLDFTAEKTREKHGRRRRFRQLISGIPTGSLKARLVSMAAEQGLSIVAVDPAYTSMWGDEHWRKPLTSNQRKMTRHDAASVAIGRRALGHPIRRRTAPPPHHRSDGVGHRTVQADRGAPGREEPRPRIPGPRTRSVQPDAERKRVTRTSKKEWVQDSLLLTD

SEQ ID NO: 37069 - protein, 272 aa, unknown
  TnpB Polypeptide
MHLWKTRKMLSPVVDKVHGRYQIRFSFKEMQELVQDKDKLAYRILAVDLGINAAASWCIMKADGTVHAKGVIHLPCEEDRLNHRINRKRMYQQAGKKSQCVYRWIRNANRALSIETARKLIEVAVLYSVDCIVFEYLDSQGKIRGKKFRERIHLWRKNDVQKRVELQAHRLGMRLSRVCAWGTSKYAFDGSGMVDRHSIYHFEHGKKVYNYSLCTFQNGKIYNCDLSAAQNIGARFFLREYQKKGVTGFPSTPLRTLSTLREFVNNGLPVAA

SEQ ID NO: 37070 - protein, 245 aa, unknown
  TnpB Polypeptide
MVYGEYQAGYLQRLKGQVDLVYRDGTFYLYATIDLPDETPMQPTRFLGVDLGIANIATNSDGHSYTGTAVETVRQRCATARKTYQSTGTKNAKRRLQKLSGAQARFHRWTNHSVAKRLVQYAKDTKAALVLEELTNIRSRMTVRKTQRAKQHNWSFRQLREFLVYKARQAGVPLLFVDPRNTSRTCSCCGFVDKRNRRSQAEFSCLRCGFTCHADLNAARNLATRGEVTHPDLIASSVGQMAFAW

SEQ ID NO: 37071 - protein, 370 aa, unknown
  TnpB Polypeptide
MLKAYKYRMYPTKQQEEMFSKHFGCVRVIYNWALEQKIKSYEQDGKAISRFTLNKTIPTLYKDMEWLKEVNSQSLRGATLNLDNAFTRFFREKTGFPKFKSKKNPVQSFSVPQYYKVDFEKNKVKLPKIGWIKTILHRHFDGKCKTATVSKIPSGKYFISILVDDGKELPDKQDFDENSAVGIDVGIKDFAIMSNGEKIDNPRHLNNSVKRLKVLQKRLSRKQRGSKNRDKAKQQIAKLHEKIANQRNDFQHKLTSRLISENQAIALETLTVSGMLKNHKLAQSISDVSWSSFVTKLEYKAEWYGKSILRIGQFEPSTKICNVCGYHNNNITLVERQWQCPDCGASHDRDVNAAINIKKFALNKQNLIGI

SEQ ID NO: 37072 - protein, 419 aa, unknown
  TnpB Polypeptide
VPLGVVLHAPTARHQGWLRVRRSFKFLLRPTSKQSTALTEMLRDHCSLYNGALQERRDAYRHVSRTNVRYCDQSAQLKDIRAFDPEGHGRWSFSSQQATLRRLDKAFAAFFRRVKAGHKPGYPRFRGVHRFDMVGFPKDGDGCRWDSTPNDTVTRVRLQGVGHVRVHQHRPVTGTLKTISVKHEGGRWFVILSCDDLPAAPLPATGRKVGIDLGIAHFVTTSDGTHVVNPRHRRDAAVALEQAQRMLSRCQRGSNRRRKARRKVTELHGAVRRRRLDHAHKAALALVRDADVIAHETLRITNMVRTPRPRPVPDQRGVFAPNGAAAKTGLNRGIHDAGWRLFLDILAHKAESAGRVLIPVDARDTSRRCPACGHVSKDNRLTQADFVCVACGHTANADVVGALNVAHRAGLVLREAPAV

SEQ ID NO: 37073 - protein, 429 aa, Okeania sp.
MYSCQQVLVNKNSELIAILTFLCEESHNLTNMGIYYGRQLFFKSHKTLGKYDLEKLYKHNYHYKVLYSQAAQQILRTVAESFRSYYGLIIAYREGKISERPRIPNYRKKGGMATVSYPKQALKLKGNQIRVPLGKTCKRWFGIDSFLIQMPSNLDFSALKELRILPRNRCFYWEFIYEKEVVVKPQLERENVLGIDHGLNNWLTCVSNVGTSLIVDGKHLKSMNRWYNKQISTIKENKPTGFWSNRLAAITEKRNRQIRDGINKAARIVINHCLKFSIGTIIFGWNKGQKNQIELGKKNNSEFVPIPTARLKERIAQLCSEYGIIFIETEESYTSIASFLDGDNLPNYGEKPDDWKPSGKRIKRGLYRTGNNWCVNADCNGAANIIAKVSRKLSLNLSRLCRGTAEIVPKEYIFGQLRRNGATWIYPVA

SEQ ID NO: 37074 - protein, 385 aa, unknown
  TnpB Polypeptide
VSELRRTYRHRIYPTAEQAAALETQLGQACDLYNAALEHRKRMWRDHGVSVTWHQQSAELKHLRARGLLDATANFSSQQDALRRLDRAFQAFFRRVKAGEKPGYPRFRARQRYDTLTWSFAGNSGGCQIKEGRLTLQGVGQVKVKWHRQIPPEAKLCTVQVKRQGLRWYACFSLDEVPTVPLPATGRVIGVDLGISTFAALSTGEMIAGPRANRAGAKAVRRAQRKVSRRKRGSSRRRKAVVLLARQREREANRRRDHAHKTARMLVQRFDVIAVENLNVRGLAKGMLARDCNDQGWATFLAYLHDKAESAGREIILVNPSNTSQACSACGTLVPKTLGVRVHLCACGYRADRDVNAARNILARATGPDGAVRRQQWGDEARAVA

SEQ ID NO: 37075 - protein, 276 aa, Eubacterium sp.
MKIISSYGVELRKQNIPIRQTLEIYRSAVRYLVEVYESVWEELAQIENSKKRFNAAEHLVHTTKRNPARFDFDFCFPKMPSYFRRAAVQHALGSVSSYRTRLEQWKAEGQKTGKPYLKSEQYAMPVFYHDVMYRGNTEEKDAAFLKLYDGHDWKWFAARLKHTDMEYLRKHWSGKKASAPTLEKKHDKYFLHFTYAEEVSLNRTPVKEQTICSVDLGINTDAVCTIMRPDGTILGRKFINFPSDKDRMYRVLGGSEDFSGNMDRVRRREDGHMQNV

SEQ ID NO: 37076 - protein, 412 aa, unknown
  TnpB Polypeptide
LRASSHNSTSRISALSKRYTVCRLKIGQSDQMDTLARASGELYSRIVTSYWRTVSHKGLWLKAKHLMRWHTSDALHAHTADACVQSFFAAMDSWRARRTVDVDAHPPRRRRYYYRVQWKASAIRVKGDSLYLANGRGNAPLIVPWAHGVPVQVEMGWDGRQYELRATYVVESAAAVLVEDAKVAGVDLGEIHPAVAHDGARATIMNGRHLRAVRRYQNKTTGKLQALLDRKRKGSRRWKRLIQSKKRQQRRWEHQIKDIAHKITSNLVSTLHENGVQTVAIGDIRDIRKRVDVGHTGNQRIHQMPSGMIRHMVTYKAERLGLVVVMQDERYTSQTCPACQARHKPRGRVYRCKLCGFTMHRDAVGAFNIRQKYLGAIPVVGVMASPTVGVRYHAHLPRSPLSQGWRERIPAL

SEQ ID NO: 37077 - protein, 405 aa, Desertifilum sp.
MEKAFSYRFYPTSEQETLLRRTLGCVRLVYNRALATRTEAWYERQERIDYVQSSAMLTGWKKQEDLQFLNEVSCVPLQQGLRHLQTAYTNFFAGRAKYPNFKKKRNGGSAEFTKSAFKWKNGKVFLAKCLEPLNIRWSRQLPEGVEPSTVTVRLNPAGQWYISLRFVDPRDLILKPVQQSVGLDAGITSLVTLSTGEKIANPKHFNRHYKRLRRAQKALSRKRKGSRNRDKARLKVARIQQQISNSRKDHLHKLTTRLIRENQTIAVESLAVKNMVKNPKLARAISDTGWGEMIRQLEYKAKWYGRNLVKIDRWFPSSKRCGNCGHVVERLPLSVREWDCPSCGSHHDRDVNAARNILRQCGFGVFPSRATAVAVGYTVSVCGATLRPQESKSRKAGARKQKPKS

SEQ ID NO: 37078 - protein, 441 aa, unknown
  TnpB Polypeptide
VRKINRAVKIRIYPNKEQITQIEKTIGCSRFLYNRMLADKIRYYQEEKKMLKNTPAGYKKEYPWLKEVDSLALANVQLNLEGAFRKFFREPGVGFPHYKSKKHSRKSYTTNMVNGNICLQDRFLKLPKMQPVKIKLHRMIPEGWKLKSVTVSREPSGKYFASLLFDCENQTAEKRQAEKFLGMDFAMHGMCVFSTGERAGYPMFYRNAEKKLAREQRKLSRCEKGSRNYQKQKKKVALYHEKIKNQRKDFQHKLSHSLAEDYDAVCVEDLNLKGIAGGLHFGKGIQDNGYGQFLSMLGYKLEERGKYLIKVDRYFASSKICSVCGHKKKELALSERIYLCECGNRMDRDVNAAVNILKEEKSESTQQNFEFSRALLEQAGIRADEPIAYVTNRFHIYRSGIFARKAGFTNARAIPASISFGTIAPSYLREVLAVCHVWVFG

SEQ ID NO: 37079 - protein, 379 aa, unknown
  TnpB Polypeptide
MLKSIKYELNPTKSQSKKLNQSFGNCRFVYNWALDKKIKAYQEDKKTLSCFDLMKELTSFKKKEDFEWLNLSGSQQLQQSISNLDKAFSNFFRAKKGFPKFKSKHSKQSFRIPQDVKINFDEYKFFIPKVGWVKFFKDKHIEGTIKFATVSKSTTGRYFVSITFESTQQRKTGNGAVGVDLGIKHLAITSDGEFFENQKYLRQNLNKLKKEQRSLSRKFQKGKEQSNNYRKQRLRVAKLHEKISNQRKDYLHKLTTYLATTYETVCIEDFAVGNMVKNHNLALSINDCGWGMFRQMLEYKVKDLRVIGRFEPSSKICNVCGDVNQNLKLSDRDWVCSNGHQLNRDLNAALNIKKFGLRASTLQHNVSGCAVRVAEPHRL

SEQ ID NO: 37080 - protein, 260 aa, Microcystis sp.
VQFCIKLDPRDTVKPLTPSQKTTGIDVGLKFFLVDSEGHQIDCPNYYRKAEKQLNRLNRKKSKKYRKGKKQSRNYHKARQRYARKHLRVSRQREEFVKSVALRLVKSNDLIAYENLNIKGMVNASASLGVDPERSRRVKNRHLAKSITDAGWSVFRQWLEYFGDKYGKLTIAVSPHNTSQNCSNCGQKVQKSLSTRTHVCPHCGYTDCRDRNAALNILQKGLSSVGRTQTLNASGEIPSWLVGEILLANGDSMNEESPSL

SEQ ID NO: 37081 - protein, 418 aa, unknown
  TnpB Polypeptide
MLDTTRTYRARIVNHQQVCDDLDQCGFSASKLWNVGRYYTQQRWDEDGEIPDDAELKSELKHHERYSDLHSQSSQRVLEELAEAFSGWFNSGDGNNPPGYRKHGDKHPRSTVTWKQKGIKHDDKHGQIRLSKGFNLKESRSDFILVEYETRPDVAVENIQQVRAVWNGDRWELHLVCRKQIPVEDAPGDNTAGIDLGISNYLAINYEDGESELYPGNRLKQDKHYFTREGYQTEGDNGPSKRALNARQKLSRRKDHFLHTLSKHIVERCVEEGIGKIAIGDLSDIREDDNGDARNWGRSGNKKLHGWEFNRFTRLLEYKAEEYGILVDRVDEANTSKTCSCCGQIRDSNRVERGLYVCSSCETVMNADVNGAVNIRRKITQSPPTGEMSNGRLARPGVYLFDTTTGVFHTQDQGDCKP

SEQ ID NO: 37082 - protein, 213 aa, Escherichia sp.
  misc_feature (5)..(5): Xaa can be any naturally occurring amino acid
  misc_feature (189)..(189): Xaa can be any naturally occurring amino acid
LSGKXNDAFRYPQGVKLDQENSRIFLPKLGWMRYLNSRQVTGVVKNVTVSQSCGKWYISIQTESEVSTPVHPSASMVGLDAGVAKLATLSDGTVFEPVNSFQKNQKKLARLQRQLSRKVKFSNNWQKQKRKIQRLHSCTANIRRDYLHKVTTTVSKNHAMIVIEDLKVSNMSKSAAGTVSQPGRNVRAXRKYPQGLPSQSHNDRQQKPRNDSH

SEQ ID NO: 37083 - protein, 553 aa, Acidimicrobiaceae sp.
MNRRTDSWTSRPCLVNSYGIGTLSSAFSTSSYAGDGARQSVAIIAVDVPAVAKGPAYQPLTHHTAPIPFTFVEQPFQTRAVLVPLDPTPAQEQLLRSYCGAARFAYNWTIGLVKENLDVRSREREDGIDEGNVTNALSWSAYSMSPLWNSVKDDVAPWHRDVTKHAFRSGVNNATMALKNFSESKSGVRRGRTVGFPTFKNRHSKFSVTFTETGTQAGWFTEDSHHVRLVLPRFATDPRITRRRDQLQWLHTTESLRRLRKKVASGEWRIQSVTISFTGGRWQASFSVRQVVAPTLLPRKMLGTLVGVDLGVTHLATLSVPVPSVSDENGHVANPRHLDAELARLARINRQLSRCVKGSKNRGKILKRRQFLFGRVTRTRDLHLHRLTTTLAGSFETVVLEDLNVADMVQKSKHGTTHGLSRSILDAGFHELRRQLTYKAKDRGHQVITVDRFYPSSRKCSHCGETKAKLVLGERFFECSTCGTCLDRDVNAARNIHREGVRLLGDDVTVAGHQPETLNADSRDQKTTAPRCDGGDRYQSRTTQPLREPSLSA

SEQ ID NO: 37084 - protein, 205 aa, Shewanella sp.
MLCRFEPKPLPVTKKTTGIDLGLTDLVITADGFKSGNPRHTAKYEKKLAQAQRRLSKKKKGTANFHKARIKVARIQAKIADCRRDFTHKLTTTLINENQVISCESLSVKNMVKNPRLAKAIGDANWGEMVRHLEYKAEWRGRTLVQIDKWYPSSKRCNCCGHVVDSLPLHIRHWTCPACEARLDRDTNAAINIKAAGQAVLACGA

SEQ ID NO: 37085 - protein, 408 aa, unknown
  TnpB Polypeptide
MVLVEKHIIKPKHRYYNDLDHLCLLSKNLYNSTLYTIRQYYFANKQFLNYQAVNKLFVSSNQPDYRALPAKVAQHTQMSVDRNFKSFFALLELKAQEKYNKPINIPKYLNKKTGRQVVHYAKDALSFKERGFIKLSKTNIKIKTKLTKDKVQFVRLVPKNHYVVVEIGYNVKEPEQKVNDNVLAIDIGVNNIASFVTTDGDKYLVNGRQLKYINHNYNKAVAKARGKLKTTHNQNSSKYISQIINKRNHRINDYLHKITTYIVNHAVSKDIGTIVVGYNKEWKQDTNLGKVNNQNFVNIPFYRLINLLEYKCRLKGIKFQTITESYTSKCSFVDDEEIKKHQSYSGRRISRELFKTKDGLIINADINGAYNILKKYMQKNATWNESLSQTLVKACSMPSVRKINIRLS

SEQ ID NO: 37086 - protein, 342 aa, unknown
  TnpB Polypeptide
MARKARKEYLAVNGKLLIMDNIARSKLLYTMRLFRDAVKMAHYLTRKGLAWKDIEKRLTSFISNAHYGHSAYQRAKLWENQPYLKLRKKFLFSVGKSAEKGNRNIRLIPSDNYFIVKIKIPHANGRHEWIECKAKFGKRYIPLLKELSRRNVSYGVEIGEYYKIHVYVPLELYAKYLGKKVGGKGKSLHVAGFDLNTDRINMAIINSNGELLDFKVKHFPEVTQHGFPKEKAKDIRLKALSELIDYACYHDVEYFVFEKLGKIKRKKTSNKNINRKLSKFSKKQLLTHAKVMVAKRGKKFCEVNPAFSSQDAELIARKLRLDTHTVSAYILAYRALKSINVY

SEQ ID NO: 37087 - protein, 375 aa, Ruminococcaceae sp.
MIAYKYKLYSNARNGHLDSQIDQFGRLYNHCIALHRRYYRIFKQSVNVYALTNHIAKLKKIERFHWIAELPSQAVQDVARRIDKAYLLFFRSLKHSVKAAPPSFKPRRKYKSFTLTQAGYAFNGNQIRIGKKRYGFHKSREMQGRIKTVTIKRDECGDFWIIAVTDWEKPGRGFTTGKSAGFDFGMKVFLTSSDGDDVEAPLFLKRDHNKRKALCRSLSSKQRGSNSRRKAKLALARFYRTIESRRNDFQWKIADRLVNKYDVLCFEDLNLKGISHLFGKKCGEYGFAEFLHKVESKCSEYGKGFVKIGRFYPSSKTCHKCGWIKSDLKLSERTWQCNGCGEIHDRDRNAAMNILRVGASTRGGEDVRLASASGL

SEQ ID NO: 37088 - protein, 414 aa, unknown
  TnpB Polypeptide
MTVALLKYYERNQQKSQTKFMKTGYSIRTWRMRLVCPEPIWLDRTEEYFQNVVEFYYHLLRQHEELWNSSLFDIQRSLELLTLAGRDGRQPTNPLPMGKVPVYLRRAAINKASATVKSTQELQSGFPEKLEAKVTFFKGMYSNLTDRSICLKLWNGEKWIWTDCKLKGRPFPQDGQLMSPTLVKEGRRYLLNIPVKQENSDARTAKERMAEGTSLCSVRFTNTDIFAVCCILDEQGKQLAVHTCRGGDAYRHRCKLLETRIQKSRPNTVGDNSPQPNRKYYMHLKNLSEHYAHQVSREILNFCKENQAGIIVLPDYDQNFTRMAMVKSGDFSPLHLSSKIRTNLQYKAWAEGILVLETRTDGLKDKCAICGGKVRRKGNEFLCENGHQGNRFLNDARNLGRKCQDSFFRRSRTK

SEQ ID NO: 37089 - protein, 424 aa, Streptomyces sp.
  misc_feature (323)..(394): Xaa can be any naturally occurring amino acid
VYNDALALRKAAWKTDRSRIPTGALAKAVVTDAKRTEARSWLGSVSVDALQSSLRDLDTAYRNYFDSKSGKRAGRPVGLPVFKSKRDARQSLRFSRNGFRIRGNGKLNLAKIGDVRVKWSRSLPADPSSVTVVLDAAGRYHASFVVDVEPEHLPEVDAEVGIDLGLTTYAVMSDGSVIDNPRFLRKAEKRLKAAQRELSRKAKGSKNRAKARRKVAKAHAKVADTRMDWLHKQTTRIIRETQAVYLEDLNVRGLARGRLAKSVHDAGWATFRRLLEEKAARYGRHVGIVPRAFPSSQLCSACEHRDGPKPLRVREWACGACGXXXXXXXXXXXXXXXXXXXXXXXXXXXXXXXXXXXXXXXXXXXXXXXXXXXXXXXXXXXXXXXXXXXXXXXXHPGRRAGGQAKRLRRTGETRRGDPTPGTAR

SEQ ID NO: 37090 - protein, 571 aa, Mycobacterium sp.
VTTRKRREWRGVKPVAAPAGVAIETRVRTTCADDRVLDAVAEHLGRLRRADLAAVSRPAPVDSTLDAAGCRQARRDRLNARKKALTGQSSARWANAIIAGNDDQYRLARDAQHRHIGGLRTAITTIEVRAAEPTSDTQTVSKRRSCRKVKSARGYATQAERFQKLRRCQHLRAELAAAERDRAAGVVHVVEGGKRLAGTRHHLDVAGLTEPQWPQRWDAARWRIRANGSPDEPFGNLTITVTPAGQVSVRLPKPLEHMANAPRGRYVLSGAAVFSHRGEQWVQRITGGNSISYTLTHKSGRAGVYLAAAWAIPALPYWAGRDDCDAGGDVFAAGPVVGVDLNDGHLAARRLDVHGNPVGSPERIDIELTGSALRRDAQVRHAITALLRYARRYGITTIAVEDLNFTDARTTGRETMGRGVRGKRFRRTVSGIPTAVFRNRLAAMTAHAGIDILAVNPAYSSIWGGQHWQRPYLNVTRHQAAATVIGRRAQGLSARRRKGVTPQRPEDRPVRATNQTEPTNPTATGRRHEPRTRGTASRRPNSPRTRQPDRATVTPAQLANNGQTSAVTVPS

SEQ ID NO: 37091 - protein, 505 aa, Mycobacterium sp.
MSQQVKITRARLHGSAVYLGDGTGADGTAVPVWSANPDEVLGWLCDGFRFRFNQRRSTRCRYLTCQDRDGDRVMVIDPAGEPVLVPIGRTVTDITDAQARRRHSFLAGVPSLVLEATLKTEATDWFSAGKRRKTNKSAGRRPGAMPGFRRKDSDQRFVCWFNGGRNAVFTKTGRRSGVVTINGANPRTHRAPGRAADGEPRNRGWKITLHVRLSQPIRAYTSVRVNWTRRELVFVNEPLPVTGKVNTGEVVGIDRGVVHTAADDRGRFYDAPETAGLDRQRKFHQRRMAKSRVIAAREGRRYSNSRRYRARKTAAADFAARQVRVREDFAQKLSTQLVREYDFIGIEALHLDRMTRRGKGIGAAAKRGMNRVLQNAALARLAKHIEYKSKLVGVTYVEVPAAYTSQRCHQCRHTTRENRESQAVFSCKACSWTGNADTNAAVNVREEALTRWAAQRTEQLAGTSGEKPGGAAVSQAGSKSKTDPHTGPAPRLAASAMNRKPPEAA

SEQ ID NO: 37092 - protein, 327 aa, unknown
  TnpB Polypeptide
MRRRPTLAPTPARRATRAIRAAIAASRPRHSPGSDRYHVRHGRNSRWMFLELPKIGEVKLRWSRDLPSRPSSVTVMRHADGTYEASFVVKTEPKPAPTPRRNACGIDMGLESLASIVYSDGTREKVAPLRALRKAERRLRKLDKELSRRQRGSSNYNKAKQAKARLYARIGAQRRDLAYQLASRVAGENQAVALETLCVKGLMRTRMGKSVADAAWSTFTNRVDVLCAQWGRKAIHIDRWCPSSQVCSQCGHRDGPKPLNVREWECPNCGAFLDRDWNAALNILDAAGLAESLNARGGDVRRRLAQAGRDAIAREAGTHRTAMPSLG

SEQ ID NO: 37093 - protein, 420 aa, unknown
  TnpB Polypeptide
MAKEPQTLENKEVKQVVPAKVLSIPSKTKKKPPPNAAIKIKLLPTPHQRERLNTLFGGHRYVYNEIVTKATDMFDIEPKEFDTKYRYLAKKNACDEKVKDIPEECLDSSFRDVVKAIKTTRALSKALKEKIGRGFALKCLKKKDLSGNTSIEIRQRSLTIMDKQVQFFPTYFCNASDKIDKRNQDKRIKTAEQVPIGIHSVRIAYHDYNYYIIVPKRSEFEKTLGGVCAIDPGVRSLCTIYDPSGITFELGNNQEVLARKCNQIDSISKAMKKTSNKQQKSRLKKKRKAIYKKITNCVNDANHKVSKIISKTYSKVLLPKFETQQMMIKENRKIGRSTTRMMGILSHYKLKMMLMYKMERTGGELISCTEEYTSKTCTNCGRINHKLGGSKVFKCSHCKLEIDRDINGARNIYLKNSHLL

SEQ ID NO: 37094 - protein, 391 aa, Lactobacillus sp.
MFALEVRQLIKTQVVELRPNKTMRKQLDNLCDYRRYCWNLALATWQTMYDAHTLNKTDNPSPNERRVRDELVANKADWQFSLSARCLQLTVKDLANAWKAFFDKAQTDWSKPQFKSKKNIRQGFKTDRAKVINGKLRLDKPKNISSWYNISTYEKLKMTQIKIASIFRERHHYYAALSYEEDIPAKTKTGTKTAIDVNVGHFNYTEGQISVLPTKLQKIYKRIKHYQKVLARKRKINGKLATQSNNYVQVRTKLQRDYRKAANIQNDLLQKFTTYLVNNYDQIVIEDLQVKKMMMSHVASKGMQRSLFGKFRQVLTYKCEWYKKGLILADKTYPSTQRCAKCGYVKTGDEKITLSGNKKYGTKHNEYVCYKCGYQNDRDDNAVLNLLVLAK

SEQ ID NO: 37095 - protein, 427 aa, Escherichia sp.
MHQENTMLPRRISVSLFTDQSIIWPVKRLQAFKFQLRPGGQQEREMRRFAGACRFVFNRALALQNENHEAGNKYIPYGKMASWLVEWKNATETQWLKDSPSQPLQQSLKGLERAYKNFFQKRAAFPRFKKRGQNDAFRYPQGVKLDQENSRIFLPKLGWMRYRNSRQVTGVVKNVTVSQSCGKWYISIQTESEVSTPVHPSASMVGLDAGVAKLATLSDGTVFEPVNSFQKNQKTLARLQRQLSRRVKFSNNWQKQKRKIQRLHSRIANIRRDYLHKVTTTVSKNHAMIVIEDLKVSNMSKSAAGTVSQPGRNVRAKSGLNRSILDQGWYEMRRQLEYKQLWRGGQVLAVPPAYTSQRCACCGHTAKENRLSQSKFRCQVCGYTANADVNGARNILAAGHAVLACGEMVQSGRPLKQEPTEMIQATA

SEQ ID NO: 37096 - protein, 550 aa, Thiorhodospira sp.
MFHPEKPLKYSDSMQTHLENMPMKGESPLTELPVGSEGLMSTPILAPPLKPSQLSLAIAECLHLPKSQTLSDKPNTCVSATQVSRSSKMSAPPSTISVKGLNPYWDDACEARSSQLWLPTKTDSFVSDLNSLRGLSASAAVNSWFSVEIKENPNVNSPKIYWPSFMSSLAGATGEEITRAKRIKMRPTRSQAKLLNSWLGVYRFVYNETIWLLNLRIVHPNFMAIKKYLIPHLAEEYPWTKECPRAIRDGAVAEACQTVQQAIAKFKRTGEVSRCRYKSRKDAQQSFFLRNDQWSKDRRGFNVRALGDMKFAEALPMNLRDGRVIKFANKWYVSLPVLKEPDAAENQGRLVALDPGVRTFQTFFSDLHVGHLGQDDFQRIVRLAHHLDLDRLLSRRDKAEGKRKRLSFTKAADAIRLKIKHLIDELHWKVARFLTDNFDVILLPTFETKQMTSKAGRKLRRKSVRSLLSFAHYRFGQRLEQKCIERGKKLVRVCEAYTSKTASWSGEIINIGSAKVIRSNGIEMERDENGARGIFLRALVDSPILIEGAR

SEQ ID NO: 37097 - protein, 341 aa, unknown
  TnpB Polypeptide
MYYAYKYRLKPSDAHREALDRHRDICRQLYNHTLNRLNEYQDEHGELPSMTTLRSELPDLKKWWDGLSDVYSKVLQTVVERLFDNLKGLSALKKNGHGVGQLKWKPPREFRSFTYSQSGFKLDKKGGQTVLSLSKLADIPIRLHRAIPDDATLKQVTVKKEPTGEWFATFGVQMDREPPEPPENPEKCVGIDVGILKYAHDTDGTAVGSLDLTDKRERLEREQRKLSRKQHGSNNYEKQRRRVAECHANLRQKRRDFLHKLSAYYAREYDLVAVEDLNVKGMMESPANSRNTASAAWRTFLLVARIQVRTGGAHFVAVDPERDDQGVCVMWRLDGEAVVGP

SEQ ID NO: 37098 - protein, 295 aa, unknown
  TnpB Polypeptide
MRGRGGAVRSWNSNHPKRRWNLKASRRKKTINYDLRVMSLRGNLLSLSVTHGEKRQRILLPDIPGWFDRRYSERKLNAAKLVLDPDGRNASVMLVYRLPQSTPIEHGDVLGVDLGQHSLTMDSRGGETSYSRMQGIRRRYAHNRKTLQEKGTRSARRRLKAMRHREERFIRDVNHRASKRLANTPNVSVIAFEDLAYIRRQARKGTKTGRRRRNMLNQWPFAQLQEFTAYKAARNGVRILMVDPAYTSQKCNRCGYVDARNRNHARFDCLRCGHSDNADHNAALNIRDRAIQNLG

SEQ ID NO: 37099 - protein, 385 aa, unknown
  TnpB Polypeptide
MIMQLTRIVKIKLNIQVETILPTIKAYTQAFNHVCQIGWNDSDSNGVSLHHKTYKELREYLPSQLAVSARMKATEALKAIKTRIKKKQKATCPFSKQSSIRFDARSYNIWFDKSDLSLLTISGRQKIPISIPEYFKQYLSWKRCSADLFLRKNKVFLHITFTKEITDPGLTGRVVGIDRGIKKIAVTSENQFFGGGQIKRISKRYEKIRSALQSCGTKSAKRHLRKISGKENRFRTNCNHVITKQIAGSLDGGTVIALEKLTGIRQTIRLRKKQRKDLHKWNFFQFEQFLTYKAEAKGHKTEYVDARYTSQKCSRCSYVSRSNRQFQAVFKCKHCGFSLNADLNASRNIRQNYLDAICYPSRVLINGPIVGNEVTKPLTGNCVAV

SEQ ID NO: 37100 - protein, 389 aa, unknown
  TnpB Polypeptide
MSNDVRCAVYRLYPNREQEKRMLHSLDVTRTVYNALVNTCQIYIGFRLPFPSFMDLNKMATKIRQENEWMQDVHSHLFTSVAKRVHNAFKAWAKRYKEGVGFPRFKSKNMFDSFTYTLDTDYSFVDRDGHKGGYDRIRLGMIGLVKFSNPFRIKGKCKTATVFRRKIGNHYEWSVSIAYEMEYPFKDAFFVEEFSRPDVGIDLGLRTLATLSDGTAISNDRSYRKMEGKIAKSQRKLSKCEKGSPDRKRQLGKLSHLYKKIRGYRNNRFHKITREISLHYNNVYMEDLSVKHMAEDSDKGMRKSYRDAGWNIFTRLLNYKVEETGNSINYVNPAYTSQICSCCGEMVPKDLTIRMHICPYCGLVMSRDQNAAINILNRGLGLQTVTGIV

SEQ ID NO: 37101 - protein, 560 aa, Kitasatospora sp.
MCEGGGTDWEGKGVTGPKRKLRRIDVPFVSLGPSGVTVRDRLKDLTPEDEKVLRLVGAHMGALASKDLKARCADGLDHNNGTWAARKRDLTVRSSSRWAGSVTKATHDQWALSRRGQAAHLDSLDAGIRMLRHRLSLPVGQKGTRRSPGGYRSRHEWFVKSRRLAALEERRAQVAADRENGAVHVVRGGRKLLNSRHNLAAANLTEAGWRQRWEASRWFVSADGESGKRFGNETIRVTPDGEVSIRLPAPLAEYANARSGRYVLAAKVSFPHRGTEWADRIEGNRAVAYRIHLDVSRGRWYLDASWTRPVVQTMPLATARAQGMVGVDTNADHFAAWQLDVHGNPVGNPRRFSYDLTGSADHRDAQIRHAITRLLHWAKRHSVHAIGLENLDFTAETTREKHGRKKRFRQLISGMPTGKLKARLVSMAAESGLAIVAVDPAYTSMWGAQHWQKPLATPRRKTTRHDAASIAIGRRALGHPIRRRTTPPHHDQSDRRGHRTVQAAPGGRGREETRRPVTDRSHEPRARTGPTRTRATSAPKTVRAARSAKTWVQDSLLPTD

SEQ ID NO: 37102 - protein, 460 aa, unknown
  TnpB Polypeptide
MKQSYPESYTRNAKFWGIEETPEFQEACVRYTKILNNISNHLKQELKSGEVEYLNTSSLSVDDEQPGLIKFKDGRVFTDSFYINEITHLFDGVDVLQKGIKTMARSMLQYVCNRFGGYANRNGESKIPTITFKGKDFQLKDKQLRFENGKIKMKTIFGTYELEYSNSIKEDELFAFLEQEGKRWTGGNYIKKQNCIVTQVRIPFEPIYDPQGVLGTDFNKSTNDRIVLSNGYKIAATDRQLELERQIKEVNKILKEKDGPVKNRTMNSKKRRTLRKKQKSLHAELLNAYRESVQEVVDIAKNNQLLLCIDTVKTGQKMGTWGQDKIIPLMITICENSGIPFYAVPCANTSKRCPHCGYIPKEKGQNKNRPSTNEFKCQECSYEEDAQLVGALNIAHFGKEMYHNHVPYSSWGRRSVAKLIEKYKQLEQRQFYSPRQSQVSGFLSERSEYPKSNLSTVKLS

SEQ ID NO: 37103 - protein, 337 aa, unknown
  TnpB Polypeptide
MSRYRLLPTPAQEAVLRDHCGHARYVWNLAVEQHAHWHPGRPGAPGYLEQCRQLTQARAGHPWLAAGSQTVQQQALRDFAQAMAAFFDPGNPAGRPSWRKAGRDEGFRIVGRGRQWEVQRVSRKAGQVWVPKAGWVRFRWSRTVPPGAKSYRVTMDRAGRWHIAFAVLPAPIPAPGNGQVVGIDRGVVVSAALSTGELLYCPGLTGLERIRLRRMQRRLARAKRGSNRRSRVRHAIARLRARETDRRKDWAEKASTGIARRFDVIRVEGLQIGNMTRSAKGTRENPGRNVRAKAGLNRGDHQVMSPVWWPRQSHPTWSSSCRSRTGCAPGARVPATC

SEQ ID NO: 37104 - protein, 299 aa, Natrarchaeobius sp.
EYNRVRLSKGRNMKPSLYAADYILCEYQTRPDVDLSEVKNVQQVRAVWTDTEWELHFVCNVEIEVAEAAGEKTVDIDLGITTFAALAYEDGYSELYPLNCLKQDDYYFSKRIARCDDSGSEQATRLNQKKSARRTHYFHTLSKHIVERCVEEDVGTIVVGDLSGIRENEQNSESKDWGTHGNLDLHSWAFDRFIDLLEYKAKVEGISVEQVSERNTAKSCSCCGRNRDGNRVERGLYVCDECGTVANADVNGAENIRQNVSPSSPSPSVNRSNGWLAQPSTYLFDKETGAFAPREQVTS

SEQ ID NO: 37105 - protein, 553 aa, unknown
  TnpB Polypeptide
MQTSTYTTLIKSADISPETERSLSAYAALFGRVERKLYASLCADKITANERKSHFISKYQISARQYNAVLRTLTGKLDSKRELDKLYQSEKKERIEAVSGTISRLQSQAEMLSKTGGVPSEIQKIRFKAHQKSRCRARLDEQLEKITSNTGKIPAMCFGSKKLFDKQFFLKENNLKNHAEWLEKWRSARNSQFMVLGSKDETCGNQGAQLYVDDQGEFRLSLRLPDALGGGRAELSGFDFSYGKSNILAACAENERRRAANVKELTRYSPWVPDRKTGELRPQTKNEVLSSYGQPLTMRFMRHKFGWTMAVTVEEPAPGLITGSYENGCLGVDVNTDHLAVCVVTPDGNKKHVEDVPCPASARGLTTGQRMAMIGDAVKRIIEIAKIYGVGVGIEKLDFSRKKQALKETANKHHRTMLSAFAYNMVLSLIERRCYREGLPCKAVNPAMTSIIGMFKYHSTQNTTHQAAAQVIARRTLGLKHDRIRFSVPHNVGTQLCSARSKTVSIDGGPLQRWGKVKAIVKKHAALFKQPEKTGPPVPLMVNEHKLQCVSLA

SEQ ID NO: 37106 - protein, 389 aa, unknown
  TnpB Polypeptide
MNLAFQTALRPNNKERTHLMKACGVARFAFNWGLAEWEKQYREFKAGERDKKPNGMALKKQFNAIKKAQFPWVYEVTKYACQQPFIHLNKAWERFFNKVIVNGKPAGRPKFKKKGRCIDSFYVGGDHVSVRGNRVKVPNLGWIKMAEPLKYGGKITSMTIRREADKWMVSFQLDVEMSFLRRDNQAVVGVDFGIKQLATLSRGQKTVWENPAPLKTALRRLARMQRKLAKKVKGSGQYKTLNMRIARLHRRIANIRKNTLHQLTSYLVKHFRKINIEDLNVRGMMANRKLARAVADVGFYEARRQLTYKAEWYERMLEVIDRWFPSSKLCSGCGWKHPSLTLSDRTFHCGGCGSSIDRDENASINIENFTTASSAGIYAAEENGPAQPA

SEQ ID NO: 37107 - protein, 327 aa, Archaeoglobus sp.
MFSVHGCRVVLKLLDDELTVEMSRERDVSSVRLVYYLGQFYIDVVYEKEQRAPLLVGNHAAACDLNLDNLMVIVSTNPIVPSIIVDGRGIKSFNQWFNKNKSELQSKHDIILNEIKELRDKGKEIPDELLAKERELRGRLRALWAYRKRRLDDWFHKITRWLTEFLYRTGHDVFVIGTGVLEAKRNCSERLNKKVTEKFVPMPYRRLIQLLEYKCEERGIRVIEVPNEEYTSKTCCINDDIRRIQRSERPKFSGRRIARGIYRTIYNKTIEINADVNAAFNILRIYANIQPAELFEPNVLKWKLCRPIRVCFTDDVNELIERILNHR

SEQ ID NO: 37108 - protein, 450 aa, unknown
  TnpB Polypeptide
MPREGLYPVETKNRRTNVVRLLPSGAQERRLRKLADVTAKLYNEINYERRQQFFSGKGVDFKGTWDKYYEKYKGMLGVNAQAVMQKNNEDWNSFFSLLRLKKEGKLPPHMNHVSPPGYWKDKETGKRRLIIVIRQDHYKVDVERHVIILKDFDMEIKFVGRLRWYGKQGRLEIIYDDTKNAWYAHIPVEVGVEVTKTGKKAKHIVRGERKTIQITTPKGNKVASIDLGINNLASVVVSDGTWLLYKGVRTKEDYFYMQRLISRIQSLRDTLKDKLLEETIDELNHEIRRLYGKLRRRLLHLYRNLAKHLIEQLHELGVSTIYLGYPLNIAQDKGNKFTVNMWCYRKLMEAIELKAQEYGIRVFEVVEYNTSKYCAFHNVEVKRKPRGVVTCPKGHKLHSDLNGALNIMKKAIGSIPLVIKKPLSFIVEHNQVAPTKGGGNPQDPQGKPTH

SEQ ID NO: 37109 - protein, 391 aa, unknown
  TnpB Polypeptide
MFRSREIKLYPNQSQVKQLEIEFGCSRFIYNKMLEICKKKYLRTGKSLSNYDMNNLLPKLKKQYTWLSAASAAQLQITCGNLAEAYNRFFKGVGKFPRFKNKYCKKSYSIIQGTSLIGNKIKLPKLGLVKFRGSDLPEGKLKKVTVKKSASGSYYAVCLFEVEDLDLSNIKHKEGITGLDLGLKDFLITSNGVRVKPNKFLRENLSKLKKSQRDFCRKQKGSKKRNQARIRVAKLHERIANKRKDFSHKVSNSLVSECENQAFAVEDLHIKGLVKNHKLAMSIADSGWGLFLNYLNYKANSVGKQVIEVNRFFPSSKTCSECGRINDSLQLSDREWTCKCGAKHHRDRNASINIAKEAARMAAGGELVRLDSLYEVIKADSVKPIISLNVC

SEQ ID NO: 37110 - protein, 390 aa, unknown
  TnpB Polypeptide
MRGFEVKLYPNKSQIEQLNKEFNCSRFIYNKMIEISQKKYHRTGKSLSGYDMQSYLPKLKKEFVWLKEPSAQQLQITCHNLAEAYNRFFKKLSKYPNFKKRSSKASYTVVTNVTLLDTHIKLPKLGLVRYRGGDKPLGEIKRVTVKKSASGRFYASILFDTKETLQESKPFSTITGIDLGIKDYLICSNGDFIQNPKHLRVSEKKLKERQRRLSKSLKGSKKRNQRRIILARTHEKIAFQRKDFTHKVSKILTSKCENQAFALEDLNINGMIKNHKLAKSIADCSWGMFKTFLNYKAASLGKQVFTVDRFYPSSKTCSSCGIVNNMLTLDQRSWNCPHCGSVHDRDLNAAINISKEAWRNYASGGAISPETLERVAQAAPAKLKKSLYIQ

SEQ ID NO: 37111 - protein, 380 aa, unknown
  TnpB Polypeptide
MILNYKYRLYASKHTKELSQLVTTSIYVWNHVVALYRRYYKLFGINPSCTKMQHHIAKLAKHNPYLRMMGSQSLQEICQRVDATYKEFFKKKGRGRPNFHKTNKSGSFIFKGGVGYRLDGNKLTVNKLGYTYRFKLTREYGVVRNIHIKRDNIGYLWLVVTTDVKPKTYERLGNASIGMDFGLKHLITTSDGVTIDSPETHKHALKQLRKLNRNVAHKVKGSNSRKKAVKQLAKLHEHIADQRADFHWKLAHELCKHYSLIAVEDLNLKAMQKLWGRKVSDLGYSEFVNKLDYIASKYDTTVVKIDRFAASSQVCHCCGYKNSGVKNLGVREWVCPQCGATHNRDVNAAVNILNIACGKGVSHDRSNSKTNVAYATSQLL

SEQ ID NO: 37112 - protein, 405 aa, Acetobacter sp.
MKIQKAHVVRLYPSLVQEEFLRQIGGGTRFLWNLALEQRQTWGQRHGLNRFSQSKELTQLRSEVDWLKACPSQVLQQVLNDLEKAFRNFFARRAGFPKFRKKPRGDSFRFPDGKSVLYERLTGKGGRLKLPKLGSIRFRGWRDIPGQIRNVTVRCDAGQWFAAIQYEHEIADPAVKVLPAAGIDRGISAIIAVSGAGRTKGPNAYRKALKKLRRAQRVVSRRQKGSQNRRKAVLRVARLHQKVRRVRADFLHKISYGLAKNHGTLVFEALKIRNMVRSAVGTVTEPGRHVRQKAGLNRSILDQGWGMLRSFCGYKIAERGGQCLDVSARNTSRECRVCRHVSADNRVSQTRFFCVSCGHTENADDNASVVILKRAVDNGLLPVEALRQHAREAGISVGSLLASSQ

SEQ ID NO: 37113 - protein, 400 aa, unknown
  TnpB Polypeptide
VSSKRLETVKLTARFRLDGEVDESLFETYRSIVNELLGYAHSKGITSFKRLKSEKYHELRQKYPKLPSHFVYTACQMTCSIYKSFRKLKRKGKVKKDKPLLKKYVIMLDDHLFKLDLENWIVRISTLNGRLKFKLLHGKYHEKFKDWKVGQAWLVKRTDGIYLNVVFSKEVEIIEPRDFVGVDLNENNVTLSSPDGFVQIVTHEREIRTGYFVKRRKIQKKLKTGRRRKELLEKYGRRERNRLNDIYHKLVNKIVELSEKYGGIALEDLSNIRDSVRYSAELNGRLHRWSFLKLQSIIEYKARLKGIEVVFVNPNHTSSLCPICGRRLSPNGHRVLKCKKCGFKGDLDVIGSWNIRLKALKMWGVSVPPESPSMNPETGKLSATFASKVMKVTESQNGMG

SEQ ID NO: 37114 - protein, 434 aa, unknown
  TnpB Polypeptide
MRQVIHGEIYSSDFNNLHQLIVDWASAYRFAFCRFQKDKLSFNEVRNQTKIKYQSLNTRQISDAVRQAQGLYLRVKDKKVIFGGRKNWDKLVKGEIANQQWKDKRDNQIYAQGDKTKNGNPNLRLINKGENFYLRVTSGNRKFEEYKLFIPVKFQERLFSLFGADVTYNVRLLKKDEQHYRVIIDYEVEDPKISIDFSNGVIGIDINPDKVAISNLTVDGNLIKSFTMVNNRMFFASTNKRNYEIGCIVKQIIAYAIEKSKGIVFENLQFKKEFEDQGRKFNRIKSNFVWKKTLTLLERKCIENGIRYKKVNSALTSIIGRLKYQKMYNLSIHESASYVIGRRGLGLNERLSLYNYPTNCVKELTFDLVGDKVKRIHSFRLWRKLRDNYKAVLTGLQGRMSNLKELDGNLCNIGENPIGKVIPQELVVGRINVN

SEQ ID NO: 37115 - protein, 667 aa, unknown
  TnpB Polypeptide
MLTKTRARTKKITKTMLKLELKGDPNSLEFLDNLFNEYERLVRIADSFVYYLYPYYANITEQEKLERLKELVKSLDEKAIRKNKRRKREPQEIEEQTITETETKHKYTHSNLLKTLLHRFIKYTKQYYGIDAKYAWLEKQGGLADLMHSNAESAYKHRSIPNMRRRLTNVMPITMSKSPLDENRKDKKNNGRYYKKDTEFIFSNGKIMFRIGRGKHKVTFKIATRFNDAERLGMLIHAIQGDNGLTIGDPCYLVRKETYNGYRYYIMVSISKNVDVKALYEASNNKSKIRIVGVDSNISKYIATMFCIEVDKENKTYKLINAKGIDSKDYINVVKKYEEERGKLQQGRMKGKVNKKKISRYKEKEDYTIRNRCGDSKRIDIRRQLIGYICNKILEFADENDADIIVIEDLKGLNKELKHLRIIKKELGRLYNDVNSKGNNAIDDKINEVNKNKKYKNKIRRPLLEILNKIKEYSNAKDKVKVAKYILKYKQGIEKRIFLLSIMAYYQFKQELEVEALWNGKLLYIINPRYTSQQCLRCGHINKLNRITQRQFKCIKCKFEMNADFNASANIALRFATKVLKLELELKQGESSSMMTITNATASLHASINAGSKLGVVADTLPSVASTALQGEGEGRSLSMRGQTDEPCSAERLAMLDEFLEKRGNGG

SEQ ID NO: 37116 - protein, 601 aa, Rhodococcus sp.
MIGPGSTVPRQFAFTTRAHVAVDDATGERIGLDDVDIRVGWLLDLIAAAGGELVARLWRPVTFDVLAAGRDHQDRRLPAQGHVAAARLGWNPIYPDGAYVPSRVTRVVTEQVMATLRTLAYRDAAITSLSERFDPATGRIAPPTAAADCVPLGFARGVRRQLVARARREGAAVAGRLRITDVQGPPQVAAMARLSAADRQLAQITATDRELVLTVKLPTCPAPAGRAQWRWVRLTAAIPGHLHGRAITDWHLPTLVLDRRGLLWRCAATELVPDCDLESATVAVGVDWSPSTLGAAAITTESPDGLSSDYRGFTYDDRGLGTKLARLQAEGQMLHRKAARLTRLAATAPPEVRTRLETKIAVLNDHRTAVGVKRGKINRELAFHFARQVTDYAEAAGAQVIAVEDLTTLETRGHSRVNNNRAAQSARRKATVALAHTAAGVGVAVVSVPARGSSAQCPGCDEPLVRPGGYHTAWCSGCRVGGNRDHVAGVNLAKRVLLGKCKATRRRGKLPAIRVAEHAPVRRSRDKNGPTPPRPRHRRVRRSLPTTTPRVGVTPKQHVPAPRASVWDTVKPAPTQGDAGSRDTRTSPTHATPVVVSIRST

SEQ ID NO: 37117 - protein, 433 aa, Streptomyces sp.
VGVEDESAVTTSSNVLIFSHKPRSTLIGVQLRYSFRLYPNGPQRSALAQAFGCARVVFNDALRARETARAAGEAFPRTGDLSKLLITEAKKTDERAWLGEVSAVVLQQSLRDLDTAYRNFFDGLKGKRPRMGAPRFKSRKDNRQAVRFTANARWKITTGGDLSLPKIGDVRVKWSRNLPSVPSTVTVIKDAAGRYFASFVVGTEPETLPDVEPVVGIDLGPGHFAVLSDGTKIDAPRFLRRAEKKLKREQKRLSRKAKGSNNRTKARVKVARAHAQVADARREFHHQLSTRIIRENQAIAVEDLAVKGLARTRLAKSVHDAGWSAFVAMLEYKAAKFGRSFHRIGRFEPTSQVCCVCGVKDGPKPLHVRTWECGACGSVLDRDINAAVNVAKAAGLAVSACRAQVRPVPVPAQRGEAGTHRDGQPTVVGIPAL

SEQ ID NO: 37118 - protein, 408 aa, unknown
  TnpB Polypeptide
MRAVATAKVKVVAPDPSHCHKLIEFLKAYRGWAQYIVNEIWELDHIPSMKELHYRFYKLLRMQGFRAHHCHKIERRAREVVKATKKNNGSKPILRKLTARLDYQDYRLDVESKILRIAVLNNEWIELKLLWYSYLDRYFNGEWRLKEILVSYRDNTIWVYFTFERGVIFRQPRAVIGVDINFDNVTYTIVDMNGRLVTMGVIPFNGLKRALSHKIISEKVQKKYGRRWRYVKGIREAIKKHGERTRNILVDSCHHISRKIVKIARKYNATIVLENLDKLRNRVNGSKKYNKRLSLWTYHRIQSYIYYKALIEGLPVIYVNPKGTSRTSPLGGKLVFINYKWVKLPNGHVVTRDIVASWNLALRGLSLLTRDVGSRGFVDSPKAPNQMQTQEGMRGKPVPRIISSNQSI

SEQ ID NO: 37119 - protein, 433 aa, unknown
  TnpB Polypeptide
MQIVKTVKIPVHYATTKRKLDILNKLTARLTYGVHLWSQIIEANDIRTRSGLRKAELERQVREQTGLSAAFVQCCADTALWMWKSYRKLHREWARVVKLAQRGGNERWLRKLIKLEPQPPFSNGPRRKIPIWFDYRIGSLEEAETIKLSPRVVRISTLKKGERITVLLNPAKYHLDLLERGEIKSFQIVKRGKKFYVHVKVEYEVQDQPVRAVRGVDLGIRRSAATVLLHPDEPLRRGDFSVICDGEKVHRLNELNRRVTRLQQLKKWGALKRMRNKRRHVAEYYDRLTAKRIAEISNGCAVAVGYPKGIKYENYQGNEKPKLRRLLARWAYGRIIRYTEEECAEQGIEVVASDERWSSATCHRCGSRNTERLTQSVLHCHDCGLTYNADFNGAINIGSSILATPRSRRAVVDPAPTSGELAEEVSEAGSPCL

SEQ ID NO: 37120 - protein, 426 aa, Acidianus sp.
MDSPLIDLKTSIHNILLMSNVGIRFRAFADEPTIRELKSQLKLACEIYNTLRWADIYFYQRDGKGLNKTELRQLALDLRKQDDEYKRIYSQAVQQIADRFYDARKRFFEGLARFPKEKKAHKWYSLVYPQLGWKVLETREIRTKSKKNKKKIITLQLTNLGVFKVIVHRDFSLDKVKRVIVKLTPSGRVYITFVVDQEYPQLPKTNKTVGIDVGIEKLLVTSDGEYVPNLRPYEKALYKTRKLHKALSRKKFLSHSWFKAKIKLARAYEHLKNLRRDMYMKLGKYFAEHYDVVVMEDIHVKQLVDKSYKKMRMRLHDVAFYELRSIMEYQLGKYGKELRFVNPAFTSMTCAKCGYVKKDLTLADRIFVCPKCGWTVDRDYNASLNILRRSGWEPPLVPVELRPLPLVKSQWQGGALKQEASPFRVG

SEQ ID NO: 37121 - protein, 383 aa, Acidianus sp.
MARRKKNPIRATVSMKIGLSDSLLAFVNNYVKALRFSIFWMKENVKDPNEKDTLSRVHEGLYEKLKKDYNLPPKVAEDCYRDALATYKGWYNNPKRGRFPRVYKPTVWLTPKKSYNVDLEKMTVKITSVGELPILGYPRNLKEYANWDMKEARLTIKDGKAFLKVVFEKEKVKIEPKGSVAVDVNMSDIVVGKDDTHYVRIPTRLDDAHHFKSLAENLQKKYPRRWKQNRRILHRIRSFHQKAKRIMEDFARKVGKWVVEIAENLGANVIKLENLKNMIKNVNKLPAEFHDKLYLMQYRRIQYWTEWQAKKHGMIVEYVNPKYSSVSCPKCGKKMTEMAHRYFHCSSCGYENDRDVIAIMNLNGRGSLTPSTAPQMRDVITNR

SEQ ID NO: 37122 - protein, 400 aa, unknown
  TnpB Polypeptide
VLAVLSVRQDYAPPEVLLGLLDVFRRMVNDSTRIGLFNDTSSLRRLSLLAYSQLAGYDSPSYYKLCAISRAAGLLAARKKSIRRGFTNRTPYAVRPLLVSCYGFKIRKGLLEIPVARGRRFAIPLTNHTLQMISRPGVRVRSFTLTPHSLSLCIVREPPEIECIYTMGVDRNLRNLTAGNDREVCRYDLSETVRIAKTTKRIVASFQRDDARIRRLVSSKYGKRRRDRTSQILHNATKAIVAKAVERKEAIVLEDIRGIRRLYRRGNWQGRKHRGKMNGWSFGEAQRQIEYKARWIGLPVIRLSRRETRGSSVTCPRCGERLQSDKRLVRKLWCGNCRIVMDRDKVAAVNLAWRGRVRFARSRPPILLEAQGRAGEAMMGNPMPTVIPGVDAPKLTRLTS

SEQ ID NO: 37123 - protein, 386 aa, unknown
  TnpB Polypeptide
MIRTYKYRLRPNGTQNKLLDQLFWQSRGLYNNALEQRIVTYKESGKGYRYTDQWAYFRDERKSNPDYNLLNATSVQQMLRRLDKAFSAFFRRIKKGENPGFPRFKGYRRFKSVEYRYGDGCKMRHKENGQTRFYIQNVGEIKVVYHRPIPETANIKHVVVKRFNEKWYVCLMMEIPDAPKATHQGGCVGIDMGLKSLLATSDGVLVENPQWLRESQSQLRIAQRKAARRKIGSNRRRKAVQQVAILHEKIANQRKDYWHKVARELANHYSLVALEDLNLKFMNRNKYLALSSYDAGLGMFTKLIAYKVEETGGQLVIVNPAYTSQACSQCGAIVEKSLAVRVHRCPECGLELDRDVNAARNILQKAFVALGLSVQDLTWANAPCVS

SEQ ID NO: 37124 - protein, 538 aa, unknown
  TnpB Polypeptide
LPEPETPVNTVSRRFGISTLTSLRLFTRAPCTRIRSWLSAACGAGDCVSVLVAMLIVSPFLLRRPGVRPPPADAGGGRARRQDSPRPPEDAPAFRPGRKPAPRAARQEKTAARTARLPRFFDHTSDNRTMRTAYKCRAYPDQAQQQALNRTFGCVRVAWNRTLAARQARWHQTGKATLYAESDRALTAMKKDPALAFLTEVPSVPLQQALRHQHAAFTAFYARRARYPRFKTRRSRQSAHYTRRAFSLRGSQLRLAKMTAPLRYAWSWPEVDVTVLDPAMVIISRESDGRWYLTFTVDAAAPEPLPQTGRAVGVDLGVTDFAVTSDGEKIPSPRHLDRRARSLARYQRRLARCQQGSANREKAKLKVARAHRKVRHARADFLHRASTRLVRMADTIIIEDLNVAGMTRNRRLARAISDCGWGEFRRQLAYKCARYGRRLVVIDRWYPSSKTCSGCGHRLAELSLSTRHWTCPSCGARHDRDLNAARNILAAGRAAVRGSPGDACGAGVRHPGSSRVQPAAKQEPRPVTAGIPVLQGGD

SEQ ID NO: 37125 - protein, 402 aa, unknown
  TnpB Polypeptide
MNVITYNVELNPTPETFNYWKKMLVLYAQAYNDCANYIVDKKLPLSIKTVHNKVYDRLRKAYQELPSQAVIRLYKDVIPAFKSIRSNKQKDTETPQKKNLSMRLDKRLYTRVDSDGIVITSEVARKRVKIPFVLYDKVTELLSKYEVSDPTIFIRDNRLYLSIPFSIPTIVTDNDNAVGIDLGIKRLFVTSEGVAFKDKAYLRERRKVRHNKRKLQEKSNKSRTAKKHLKKIKRREVNLSKDMLHRATNAVLESTSASVLVVEDLSKIKTKTSKTKEGFKRTKHNNSFSQVPVREFRDMLAYKAQLHGKRVETVSPTYTSQMDCRTSNRDGNRKGCRYYCSDGIVFDADWNAAANIAIRANHPLSNILPLDGTLKFLNGRAQSIAHTTKDTPFRQAHELIRG

SEQ ID NO: 37126 - protein, 168 aa, Erysipelotrichaceae sp.
MEEASFRMFELAEAKAQDRGHTREECSNLQKQKRKIAHIHEKIYNCRNDHLHKVSSKLVNENQVIALETLNVKGMVRNHHLAKAISDASWSSFVTMLEYKAFEHGCEILRVPTLFPSSQTCSCCGYKNPYVKNLSVRSWVCPECGSVHDRDENAAKNILAKALAMQTA

SEQ ID NO: 37127 - protein, 247 aa, Lactobacillus sp.
MAEPVRWAGQLKTATVVEEADGYYVALVVEVDESVAVKAGHTVTGVDANIARFDYRDATGYQSVSTMSAKLLRLYDRITHYQRLLARKRVANPSNFRSQNYRATRAKLQRDYQKVTRIQMDLLHKFTHQLVQTNDVIVIEDLDNLHMHMNKRLAKNLHRSLFGKFKKLMQYKCAWSGVKLVMVDRFYPSTQRCSQCSFVKTGADRIALEGNRRHHTGHDQYLCYQCGASMRRDQNAVENLIQYAMVN

SEQ ID NO: 37128 - protein, 293 aa, Lactobacillus sp.
MPNHRQPRFKSKKRSRNTFTTDRAQVLNNRLRLDRPRGCTSWYDIRMAESVRWIGQLKTATVVEEADGYYVALAVEVYESVTIKNGHVVTGVDANIARFDYRDATGYQSVSTMTAKLLRLYERITHYQRLLARKRLANPSHFRSHNYCATRAKLQRDYQKVTRIQLDLLHKFTHHLVQANDVVAIEDLDNLHMRMNKHLAKNLHRSLFGRFKEIMQYKCTWNGVKLVMVDRFYPSTQRCSQCTFVKTGADKIALEGNRLHRTGHDQYMCYQCGANMRRDQNAVENLIQYAMVN

SEQ ID NO: 37129 - protein, 200 aa, Gammaproteobacteria sp.
VNSTLSVKRECWYDSAKDDAGFVLSDTGTCSDGTNLEAGRFYRGLEEKLAIAQRARNKTQVKTIHAKIANRRKDALHKFSRELVNRCGEIYVGNVSRLKLVKTKMAKSVLDAGWGQLKTMLDYKCAHAGIVFKEVNEAYTTQTCSHCGSLPESRPKGIAGLGIREWTCSGCGVAHDRDVNAAQNILAVGHGRLAVGIPVL

SEQ ID NO: 37130 - protein, 377 aa, unknown
  TnpB Polypeptide
MRKMFQYRIFPTRKQVHKLNETLEECRWLYNHLLEKRKTASERDSKSLSLYQQQETFSILKQERPTLKAVHSQVLQNVAVRVDLAMKAFFRRCKEHAEKPGFPRFKGYGRYDSFTFPQSGFSITHDTCVCLSKIGTVKMVYHRPIKGKSKTCIIHRSSTGKWYVSFSVECEPERLPDTPEQVGIDVGLKTFATLSTGEEIANPRFFRKEEKALAKVQRNHSKLAKGTPERRKHRKVVARVHERIGFRRDNFTHQHSRQLVNSYGVICVEDLQVNRMTHNHCLAKSIADASWSAFFSQLSAKAEEAGRQFIKVNPAYTSQTCSTCGHRQQMPLDVRVFDCPCCHVQLDRDLNAAINICGLGLQALGLSVEAPAFMHGE

SEQ ID NO: 37131 - protein, 399 aa, Exiguobacterium sp.
MERNVLVSKLLSRDDRRCDKRRHQTLYRKTRKGVIALLKAYKFRLYPTKPQQEYFVKTFGCVRFVYNKMLEERIRLYEDSKLNPDAKQKLPTPAKYKPEFPFLKEVDSLSLANAQMHLNKAYTNFFRDNSVGFPKFKSKHNDRASYTTNNLKGSIRIEDRKVKLPKIGFVMLKQHRPFDGVIKSATVSMTKTRKFFISILVDQAEAQWVPAQNKVGIDLGLEHFAIMTNDERVSEKVDNPRFLRKSEEKIKKAQRALSRKEIGSKNREKARIILAKKHEKIAHQRQDFLHKLSKRMVDDNQVIVVETLKSKNMMKNHKIAKSIGDVSWYGFVRQLEYKCAFYGRTLIKADQWYASTQICSSCGVKGEKKTIDVREWTCTCGAHHDRDINASINLLLLAD

SEQ ID NO: 37132 - protein, 171 aa, Natranaerobius sp.
MGVDLGLKAPAVSVTSTGKTKFIGNGRPNKYIRRKYKSKRSELGQAKKLNASKTLNDKEQRWMKDQDHKISRKVVDFSNIRNTARTSRKNEKNLHTWSFYRLALFIEYKAKLRGIAVEYVDPKYTSQTCPICRNRNHVKDRNYQCSCGFKTHRDRVAGMNIIHAPVIDGVA

SEQ ID NO: 37133 - protein, 405 aa, Streptomyces sp.
MRLRYSFRLYPSAGQRTALARAFGCARVVFNDALRVREEARAAGLPFVPSGELSKQLTASKKTFERAWLGEVSSVILQQSLRDLDTAYKNFFDGLKGKRPKTGPPRFKSRKDNRQSIRFTANASWRITTGGKLRLPKVGDVPVRWSRALPSTPSTVTVIKDAADRYLASFVVETEPTEAPPEVDAEVGMDLGLGHFAVLSDGTKVDSPRFPRRAEKRLKKAQRELSRKQRGSANRGKARVKVARAHARVADARREFHHQLSTKLIRDNQAIAVEDLAVKGLARTRLAKSVHDAGWSAFVNMLEYKAARYGRTFVRIGRFEPTSQVCSQCGVQDGPKPLGVRVWTCGECGAVLDRDVNAAVNVAKAAGLAVTACGAQVRPVPVPAQRGEAGTRRDPRLRVAGTPVL

SEQ ID NO: 37134 - protein, 368 aa, unknown
  TnpB Polypeptide
MKLTLQIKLLPTDKQAKSLIETLKECNKVCNEISDVAWQNRTFNQFKLHRLVYRKIKDTSNLSAQALVRCISKVADAYKLDKKKKRVFKPLGAITYDARILSYSIERQEVSIWSIDGRLKMPFICHNPKYLPYIKGEADLVYKKGKFYLFQTVEVPEDDVKDVEEFIGVDFGITNIATLSDGTQYGSEALQKVRDKYFKVRRSVSRKGTKGSKKLLRRLKGREQRHASIINHTIAKQIVEKAKSLNAGIAIEDLTYIRERTTVRKAQRRRHHSWAFAQLRSFLEYKAKLAGIPLVVVNPEYTSKTCNVCKTIGNRNGKHFSCPNCGNVTDADYNAALNIAQLGALCKQPRKDVNMLNFSSHVPLKLTA

SEQ ID NO: 37135 - protein, 205 aa, unknown
  TnpB Polypeptide
VSVLVETEYAEMPHKNKSIGLDLGIKDLCITSDGKKYENPKTTRKYERKLVKLQRQLAHKEKGSGNYYKKKRQIALCHEKITNTRKDYLHKVSQEIISENQVIVSENLQIKNMVKNHHLAKSISDVSWYELTRQLEYKAAWNGKQYIRINTFYASSQICSDCGYQNVDTKDLSVREWICPICGAKHDRDINAARNILAEGLRQIA

SEQ ID NO: 37136 - protein, 272 aa, unknown
  TnpB Polypeptide
MAKMCMCMRIQSISLSLKRWASPLRSSCIVRWKELPRRCIWSCVRIPIGTLSLCVRRSNTRNIFPRCVNILLSVKKDVGLTSFLTDSEGNTIKNPRFYRTSQKTLRRKQRVLCRRKKGSHRRHKAARNAAKTHLKITRQRRDHHFKTAKPYAEGYHHIAVEDLQITNMVKNHHVAKSIMDASWGQFLAILEAKAASAGHQVIRVNPRFTSQQCSKCGEIVQKSLSVRTHSCPCCVTPVKGHHLSGEQSPTSSGNGSMPNVSLTPERRVRTRV

SEQ ID NO: 37137 - protein, 586 aa, unknown
  TnpB Polypeptide
VKKTRHPVTGAEQATAVTTLRIRARIHPSDHDRAVLTALGEHFSVLLGKDLAARCRAGKAHDKTMWAERKQALTKGCSSRWAGWVTKSSNDAYATARRNQRRELADKRAAVAAIEEKLRLPIASTAERKALVARERDLAKTENRKPRRLSFGYHSRNEHAMKRQRLGVLQAHCARLERDLAAGRVQVTRGGKKLLGNRLHLEEAGLTVAQWRTRWHAARLSFGANGEANKLLGNEAIRLFPDGTLEVDLPAQLAHLANVTARGTTRYRLDAKVAFSYRRDEWLAQVEANRACSYDVMFSENGRVYLDASFTPAELPNVGELDELLADPELRVLAVDLNAGFLAPAVLDRSGNPVALLDHVPLVTEGMSAPTRDGHLRQCVTTLLDVAEVHGCRLLAVENLGFAALRATARERYGANRRFRRTVCAIPTAQFRDRLVAMASRRAIAVVGVPAAYSSIWGAEHWQAPLSTKQHKVSRHTAAAVVLGRRALGHSARRRHLHAAVPGVTAPDRRIEAAATGEPVRSAAGAASYHADGNREPSARHQATGRPQRREGDHQTRSANTGPPGARPAKTVRAGPLGEGSLSLSV

SEQ ID NO: 37138 - protein, 300 aa, Streptomyces sp.
MAIDIPQGRDLQIVRLNRRWGRMWAPKIGHVHFRWTKDLPVGKRVGKLNKVTGARLVRESDGWHVVFRVQAEVVDPTPHTGPTVGIDRGIAKPLAPSDGTFREHGPWLTPGETKRLRRLEKASARKRHARKKGEKTSRRLARVYNQIAQLRAKAKRRAADWQHKTTTGIAETFSRAGVEDLAITGMVKSVKGTMEAPGRNVRQKAGLDRSIAGEAWGRTVTLLEYKMADRGGTVVKVPAPNTSRRCSACGFITPGSREIQAKFACKNPDCGFVDHADTNAARNIDHAAGLAVSGLLSPRQ

SEQ ID NO: 37139 - protein, 301 aa, unknown
  TnpB Polypeptide
VKVPKLGEVKFRHSGNKKGKLDFFLVAGANLKSITIRKNPAGEYFAVLLYEREYNYSKKIYENDENQAIGLDFSPADFYIDSDGSSGKDFGYVVQKQANLKKLTKLQRQLMRKQVGSNNREKARVKVARMEHYIAECRNDWIEKETKRLVSTYQVIGIEDLNLKGMMKFSKNAKNYGDAAWGTFVNKLLWKASLNENNCQVVKADRFFASSQICHCCGFKNPITKNLKVRSWICPECGAEHIRDVNAAINLKMNAIKNVGQGVSEFRSVEGVEDLATLALQIGASEEAENLTGDGQNVLTL

SEQ ID NO: 37140 - protein, 325 aa, unknown
  TnpB Polypeptide
MIVKKSLKIPIHYNTTKSKQDILDNLTARITYCIRLISGLIIEEMKIDRPTVRKLVKDNDISSKTGLSAGFIDQCIDKVIWSWKSYRKHHIQWELKAEKAESRVSSARDEKELAKTKKSLEKLLRREPSRPDFKNKIPCRIDYRTGKVQRSKSKLTPLWIHISTLKKGNTIDIPLNPAQYHLNQLKDAEIGDFEIIKKNKKYYIHISITKVVEDKPISSIGGINRGLNKSIAAVLLTEPFPQEEQLLDSAKRELLEKYDDIISSLQEAQKWNKLRELRNKRENVSIHDYGGKIDADINAGYNIAIQCRDDRLKMQMNMEKTHASA

SEQ ID NO: 37141 - protein, 394 aa, unknown
  TnpB Polypeptide
MKTMRVYRLKNLSKSQFSRLKAAQQEAAAVWNECMETHKAARQSLAKWPGRNALQKATKGRYELHSQSIQMVVHTFLANVETTQQLRKTFPHMKMRYPYKTKRFYPVSWPAQAISRERGRVVLPMGKGRKSLVLPLDLPETSRSCTLVWNNGFELHVCVEIPQAENAPGEVHATIDLGEIHLAAVTTNTGKALIVTGRGIRTLKHHRSKQLGQLAKKQSRCQKYSRRWKKLHRAKNKQCRRAERRIHNQRHQATHQVVNFCVEHEVGALFIGNPHGVRNHDHGTHHNQRMSLWEYGRDIDYLTHKSKQAHMSSFTGSERGTSSQCPACGHKHKPRNRQWNCKQCGFKGHRDLVGSVNMHRLAFGEQIEFPRSFTYLRPSSLGKVVVGQTRLSVV

SEQ ID NO: 37142 - protein, 300 aa, Proteobacteria sp.
MPYDQRIMRFAGLDQVSLLTLQGRVLVAFLIGPYHRQRFDAHEPRQCHLAVRGDGQWFLLVVVKVPEGTPIPPTDFLGGDLGVVNLATPSDGTTHSGERIEACRTRYATYRQRLQRAATVAQMDGKRPKNMRRALQRTARREARFRRDTNHGISKTLVAAAQGNEYGIALEDLTALRTRTRFRKPQRARMAGWAFAQLRFFVEYKARLAGIPVVLVDPRNTSRQCRACGHISTANRPSQARFSCKQCGYTAHADCNAAVNIRSRARVNAPLVAGRVPQQLWLLAGVGASDKLRHFSASSH

SEQ ID NO: 37143 - protein, 378 aa, Proteobacteria sp.
MVKTMQYRLKPTKAQATQLDSQLEECRCLYNHFLAVRRDAWEERQESLTYHKQALTLPALKEGCADLSRVHSQVLQNVAVRIDLAFKAFLRRCKAGDKEPGYPRFRGYGRYHSMTFPQYGNGCQMVEGMLKLSKVGALRVVEHRPLEGTPKTCTIRHSPTGKWFVTIVCDIDAQPLPTMGAAVGIAVGLLSFSTLSTGEQTPCPKFMRTDEKDLKRTQRQLAAATKGTSARSKRRRIVARVHERMVNRRTNFAHQESHRVVKRYDVIAVEDVSVNQMVHHRCLAKSIQDAAWSQFATFVSYKAAWAGRTFVAVNPAYTSQDCSSCGHRQKKTLAERPHACVCCGVTLDRDHNAALNILRLGLQSLGLVPRSSAVHGGE

SEQ ID NO: 37144 - protein, 357 aa, unknown
  TnpB Polypeptide
LWYRQLPSQTAQETCKQLDKAWKSFYVLKKTGGIKEPNPPRFKQDNIPVTYMQMGIRHEKGSDQLRLSLPKDLKSYMEETYGIHEKFLYLENKIFRNMDRIKQLRIYPPKNEKCDLIVIYEIEEPEQLSQKGHYLSIDLGLHNLMTCYDSGNGRTFILGRKYLSLERYFHKEIARVQSVWYAQQSKKGIKYPKSSKHIQRLYRKKQNAVKDYFHKVTRWIAEYCRKEDIHCVVVGDIRNIRKEKDMGHKTNQKFHGLPYDRLYIMLDYKLKLYGIQLIKQEESYTSQCSPLSSEVSKRYAEASNRKERGMYITNGVRFNADAIGAFNILRKYLSVSGKQKKLSITGLKNPEIIKVAV

SEQ ID NO: 37145 - protein, 392 aa, unknown
  TnpB Polypeptide
MSRYRLEPTASQEAVLRDHCAHARFIWNLAVEQQSWWRPGRRSAPGYLEQARQLTAARAEYGWLRAGSQMVQQQALRDFAQALANFFVGTHRRPTWRKAGRDEGFRIVAVKPAHVRRLSRNTGEVWIPKAGWVRLRWSRAVPEGVKSHRVSLDRAGRWHIAFAAIPEAIPAPGTGEVVGVDRGIAVSAALSTGQMLTVPRPSLARQRRFRRLQRKLARARGGSNRRARVKLAIAKLRAREADARKDWAEKTSTDLARRFDVIRVEDLNIRGMTRSAKGTITEPGRNVRAKAGLNREIMRSGWGLLVRRLQDKAPGRVEKVNPAFTSQRCSACGHIAAGSRESQALFCCVACGHACNADVNAARNIAAGHAVTARGGDGTTRPVNREPQLLAS

SEQ ID NO: 37146 - protein, 625 aa, Micromonospora sp.
VFAERVGWLADLVRGMADVVIGAHWSEAALAVLAAGVGPDGRRLPASGWMAVRRLGWGAVAPAGVVVSDRVRRIAEEEAARALRLACHRRAVVAALLATWPADPFARTAEEWSALRAALPEGCDNATIRNRTRQISGYVKVCGRLPADVCELEGPPAAARQVSLAAADRQQVVVDWVDDTIIRVWSQLPVCAAPASYRDWVWHAFDVALPATVPAGVTVCSPTLRPGVGRVRVDLSWRTPHTRPPVDGHTRGLGADWGVKTLLTATVADLDRDGCVVVDGRPLRFDATGVSAKLVRLRRHREHLKTKADHLALLRDGRPTHPDPALTGKLARLEAEHAAVCARIRHLNKAVAWSAARWLVDHATGHGATVIYVEDLATLEAGGRSRSLNRRISGAVRGTVFTAIAHLAAKADIAVVTVPARGTSSGCPRCGGPVKHVTAPDRRAAGCRWATCSCGLSLDRDHAAAQRIAARGLTNQTKTRRDRNGNAAIRTATDTPVRRRTRRPTPAATSRPVRDRRKTAPTRKQTRPATVKTSCLLPLRRQVPAPTVPSARSAGKCPAGRTPQETNPSGPGRQVPHTVPTTTPRNPHRVRGALLGRGFHRHVYATPITHPGGGTDGMPGSLRIT

SEQ ID NO: 37147 - protein, 398 aa, Clostridiales sp.
MCYAAYKLWNVCNYERIHYEELGLPVDYPDWYYQKSAHKDDMWFKQLPSQTAQEVCKLLDKSWKSFYKLKRTGGIQNPQPPRFKNSGIAITYMQNGISHEADSDTVRLSVPKQLKIFMSDTYGISDNYLFLKNPIFKDTDTIKQIKLYPPEKGECSIIVIYEIPDVTKLPDNGNQLSIDLGLHNLMTCYNSASGETFIAGRKYLATCSYFNKEIARVQSQWSLQQSKHGIRYPKPSKHILRLYKKKADSINDYLHKVTRQIVNYCKENNICTVVIGDITNIRRDNDLGAVTNQKLHSLPYHKLYIMLEYKLAKEGISFHKQSEQYTSQTSPLKPCVTKENANKSNRVERGLYKDGIYTWNADCVGAYNILRKYREENNIDIETDPMHIKTPFILKVAV

SEQ ID NO: 37148 - protein, 555 aa, unknown
  TnpB Polypeptide
MITLQCRLEFKTSEDEKEVLEFMQNFSSCVRYAYNRLLEGAGRKELKKHLQSVFPLNSRYCDDAIMKANEVLKSCKERGQNPKKVIFGTRKLFEKLKKKHLTGKRKEKLKKEWKEKRQGTAYSRGDKSKKGNLNLRFVLIDGKLYLRINTGKGRYVYAEVHRNVQKGRAERDKWVNFIENLLIGETTGKHVPYSVELKKRNGKTYAFISFEEKIPEISITRMNGVIGIDVNASPFHIAYAEVKEDGNLKSFGRISLEELIGKSRGEREILSWKVAHEIVNLAKEKKRAIAIEDIKKLPRGNRGDGRKKLRKRFQQFIYKGILQKIEVLAKREGIEVVKVNPAFTSVIGQLKYAPQYLLDKDVAGAFVIGRRGIGFKEEIPENYLKLLKKEEFLNYSLYRLEEKKKELKEKLEEETNKWKRKALKGELKRINSDIKDIKKEIKTLESSGSDSATRQQTSGGNKSVRGLSKERRKSWRVLRAVLTFPLLGKFFVRDFSPLKSVLISGDWERVVKGLVPVPGAGAMDTLKKPPAGGSGYPEEAEYKYPSRNCTNVQFC

SEQ ID NO: 37149 - protein, 427 aa, unknown
  TnpB Polypeptide
MHQENTMLPRRISVSLFIDQSIIWPVKRLQAFKFQLRPGGQQEREMRRFAGACRFVFNRALARQNENHEAGNKYIPYGKMASWLVEWKNATETQWLKDSPSQPLQQSLKGLERAYKNFFRKRAAFPRFKKRGQNDAFRYPQGVKLDQENSRIFLPKLGWMRYRNSRQVTGVVKNVTVSQSCGKWYISIQTESEVSTPVHPSASMVGLDAGVAKLATLSDGTVFEPVNSFQKNQKTLARLQRQLSRRVKFSNNWQKQKRKIQRLHSRIANIRRDYLHKVTTTVSKNHAMIVIEDLKVSNMSKSAAGTVSQPGRNVRAKSGLNRSILDQGWYEMRRQLEYKQLWRGGQVLAVPPAYTSQRCACCGHTAKENRLSQSKFRCQVCGYTANADVNGARNILAAGHAVLACGEMVQSGRSLKQEPTEMIQATA

SEQ ID NO: 37150 - protein, 147 aa, unknown
  TnpB Polypeptide
MQKGSNNRNKQRLKVARLHEKVSNQRKDFLHKQSRQITNAYDCVCIEDLDMKAMSRLLNLGKSVSDNGWGMFTTFLRYKLEEQGKKLVKVDRFFASSQTCSVCGYKNAKTKNLAIREWDCPQCGTHHDRDVNAAVNIRNEGMRLVNA

SEQ ID NO: 37151 - protein, 356 aa, unknown
  TnpB Polypeptide
MKGAFLFWCWEMEGMFDLERMFLTVDGILLYTGEYEPDLQEQSRRVLELSIPCGLVSNRAEKGIHPGNRGAFESHHRAGVPRASNSKLSNKNMSKRARPNKAQQPTKTYLFRLYPTSKQVRRLEEWLGLCCEVYNAALDERKSAYRMAGVSLSFENQCAELPGCKEVRPELVSVPSQVLQDVVKRVDLAFDAFFRRIEEGEKPGYPRFKPRFRYHSLTFKQYGNSFHVLPDTKKKRGTLVLAKLGHVKMVMHQAIKGTPKTAIVKRTPTGKWFVAINVELADQEVQEKRLSPSEEAVGIDVGLHTFAYLSTGQAIANPRFFRAEEAALARAQRKLAQAPKKEQATREETQGGGTHS

SEQ ID NO: 37152 - protein, 430 aa, Lechevalieria sp.
VIRAYKFLLRPTLRQQHALCEMLRDHCSLYNAALQERRDAYRHVSKTHIRYGDQSVQLKEIRAFDPERQGRWSFSSQQATLRRLDKAFAAFFRRVRTGRKPGYPRFKGVGHFDTVMFPKDGDGCRWDSTPHNRQTRVRMQGIGHIRVHQHRSVQGRVKTISIKRESARWYVVLACDAVPADPLPATGRQMGIDMGITHFLTTSEGVHVENPEYGKKTAAALAAAQRTLVTFPRRSKGRSKAHRAAARKVAMLHAKARRQRLDFAHKAANFVIRDADVIAHERLNITSMTRAPKAKPDLGNAGAFLPNGAAAKAGLNRSILDAGWGIFLNILANKAESAGRRVIQVDARNTSRTCPDPTCGHVTADNRDGEAFACVKCGLIEHADRVGAININHRAGLALCAVAVQPPKQEADDFSHGRSHPDNHSMAKHG

SEQ ID NO: 37153 - protein, 367 aa, unknown
  TnpB Polypeptide
MLKAYKYRIYPNKIQQEQIAKTFGCCRFVYNQTLAYRKDAYEKEKKSNSRTDCNNYCNRELKKKYEWLKEVDKFSLTNAIYNMDAAYQKFFKEHAGYPKFKSKHDNHKSYTTNFTNGNIAVDFVYGKIKLPKLKEVKAKVHRKFDGRIKSATVSQVPSGKYYVSVLVETNHSQMEHTDKNIGLDLGIKDLCITSDGEKYENPKTIRKYEKSLAKLQRKLAHKEKRSRNYYKQKKKIALCHEKMKNARKDYLHKVSHKMIRENQVIVSENLQIKNMVKNHHLAKSISDVSWYELTRQLEYKAAWNGRNYIKVDRFYASSQICCVCGYQNASTKDLSVREWSCPVCGTEHDRDINAAKNILAEGLQRTA

SEQ ID NO: 37154 - protein, 402 aa, unknown
  TnpB Polypeptide
MLITHKFRLYPGRKEEARLLETKELCRQMYNKLLFELNEQKVIDKSMIQGTIPEIKICEPRFKRVHSKTLQYENYRLFSNLSALAKTKGKRKVGRLRYKGKGWFKSFTYNQTGFKLIKDNTKLHLSKIGDIKIKCHRKILGKIKQIIIKREASGKWYANLCEERKVTIPKKTKISKVVGIDVGLIDLTFDSDNTNIPNPRILKSQEAKLKKLHRQLSKKKKGSLNRYKSKQKLAVAYEKLGRCRIDRDHKISRYYVDNYDAIGMEDLVVSNMVQNKHLSKSISDVSWGRLRQFITYKAENAGKYAVTVNSRGTSQRCSNCGITVPKGLHQRQHQCSNCGLDINRDYNSALEIRKLTINKLRQELPEVTLVEIPLSGNQNVFDSRYVSMKQEATSLNFGETKC

SEQ ID NO: 37155 - protein, 427 aa, unknown
  TnpB Polypeptide
MITTRRVNYRLYPSRQQEETLHYWRKMHCSLYNAAVYNRKTQYQKFGHKVNYLEQQNCLPAFKEVWTEYKQLGSHALQATLKRVDLAFNKFLNGLGGYPKFKASRRYRGWTYPCTSGWKARTNGDNSRLEISNLGSIPMRGKARTWGTPTTCTIVFQQGKWYASITVNCQPVRQAGEGVIGIDLGCKDAISLSTREKIAKPDFIREGLKKVRVASKKLRRKRAPNRNRRIKASRRWKRQRNAVSKLQRKVARQRSNWLHQTTSSIVSAHSLVAGEQLNVKGMTSKGKTKKRQKAGLNRSILDVGFGMIGSMLAYKLAEAGGFYVESPTRTLKPTQRCVKCWELTPKTLAERMHICSNPACGHIEDRDINSAQVNETWARGLEQSSLNAESASSTACGSMRQLAAKKREKRLTASLSGETPRSACGGE

SEQ ID NO: 37156 - protein, 243 aa, unknown
  TnpB Polypeptide
LDRQVRQADLVLRNNVFYLAAVIDAPEATPFEAKDFLGVDLGVRNIAVDSDGDAYSGGQLNGLRNRHSKLRARLQSKGTKSAKGLLKKRSGKEARFARNVNHAIAKSLVAKVKDTGRGIALEDLKGIRGRTTVRGKHQRRVHGSWSFNQLRNFIEYKAKLMGVPVVLIDSHNTSRTCPSCSYIDGANRKRELFHCQLCGYAGVANQVTAVNIGRVAVNRPHVSELDQMFSPPGTSPHPSGVGS

SEQ ID NO: 37157 - protein, 372 aa, Mycobacterium sp.
MQLRYVFRLYPTAGQRQALARAFGCARVVYNDALRAREDARAAGLPFVRAAELSAAMTAAKKTPQRRWLGEVSSVVLQQSLRDLEAAYQAFFDGLAGKRPRMGPPKFKSRKDARQAIRFTANARWRITQGGRLALPKVGDVAVRWSRRLPCTPSTVTVVKDAAGRFFCSFVVETDGVQDPPGTTAEVGIDLGLEHFAVLSDGRKITSPRFLRRAEKKLRKAQQALSRKQKGSVNRGKARLRVARAHAKVADARREFHHRLSTELARDNQAVYVETLCVKGLARTRLAKSVHDAGWSAFVGMLEYKTRRYGRGFARVDRAFPSSQICSRCGHRDGPKALDVRHWTCRQCRTRHDRDVNAARNILDEGRRIAPG

SEQ ID NO: 37158 - protein, 400 aa, unknown
  TnpB Polypeptide
MTVRKVAQRIPFKPSKTQSALLERCFGDRRFAYNRQVEAFNTFDKENNSKPVYPNVTDMKRANEWLRDSPIPSNALSNAIMDFRKARAAYFRKSEYARNRPRFASRHDNVQSFRNTMPIRRMDGDRYPLSRKLGSVRIRKRDKLRYPIESLSSWTVKRENRTYYLVLLFDVDIQPKPPVEGQIGIDVGVKDLITLSTGEKIDYPDRLRRLEVNVRREQRKLSRRRKGSSNYRKQRQVVAEAYARLRHYREDFQHQTSRRLIEENQFIGMETLMVRNMTRRARRKLDADGKPMRNGQSRKRAMNHAILQDGWRGLMDKLAYKAEWYGRTFVQVDRFYPSSRLCHDCGRKYAGLRLSEREWVCEHCGAWHDRDVNAALNIRDEALRISQTTHNVKEPTDNRG

SEQ ID NO: 37159 - protein, 297 aa, Brasilonema sp.
MLVFEAKLEGTKEQYGKLDEAIRTARFVRNSCIRYWMDNKDIGRYELSAYCAVLAKEFEWANNLNSMARQASAERAWSAISRFYDACKKNKPGKKGYPRFKKEQTHGSVEYKTSGWVLSSDRRYITFSDGFEAGTFKMWGTRDLHFYQLKQFKRVRVVRRADGYYCQFCIDQERQEKREPTLKTVGIDVGLNHFYTDSDGQTVANPRHLRKSEKSLKRFSRCMSKTQKGSKNRAKFRNKLARKHLKVSRQRKDFAIKTARCVVMSNDLVAYVSEAARQRGLEGAKYGSPARWAGSPT

SEQ ID NO: 37160 - protein, 358 aa, Alkalibacterium sp.
MSQPITVKIKLLPTKEQEAILTRMSDEYISTINSLVAEMVEERKPTRKTSKDMDAFLPSAVKSQAVLDAKSVFKKAKKTNFETVPLLKKHHCVWNNQNYSFDFHHISMPIMINGGAKKTPIRALLVDKKNRNVDLLKHKLGTLRITKKSNKWLAQIAVTISTDKKTGTKVMGVDLGLKVPAFAITDDEHVRFFGNGRQNKYMKRKFRSERKALGKRKKLNGIRNSKDKEQRWMKDHDHKVSRAIVDFAKGNHISVIRLEKLANIRQTARTSRKNEKNLHTWSFYRLATFIEYKATLEGIQVEYVNPAHTSQTCPNCSERNKARDRKYQCSCGFEKHRDVVGAMNIRYAPVVDGYSQPA

SEQ ID NO: 37161 - protein, 415 aa, Moorea sp.
VSYQVYPSKELEKIWKKWISAVRKVYNISIEQLNKNQGYTKVGKKGGKHGFRTWLKQSGLIPQWCKDLNVSKILDNASMEAYAAWKKTAKQPLFIGFGKKRQPNSQAGLKIAKFRSVREQRQTIQFDPTAYKAGRWMVSTTKHLPKPEFKGQDFCLLTDGSTELTYNKGRWFAHFPVEFDLEPTETKKVITLDPGVRTFMTGFDGNEFLEFGNNDFQRIAKLCSHLDKIKSEHDLSKGHIYKHRRYKLKVAMERLRTKIRNLRTELHKQVASYLAKNYDVIVLPTFETSQMVVKKKRKLKSKTARAMMTWAFYQFSQVLEHLCNRYGSKLVRITEEYTSKTCTKCGHVHRKLGSFLNFRCPRCEYEIPRDFNGAVGIFLKAMWDTTFLDSVGDVVLSFSDSKDVLDLQDVQICPG

SEQ ID NO: 37162 - protein, 532 aa, Chlamydiae sp.
MKSKQVTYQTRIKADAKLDEILTMYSTHLSMVCRNLFKDLISNKKINELKKEYIKKYKITARQFNSCRLEVEGKIKSYNELRKNRISSLKQKIKFLEKKIPKYKNLKKIHQKKRRLFNLKTKLQNLEKETKPKLCFGSKKLFNKQFYLEENGFKNHLDWKKTWQENRNNSFFLVGSKDESSGNQTCQIQKKDKKFSITLRLPNKLSNIGKTIIIDDITFSYDKTKIIACIENNLKRKVLQKQKNLSYKLFGQSICYRFKKDKKGWRIFITLDLFEPLWISKKENGVIGIDINSDHLAVVETDRFFNPINSKRVPLNLYGKNKNQALAIIGDASAKIVKDSITSKKPIVLEKLDFQRKKTTLKEANTKHSRMLSSFSYNAIINTIKSKAFRSQIEIFEVNPAYTSVIGRVKFAKRYGLSTHLAAALVIGRRSMKCSENPPRSLVKIPDKKGSMRAFFLPVRNRKKHLWSFWGKVFGILKAVDAPHFQATNSRSSNTPLPIEIEILENCERNSHTLTVDKTARSTSLKKSLLHV

SEQ ID NO: 37163 - protein, 495 aa, Anaerolineae sp.
MRFAFKRLLEGKEESEVLKEFPSLFNLNSRYAYGALVEAKMTIASLKELGQSPKKVVFGGRKLFEELAKKHLSGKRRDELLEKWRERRQGLLFSVGQKHAKGNKNLRLVWVDGCLYLRINVGEREWVYAKVIRRVKRDRDKWKVLLARLMRAEATGDLFPYTVTLRRKEGKLYAFISFEEELPPVSITKAQGVIGLDLNAVPQHVALAEASSDGNLVSHGAVPIPDLSGKPRKVRDYILWLTAWQIVRLAKERGKAIALERLRHMPKGERGDGKPALRRKLGNWAYRSLLEKVKILARREGIEVVEVSPAYTSVIGALKYAPQHLLDKDRAAALVIARRALGFEEKMPKHYGRLLGDGEFLGYAVSYWEEKVEELRARKREEKNKWKGNAVRKDLEKAKKSLQLLRESVGGEPVGATYQVAPSQETADRWKEPVREKGWQVAYAALAEPILGGSFRDLSPLRPVLVLGEWERPARRLAPDLVQGRDYQHYRGRPG

SEQ ID NO: 37164 - protein, 459 aa, Mycobacterium sp.
MAKFEVPEGWTVQAFRFTLDPTREQAADLARHFGARRKAYNWTVAKLKADIEAWHATGAESEKPSLRMLRKRWNTVKDGVCVNAETGQVWWSECSKEAYADGISGAVHGYWNWQASRSGKRAGRRMGFPRFKKKGHDPDRVSFTTGAMRVEPDRRHLTLPVIGTVRTHENTRRIERLIAKGRARVLAITVRRNGTRLDASVRVLVQRPLQPKVADPLSRVGIDVGVRRLATVANEDGTVLQQVPNPRPLDAALHKLRHVSRARSRCSKGSRRYGERSTKISRLHRRVNDIRTHHLHVLTTRLAKTHGRIVVEGLDAAGMLRQKGLPGARARRRGLSDAALGTPRRHLSYKTGWYGSALVVVDRWFPSSKTCHGCGHVQDVGWDEKWRCDHCSVIHQRDDNAAVNLARYEQTPSVVGPVGAAVKRGADPKTGLGPAGGREARKGRSPKAAEQPRDGVRVA

SEQ ID NO: 37165 - protein, 443 aa, Halobacteriales sp.
LFEWLAAHAPLWNQITYRRRQQYFDEDGDIWDAEYTDLYDQYAPILGKATCQQLARKNAEAWRSHFELLSLYRDGSNQLVTEKPSPPGYWGTREDGYELHGLVRNDLYTFDWNEQRSVLDFGVGDVLEDRYGFDYNERLTLEVRGDPQWRGDDSRLELIYDEHTDQLRVQHPVRIHPVNLRQQRADAFTHTLDSENTTQSAAIDVGANNTLAVVTEDGDTAVYHARPEFKRFQKQSERIATLHSELPDEQHTSKQIQRVYETRSRQRTHSRDAAVKHAAEWLLERNVDTVYVGELTNVLSTHWCADVNEKTHAFWSHRQLVERIHLTLGDVGITVTETGESESSSECPECRSDSVTRDGDSFRCDACDLEAHADVVGAWNMLQSEVGPMARPAALSAERGRDASTGGAYWQWDDHGWIPAGDGEQSCSLDQPSISKPASSQPG

SEQ ID NO: 37166 - protein, 433 aa, unknown
  TnpB Polypeptide
MSATIISDESMAVKFKIEITSQQEEYFKNCFSYMREISFWLHEKIKDRQISKLSSFSLVFSNGDEVSDRQFKYLPEIKQIIEKYFGSEVYGANIDAINWSVVRMYKSYIGRNSKKMKNAISIRPKSFATKANVFQFDKENNVLLMQKVEKDKSESHLSFNITECTYSNSNLLSFTRKKFPNKSNPQGGILCLKNNQLVLLAKMEVEYPIAEKTIGIDINKSNDNWLAWSEKIPSTGEKRLPKPTNVFEIEQNIKALQKKITGKDESDILNSRKRKGVRKKWTKAHNKHAMQVELIVNKILDEFKDVYGEFNVGIDTVATTHGSFGNDKVIAAIANWCKANKRAYIYVPTPNTSRRCSECGQVSRSARQLNIYTCKTCSHVEQADENAAKNIELFADAIIGNGFRMIGTLKSSYKWSLMRFLNDFFKLKDNVTA

SEQ ID NO: 37167 - protein, 643 aa, unknown
  TnpB Polypeptide
MKEKPPDGFFKCVKVPIKHIIKHPEINIPKITETAIIANKIVIHTLQFMKLYLLDYYNKNNKLPVIDKTFINTCIKVQCEENKGGRPASKKVQNLKDKLNTFYRKEYKPLIQYETLSYKYMNTILDYLTIDILTMYENNIKLHYVEYLERYVNIVWKKKELIKIIRKRFTLTTRQKNNKIRKLTTELRKIKNDLLNVDEKKYKSKSFYHSWIDKNKKILLPDKKEFKKNNLYYDIQCLPQDYLPSMVFMMKEIEKAEYSIKNVFPMRNEMVPKHIRLDTTTLVHLLMTKKQGKKSDYLFKGNLKRNEDKIWSFFFRTERQCFKKKWYSFHHMVETDGVSCSIIFVRKDKVGKRVKQPKIKNKELYIDEVKVKNKKIVAIDPGKCDLIFCVNGSDKKANTFRYSQDKRRNETASKKYGKLLLGLKDKKVIELETELSKFNRKTLIYENFMQYVKKKNEINKKLFRFYKQFIFRKLKLNGYLNRLRSEQRLINTFGKIFGKDVIVCFGDYEQKKHMKFKEPVKGRGFRKLFRKNGFETYLVDEFRTSCKCAKCEGGDCKKFMVRENPKPFRNNLRLVHGLLSCKNCANVWNRDCNGATNIYKIALNSINKKERPDYLCRSKKSGVLDDTSKPKFTRPETGKPCLI

SEQ ID NO: 37168 - protein, 389 aa, unknown
  TnpB Polypeptide
MLKAFKYRIYPNQKQIQMFEEHFGATRFVYNWGLEKKTTAYQQESKSLSCFDLINQLKELKENELWLKEVNSQTLQASLRNLDNAYTKFFREKKGFPKFKSRHNPKQSFQCPQFCSVDWENSTLSIPKIKNIKIKLHRKFEGQIKTTTISKSATGNYYVSILVENGVTLPNKAELDANKAVGIDVGLSRFLTVSDGMIVENPRFLKKSSDRLAYEQYRFSKMKKGSAGRAKQKQRIARLHEHVSNQRRDFLHKVTTKLVGESQATTFCIEDLAVKNMQKNHCLAKAIADVSWGMFFDFLKYKCDWNGKNLLDIGRFEPSSKMCSACGTVNKELKLTDREWTCSCGIKHDRDLNASENIKKMAFQRQNIIRCIGLEQPELTQVDTVAIAT

SEQ ID NO: 37169 - protein, 394 aa, unknown
  TnpB Polypeptide
MLKSIKFRLYPNENQQELLEKQFGYCRFIYNWALDYSNWEYKTNKTTTFKKDWESKLPDLKLYLPWLKEANSQSLQHELRHLEDAYKRFYKKLGGFPKFKSKYDKQSFHVPQNFKIENVLLTIPKIKNISLVVSKDLSQFDLRSMTISKTKTGKYFVSVLYDDRSEAPEKKEIKKESSLGIDLGIKDFCILSNGTKINNPKFLEHNQKRLRRLQQSFSRKKKDSSNRSKAKQQVVLLHEKISNQRSDFLHKTSSLICESQEVNTVCVEDLNVKGMMKNHKLAKSISSVSWSEFVRQLTYKSEWNGKNLLKCNRFDPSSKVCNECGLIKEDLKLSNRYWICPCGASIDRDLNASKNVRDFALNKLYSEDTENFKSVERKDRINSESVSMKQKAVL

SEQ ID NO: 37170 - protein, 438 aa, unknown
  TnpB Polypeptide
MAARTSKTTQRITRAVTHIRLVEANPGKLAALDALAEVYLALCQQYVTLFCTQEAPDKFRASCFRTPLAERWQRVAMQQAAGIAQSWRTNRAQAYRDYLDALQDYQQRQAQGTLKPDEQAPLWCEWDVPTLRQRVIQATVNVVVLEPSTDSTFDYWLRISTLEKRHPIRVPVKLATYHIQALAGKTINSSVTLQRRPDGWWLTLSYDEMIAVQTDEDAPVVGLDVGIANFLTSSTGKHYGTFSGKLAERHQRDREKRRRKAKLRACLAKKGVQKLPSTSSKSGQRLARHVRQEINRAVNQCFAEHPDARFAYEQLSIRSMKFKARAMNAYLHASNLAHLPKQIAWNAAKRGVRATWVKSAYSSQECSRCHFVDRANRPNQQTFRCQVCGLEAHADVNAATNLAGRVRDKEIACCTDQHEIKALLLQRHQQWKQQHGWS

SEQ ID NO: 37171 - protein, 279 aa, Shimazuella sp.
LKSRRNRVQTYTSQCNYPKQGRPTIEIVKNKIKLPKLGWVKFVQTREISGRILSVTIRRTPSGKYQVSILCEGCYLRSVPAQKEAVGIDLGLKDFAIFDDGTKINPSRFFRRYEEKLAKAQRILSQRTKGGSNWRKARIKVAQIHEKIVNKRHDFLHKLSTQLVHENQVISTESLQTGNMIKNHNLAKSITDASWSEFVTMLTYKAAWYGRTIVKVGKTFPSSQRCSNPDCRYKNKEVKDRNLREWTCPSCHEHHDRDINAAKNIVQEGLRFIAAGLAV

SEQ ID NO: 37172 - protein, 375 aa, Shimazuella sp.
MHKSFQFRLRPTKEQATLINKSIGCSRFVFNHFLSQWNEAYQETGKGFTYAKCSKLLREQKRELIWLKEVDSTSLQNTLKHVVDAFSRFFQKQNDAPQFKSRKNRVQAYTSQCNYPKNSHPTIEMNGNKIKLPKLGWVKFVKSREISGRILSATIRRTSTGRYNVSILCEGSYRRAVPAQKEAIGIDLGLKDFAVFDDGSKVNPSRFFRRYEQKLAQAGQVLSRRKKDGSNWHKARIKVARIHEKITNARHDFLQKLSTKLVNENQVISMEDLQVKNMVKNHKLAKSITDTSWSEFVSLLTYKANEYGRTLVKIGKTFPSSQLCSCCGYRNREVKKLQLREWTCPECKAHHDRDINAAKNILREGIRLAAVGLTV

SEQ ID NO: 37173 - protein, 406 aa, unknown
  TnpB Polypeptide
MVAWCHYDDGMSRYRMYPTQAQEVLLLEQSGHARYVWNLGLEQRLMWRRWQGPTTGLAEQSRQLTEARNAFPWLADGSVTVQQQALRDLDQAWRNFFSGTHDRPTWRKRGQGEGFRVVGSQALRARQDNRRWSSVLIPKVGWIPFKRSRNLPEWKSYRITRDRAGRWHIAFAAVPDPIPTPGTGEVVGVDRGVKAAVALSTGEMTSPAGLRPKESERRLRLQRKLARSQRGSNRRAKVKLQIARLAARETDRRKDWVEKTSTNLARRFDVIRVEDLNVKAMTKSARGTAYRPGRNVRQKAGLNRGILANGWSHLVTRLEQKAPGRVEKVNPAYTSQTCNACGHVAKESRQSQSDFLCVACGHSDNADTNAARNIAAGHAVAARGDRAKLARSVKREPQHVRLLTVA
